United States Patent Application Publication US 2026/0092266 A1 - sequence listing, part 27

SEQ ID NO: 4465 - DNA, 15224 bp, synthetic construct
  variation 1299..1638: note = note, n is a, c, g, or t
  variation 9208..9438: note = note, n is a, c, g, or t
  source 1..15224: mol_type = other DNA
  variation 2697..3010: note = note, n is a, c, g, or t
  misc_feature 1..15224: note = Synthetic
  variation 8402..8691: note = note, n is a, c, g, or t
  variation 2224..2503: note = note, n is a, c, g, or t
  variation 9615..9911: note = note, n is a, c, g, or t
gcgttgcgctgcgtgtcttcaagaagcagatagcccatgatgatatggcctgccatctccacgaggcggcgtgccatgaagtcctcgaactctttgttcttggttccggtgacggcctctacggcgttggcatactgctgtgtcatgaatacgagcgtgctcttgatgtcctggtcttcggcgcagacttcctgagtctcgaactctttgatgcggctgaggtaagtgccggtggtgacgtggcgtatggcggccactacctggagctgcgtcgtgccctcgtagatggaggtgatacgggcgtcgcggtagaggcgttcgcagcggtagtctttcataaagcctgaacctccgtgaatctggatggcgtcgtatgtgttctggttggcgaactctgaagtcatccccttggccagcggggtgaaggcgtcggccaggcggctgaacatcttgcactccttcttctcgtcaggggtaagcttgcgttcgcgctctatgtcttcgaaagccttgtagaggtccacgtaacgtgcacaggcgtagaggagtgcgcgcgaggcgtcgagttttgctttcatcacggccaggatttcgcccactgcggggaagtcgatgatggctttgccgaactgacggcggtccttggcgtaagagagggcttcgcggtaagctgcctcactgagacctacggactgtgcggcgatgccgagacgggctccgttcatcagagccatgacatacttgatgaggccgaggcggcgtgagcccaccagctcacagggagcgtccttgtagacgagctcgcatgtgggagaacccttgatgcccatcttgttctcgatacggcgaacggtgacgccaccattgcgcttgtcatagacgaacatggagagaccgcggccgtcgcgcgaaccctcttcggagcgtgccagcacaaggtggatgtcgctgtcgccgttggtgatgaagcgtttcacgccgttgagcacccatgagccgtcctctttctgagaggctttgagcataacgctctggaggtcggaaccggcgtcgggctcggtaaggtccatcgacatggtctcgccgttgcagacgcgcggcaggtagcggctgcgctggtcttcgtcgccgaactcatagagggtttcggcgcagtcctggaggccccagaggttctcgaagccggcgtcggcgcggctgacgatatcggcggccattatataaggggtgatgggaaagttcagaccgccgaaacggcgcggcatggccatacccatgaggccggccttgcggcaggcnnnnnnnnnnnnnnnnnnnnnnnnnnnnnnnnnnnnnnnnnnnnnnnnnnnnnnnnnnnnnnnnnnnnnnnnnnnnnnnnnnnnnnnnnnnnnnnnnnnnnnnnnnnnnnnnnnnnnnnnnnnnnnnnnnnnnnnnnnnnnnnnnnnnnnnnnnnnnnnnnnnnnnnnnnnnnnnnnnnnnnnnnnnnnnnnnnnnnnnnnnnnnnnnnnnnnnnnnnnnnnnnnnnnnnnnnnnnnnnnnnnnnnnnnnnnnnnnnnnnnnnnnnnnnnnnnnnnnnnnnnnnnnnnnnnnnnnnnnnnnnnnnnnnnnnnnnnnnnnnnnnnnnnnnnnnnnnnnnnnctggtggtcgacgtcctcggcgttttcggcaacgatgtcgccgcagatttcgcccacaacttcaagtactttgtcgtacgagtcgatggcgtcgtcatagttctggggagcgtagtcgtagttttccttgtcgcggaaatcgcgctctttgagagagactatcttctccatcatcggatgggtgagatagtgtttgagttctgaattatcagtataaaagttagccattacttcgagttctttttgtagtatttgatgagtttgggcacaacgtcttccatcttgccggtgatgacatagtcggcgatggtgttgataggtgcgttgggatccgagttgatggagatgatgatggaggagtcctgcataccggcgatgtgctgtatctggcccgagataccgcaggctatgtagagcttgggacgcacggtgacgccggtctgtcctatctggcggtcatggtctatccatccggcatcgacggcggcacgtgaggcacccacttcgccgccgagcgtctcggccaacttctgcagaagttcaaagttctccttgctgcccacgccgtagccgccggccacgatgnnnnnnnnnnnnnnnnnnnnnnnnnnnnnnnnnnnnnnnnnnnnnnnnnnnnnnnnnnnnnnnnnnnnnnnnnnnnnnnnnnnnnnnnnnnnnnnnnnnnnnnnnnnnnnnnnnnnnnnnnnnnnnnnnnnnnnnnnnnnnnnnnnnnnnnnnnnnnnnnnnnnnnnnnnnnnnnnnnnnnnnnnnnnnnnnnnnnnnnnnnnnnnnnnnnnnnnnnnnnnnnnnnnnnnnnnnnnnnnnnnnnnnnnnnnnnnnnnnnnnnnnnnnnnnnnnnnnnnnngccgtagccgccggccacgatgatagggcttcctttcaggttcactttcgacttctccacgtggcggtcgatgatttccaccacgaaatcttcgggagaagtgtatttgcccgggtcgaggtcaattacctcacctacatagttcgagtcgcgcacctcgcgtttcatgacgccttcgcgcacggttgccatcnnnnnnnnnnnnnnnnnnnnnnnnnnnnnnnnnnnnnnnnnnnnnnnnnnnnnnnnnnnnnnnnnnnnnnnnnnnnnnnnnnnnnnnnnnnnnnnnnnnnnnnnnnnnnnnnnnnnnnnnnnnnnnnnnnnnnnnnnnnnnnnnnnnnnnnnnnnnnnnnnnnnnnnnnnnnnnnnnnnnnnnnnnnnnnnnnnnnnnnnnnnnnnnnnnnnnnnnnnnnnnnnnnnnnnnnnnnnnnnnnnnnnnnnnnnnnnnnnnnnnnnnnnnnnnnnnnnnnnnnnnnnnnnnnnnnnnnnnnnnnnnnnnnnnnnnnncggcactcggggttgacgatggtggccacgatgtttccgccgaaggccgggcgaatctggtaaagcaagtcccggtattccgtgccggtcttggggtccttgtggtcgccgatttcaagggcggtgcagtcggcggtaaggccggagtgcagggcggaagaaacgcggggaccgaggtcgcggcctattgaggtggcgcccatgaaggcgatacgcggctctatctcgcggaagaggttgatgaggatggagctgtgcggaagcgaagtgtagggatagaggcggctgtcctgcaccttgtagatggtgtccacaccgtaggggaatatctgtttttcgatgtccttgaggttgtcgccggcaacgacggcctggagcttcacgccgagtttgtcggccagttggcgtcctttggtgagcagttcgaggctcacgtctgctacgcggccgtcttcatactcgcaatatactattatgttgtttttttctgacattttatgagacttttagccgattgtgtggttgacgataagttcctgtatgagctcttcgagagcctggtcggtgttctcgacgttgcgggcttccttggcggtgaagaccacgttctcgatggctttcacctttgtgggggagccggcgaggccgcactggttgaggtcggcgcccacatattcggcgttccactcgccgatgccgaggaacggacgtttctctatgaggggtttgcgcgcatcgtcctgagcgagttccgaaggggcggcggcatatttgaatttctggagattcttggcgttgcgcggacggcagggagcggcgctgccgttgacggtcactacgcagggatagggtgcgcggacggtctccacgccgttttcgagccggcgcttcacggtcactttgccgtctttggcttcgatgatctcctcggcgtaagtgacttgcgggaggttgagtttttcggcaatctggggacccacctgcgcggtgtcgccgtcaatggcctggcggccgccgatgatgaggtcgaagttgcctattttacgcacggccgtggccagggcgtaggaagtggcgagcgtgtcggcaccggcgaaagcgcggtcggagagcactatgcccccgtcggcaccgcggtacattccctcgcggatgatttcggctgcacgcccggggcccatggtgagcaccgtgacggtggtgccgggattctcgtctttcagtttaagcgcttgctcgagcgcattgagatcttctggattgaagatggcaggaagggccgaacggttgatggtaccgtcttccttcatggcgtctttgcccacgtttctcgtatcaggtacttgcttggccagtacaatgatatttaaactcataattatatagtttgatttgtgtttattcaatctgggtcacggctccaagttaattcgcgtcagaaccggctgcaaaggtagtaaaaaatcctcaatgcaacaaatttttaagatagatttggtatttcggtcaataatagctaaatttgcataagaaattttagaatagatgagactcagacccatactcacggccataggggcggcgctgtgcctcgcggcggcggccgacgtggccgacgaagcgcgtggactgctcgccaagggggacgccgacagcgcctgcgaactcctccgcgccgaacttgacaagaaccccgacggcgggaacgccggcacactgaactcgctgctcggcgacgcagaactgatgaagggcaaccgcgctgctgcccgcgaggcttacaaccgcgcaaccaaacgaggcgtggccgatgcctaccgcggtctcggacgtatcgggatgcaggagtacgacttcagccgggcggccgccgacttcgcaaagtacaccgagctgaaaaacaacgccaagaaacccgcagaccccgccgtggagcaggaacggaagacggccctcaacgccgtgcagcatcttcgccgcgtcgacgatgtggtgattctcgacagcatagacatgccccgccagagtttcttcgaagcttacaaactgcccccttcctccggccgcttactcaccgccgaccgcaccccgaaccccgacgagatgacgagccactccgcctttataaatgaacaacaagacttcatgctgctcggagtcaccgatacggtggcagagagcaaaccgctggaatacatacgcctcaacaccggcgaatggcaacccgcggaagtggactccactctctacataggcaacttcgactaccccttcatgatgccggacggccagacgctatatttcgccagcgacggcgacctatcgataggtggcctcgacatcttcatggccacgcgcgatcccgaagatgacagctacatgcccccgatcaacctcggaatgccatacaactcgcccttcgacgacttcatgatggccatcgacgacgagcacaacgtcggctggttcgccaccgaccgcaactcccccggcggcgacgtgacggtctatatgttcattcccaacgagatacgccgcaacctcgatcccgacagcgtggacattgccgcccgcgcacgcatcgccgacttcagggccacttggcccgaaggcgccgactacacggagttgctggagaaagtggccgccatcgaccccgacgctgcacccaaagagagcatcttcttcccgctcggcgacggaactgcagtcaccgaccctgacgacttcaacgacgatgcccgcgaattttaccagcaatacatcgccgccgagtcggaactcgccgacgtcaccggcaagttgcgggagatgcgcacccgataccacgaccgcccgtcggaacggctccgcgacgagattctcggcgccgaagccgcccaggaacgctaccgcgagcagatgcgccgactgcgctcacaaaccgtcaggacacagctccgaagaaattaagaatcccatatactattatgataaccaacacctaacctaccatgacctcattcataatagcattactgacgctgctggtcggctctttcctctacggcaagttcgtggagaaagtcttcggagcagacggcaagcgcaagacgccggtccacacgatggccgacggggtggactacgttcccctcccgacgtggaaaatcttcctcatacagtttctgaacatagcgggcctcggacccatcttcggcgccatcatgggcgtgatatacggcccgtcggctttcctgtggatagtcttcggcaccatcttcgccggctccgtgcacgactacctttccggaatgctctcgctgcgttacggcggcgcctcgcaacctgaaatcgtcggtgccgagcttggcaaccgcgtcaagaacgtgatgcgcgccttcgccctgctgctgatgattctcgtcggtgccgtcttcgtctacaaccccgccgacctgctggccatgctcaccccggaaagccttgacaagaccttctggatagtgctgattttctgctactacatgctggccacgcttctgcccatcgacaagctcataggcaagctttatcccctcttcggagtggcattgcttttcatggccgtcggcatcctggccatgctcttcgtgcaccatcaggccgtgcccgaaatctgggaccagttctataaccacaccgccaatccggagcagacgcccgtattcccgatgatgttcgtctccatagcctgcggtgccatttccggtttccacgccacgcagtcgcccatgatggctcgctgcatgaagagcgagaagcacggccgctggattttccacggcgccatggtgaccgaaggcgtagttgcactcatctgggctgccgctgccgtggccttcaccggcggttacgacaagctcggcgagtatctcggcaacggctcgcccgccattctggtgaacaacctttctgaaacatggctcggcacgttcggcggcatcctggccgtcctcggcgtcatagccgctcccatcacctccggcgacaccgcgctgcgctcagcccggctcatcgccgccgacttcctgcatttcccgcagaagaaaatcaggaaccgcctgatggtgtcggtccccatcttcgtgctctgcttcgtggtgatgctcatgccctacgacgtgctgtggcgctacttcgcgtggtgcaaccaagtgctctctgtcttcaccctctgggccgtaaccgtatggctcgccaagcagcacaagaactacttcatcaccctcatcccggcgctcttcatgacggccgtgacggtgacatacatctgcttcgcccccgaagggctctcgttgctgacacaggagttcttcggcagtgacataccttacacagtggccgtcggcgccgggcttgcggcctgctgcctctttttgggtctcttcgcgcgtttcctcaaaggacgcgaacccaaggtcacccttgaccccgaattatgattgattttgaagcaattacctcactttcggagtactataacctccatacccacacgcagttctgcgacggccacgcccccatgtcggaaatggctgccgcagccgctgcccttcactacaccacgctcggattcacgccacacggcccggtgcacatcgagtctccctgtaacatgagccgcgactacattccggcatacttcgccgaatgtgaccggctacggcaactttatgccgggaggatggaaatactgcgcggcatggagatagattacctcgacccgcgccacggcccgtcgtctcaatattacgccgacctcggcctcgactacagcatcggctcggtgcacttcgtcgccaaccggaaaggggaacagtgggactgcgacggctcgccggaacgcttcggccgctatgtgcgtgaacacttctgcggcgacctgcgttatgtagttgaaaaatactttgccgccgtttgcgacatgctgacacgcggaggcttccaccttctcggccacttcgacaagatagggcgcaacgccgatgccgtggagccgggcgtagaggactgcgaatactacctgcgcggcgtggaagacgtgctcgcctgcatacacgacaccggcgtcgccgtggagctgaacacaaagtacctcaaggataccggccgcctcttcccaaacgtgcgctggctcccgatggtcatggaaaccggcgccacgctcgtggtaaacagcgacgcccattaccccgacaagctcgacaacgggcgccccgaagcgctgaaattaattgaataacagaaagataattatgaaaacaataggcgacagcgtccccgacctgctgggacgcaacactgacggccaggaagtaagactctccgacttccccggcaagaacttcatcatctacttctaccccaaagnnnnnnnnnnnnnnnnnnnnnnnnnnnnnnnnnnnnnnnnnnnnnnnnnnnnnnnnnnnnnnnnnnnnnnnnnnnnnnnnnnnnnnnnnnnnnnnnnnnnnnnnnnnnnnnnnnnnnnnnnnnnnnnnnnnnnnnnnnnnnnnnnnnnnnnnnnnnnnnnnnnnnnnnnnnnnnnnnnnnnnnnnnnnnnnnnnnnnnnnnnnnnnnnnnnnnnnnnnnnnnnnnnnnnnnnnnnnnnnnnnnnnnnnnnnnnnnnnnnnnnnnnnnnnnnnnnnnnnnnnnnnnnnnnntcatcatctacttctaccccaaagacaacacgcccggatgcacggccgaagcctgcgacttccgcgacaactacgagacctttctcgagatgggctatgtagtgataggggtaagcaaggacagcgacgcatcgcacgcacgcttccgccagaaatacgaccttcccttcatcctcatcgccgacacagagcacaagctctgcgaagaattcggagtatggcagctcaagaagatggccggccgagaatacatggggatagtgcgcacaaccttcgtagtgaacgccgcccacgaggtgaccgacgtagtgaaaaaagtaaagaccaaagaagcctccgcccagctcttcgccctcctcgaccaacgcaacagccccaaccccgcctgacgtaaacaattccacaaaccccaccgcagctgccttcccttcgcaggcagctgtttttgcgtatatctccaaatgcccctattttataaaacgtctaaatcattattgaaattcattgcaagtcactnnnnnnnnnnnnnnnnnnnnnnnnnnnnnnnnnnnnnnnnnnnnnnnnnnnnnnnnnnnnnnnnnnnnnnnnnnnnnnnnnnnnnnnnnnnnnnnnnnnnnnnnnnnnnnnnnnnnnnnnnnnnnnnnnnnnnnnnnnnnnnnnnnnnnnnnnnnnnnnnnnnnnnnnnnnnnnnnnnnnnnnnnnnnnnnnnnnnnnnnnnnnnnnnnnnnnnnnnnnnnnnnnnnnnnncaagtcactcaccctgccgacatttaataaaatattaatcctaaaaatcattttggtaattcgataattatagttacctttgcaagtgattaagtgctgacgacttttcgtcgtagtaaaaagacgagagaaagaccgtagtcctcctctccaaatgttttcacaacggaataatcnnnnnnnnnnnnnnnnnnnnnnnnnnnnnnnnnnnnnnnnnnnnnnnnnnnnnnnnnnnnnnnnnnnnnnnnnnnnnnnnnnnnnnnnnnnnnnnnnnnnnnnnnnnnnnnnnnnnnnnnnnnnnnnnnnnnnnnnnnnnnnnnnnnnnnnnnnnnnnnnnnnnnnnnnnnnnnnnnnnnnnnnnnnnnnnnnnnnnnnnnnnnnnnnnnnnnnnnnnnnnnnnnnnnnnnnnnnnnnnnnnnnnnnnnnnnnnnnnnnnnnnnnnnnnnnnnnnnnnnnnnnnnnnnnnnnnnnnnataatccttattgtgatttgcttcttttattactttacgcggcaaagttaagcattttttctttaacctcaaaataaaataccgaaaaaatgaaaatattaggcttggatcttggcgtaggttctataggatgggctttaatcgagaccgacaccaacgataatcttttggatatcacaggcatcggttgccggatagttcctttaacgcccgacgaaaccaatggtttcacctcaggcaacggaaagacaaaatgtcaggaacgcactgtcgctcgcactatccggaaaggaatggacagataccaaatgcgccgggagcaattgtcggaagcgcttaaacgcttgcaaatacttgaccctcaacatactctgactaatcttcctcccctcgaattgtggggacttcgtgccaaagcagcttccgagaaagtcacactcaaagagcttggaagagtgcttatgcacatcaaccaaaagcgcggttacaaacatgccaaatcagacatgggcgattcatcgaaatctgactatgtggcacgtgtaaaccaaaatttcgccgacattctcgccgaaaatatgaccgttggccagcacttctatcacaaactgaaagactcaaaggcaatcggctccaagggaggcgaattcgtatcgttccgcatcaaggaaaatgtgttcccgcgcaaggcatacgagcaggaacttgacaccatcatgcaagtgcaacaagcctcctatccagacattctgactgatgccatcgtagccgaactgaaaaatataatattctatcagcggccattgaaatcgtgcaaacaccttgtgagtatctgcgagttcgaaaagcgtgaatttaaaaaccgggaaggaaaacctgtcaccgtaggaccgaaagtagctccgcgtacatctccgttggcccacactaccgccatttgggaagctgtcaacaatatacggctttcaaatccgcacaacagaaataaggcaacggaacttacaggttccctcttcgacaaagggaatcaacttccgcggcaagcacgattgctgcaacgcgacttcctcttgactccggaagaaaaaaggaccgtctttgacttcctcaacatacatgaaaaacttactgtcaccgacctcctgaaactgctcggactcaaaaaagcggatggtttcaaaccggacaaggccgtaggaaaaggcataaagggaaacacgactttcgtagctctcgaaaaagccctcgaaggaatgcctgatgctgaaaagcacctgcagttcgatctctctttgactgaaaaagttgacccggaaacaggtgaaatagtccaagtgatagaccctgcctatacacaacaaccgctctaccgtctctggcacaccgtttattccgtctccgataaagacgaactggccaaagctcttgaaaaaatcggaataaccgacccagatatagtcgaaaggctctatgccctcgactttgtgaaacccggatattccaaccgctctgcaaaattcatgcgtcgcatacttccacatctgatgcaagggcacgattatttcgagtcctgccaagccatcgggataaatcattccggaagcattactacagtagagaacgattcccgtccgttgcttgaccatctggagaatctcaaaaaaaacgaacttcgccaacctgtcgtcgagaagattcttaatcagatgattaatgtagtcaacggcatagtggaagaattcggacctatcgacgagatacgaattgagctcgcccgggaactacgcaagaccaaggagcagcgcgcctcgatgacatctaatctgtcaaaacgtgaacgcgaaaacaaaggtatcgctgaaaaaataacggagatgaacatcaatgcttcccgaacgagaatacagaagtaccgtctttgggaagaaaccggacatgtctgcatgtattgcggacagacggtgcccgcgtcgcaatttcttgaaggaaacggtgccgaaatcgaacacatcataccgcgttcactactgttcgacgacagtttcgccaaccgcacatgcgcttgccgcgactgcaacaaggagaaagggaacatgacagcgtacgacttcatgaacaccaaaagcgatgatgaattcaccaaatatgtgaaacgtgttgaagatctcttctcccgcaaaatcatttcaaaaaccaaaagagaccgactactcactccgggcaatgaaatccccgccgatttcctgaaccgcgatttgaccctcagtcaatacatagccaagaaagcgcatgaaatattacgcggaatagcccgcaacgtatggtccactaccggctcggtcaccgactttttccgccacgcttgggggtatgacgaaatccttcatgatctcaacatcgaccgctaccgcctcgggggccgagtcgggttggtgcaatatgaacacaatggccagacgcatcagcgtgaacgcatcaccgactggaccaaacgactcgaccaccgccatcacgccatcgacgcgcttaccatcgcactcacaagacaaagtttcattcaacgcctcaacaacctcaattcccaacgggggaatatccacgtcgaactgatggagcaaactgatgagttgcggaaaggtcgttccttgttggaggaatgggcacgtacccgtccgcatttccccgtttcagaagtgaccgccaaagtcagtgaaattgccatatcactgaaatcaggcaaaaaactcaccactccgggaaagagatatgtcattaagaacgggcggcgtaaactcgtacaaagccagatacttgtgccgaggggagctctgcacgaacaatccatctatggtaaaatcaagttgccgacagaaaaagtgaccgtcaaaaaatccttcgaagcagtcgaccgcatttataacagcaaaattcagtcggcagtccgcgcccgtatcgaacaacatgccggggacttgaaaaaggcagttaaatctcttaacacccaaccgctgacagtcatgtcacgcaacggcactcctaccgaaatcacaactgtaacgctgcttgcaaaccactacgtgctacgctataaagtggaaacgctgaaatacaaagatttgtcatcaatcatcgacaaggctgcacgcgaagccattgaaacccgcttcgccgaatgcggcaacgatgacaagaagtaccaaaaaagctttgccgacggtaactgcatcgtttcaccatgcaccggcatgcctatcaagactgtaagatgccttacaggcttgaaagaacaaagcgttgtcgctgtcagaaaagatgtttccggcaattgtattggttacgcaaagaccggtggaaacaatcatgtggcattctaccaaaatgcaaaagggaaagtcgattcgcttgtaacgtcgacatggatagccacaaaacgcaaacgcctgggcgtccccgtggttatcactgaccctgcatcagcctgggattacctcgctgaactccccgaaatcgacgatgtgcgcgaagtcgcaatgtcaatgcccgaacgtgactctactttcattatggatatgaggatgggcgacatgtttatccttgggatgaccgatgaagaataccgggatgccatagctaccggtgacaaagcgacactgctcagacatctgtatcgtgtgcaaaaactcgcgattaattcctactatttccgacttcatacggaatcaactttaggcaaagatgaaagaattgatatttcaatgaaagctctcatacgagcgaaatcttttaatgccctaataagtcttcacccaagaaaagtaaaaatcgaccatataggaaaactaatcatgtataagccgatatgatcaagaaaaccctctgcttctctaataaaacacaactcacactgaaactcgggcagctggtaatccggcttcccgaaacttcagacgagcatagtgtcataacacgacctatcgaagatataggaataatcgtacttgaaagccgttttatcactatcacctcggcactcatggcctgtcttgcggaaaacaatgtcgccgttatgatttgtaatgacaaacatataccctccgccatgatgctgccactaagctacaattcgcagaccacgaagaaagcgaatgcacaaattgcatcttcacaacccttgaaaaaacagctatggcagcaaacagtgtccgcaaaaataagcaatcagggagcactgcttgccgaaaaatgttcagaagagaccggatgcatggctatatgggctaaaaatgtaaagagcggcgacaaggacaacctcgaagcgagggctgctgtcttttattggaagaatctgttcccggaaaattacgacttcgcccgaggtgacgatacacaccccataaattctcttctaaactatggctatgctatcctgcgtgctgtcgttgcccgtgctatcgttgcaacaggactaattccctctatcggactgtttcactcgaacaaatacaatccttattgtttggctgacgacattatggaaccataccgaccttatgtcgataaaaaggtctgtgaaataatcgacctttatgggcgcgaatgtggcctgacaaaggaaatcaagaaagagctcctttctattcccgttgttgatgtaaaaatcaataatctcagacgtccgttgatggtggccgtcaccattaccgtggcctcacttgcaaaatgctattgcggagaaatacgtaaaatttcatatcccgatatgtgatgtcgttcaacactcgtttcagtgaatataaaattatgtgggtgatggtatttttcgacttaccgaccgaaactaaaaagcaacgcagggatgccgctaaatttcggaaatacctcattgaagacggatttacaatgttccaatactccatatatgttcggcactgctcttcaaaagagaatgccgacacacatcaaaagcgtgtgagccataatataccgggcgacggaaaagtttgcctgatgataattacagatcgtcagttcagtgagataaagatattcgaaggcacagcccgggttcaaccgatgcctgccgcagttcaacttgagcttttctgagcaagaaaataggattgaaaaatacagtaaaaaaccggtatcgagatatagcctcgccccggttttttattttgaacacgaacctgtgtaattcactgaataataacttttttacatacaatcggtttgtgttgtggttcgtattccactgcaaagttaataaaaagaaagcaaatcacaacgttgatgatgtccttcacttggtcg

SEQ ID NO: 4466 - DNA, 9955 bp, synthetic construct
  source 1..9955: mol_type = other DNA
  misc_feature 1..9955: note = Synthetic
tttatcgatgagatgcgtgtcgaggggaatttcttcgacttgcttgatgcaggattggcgttctgtttcaaacacctcaatctcagcggtaaaatcaccaaccgcagtcttcaacgcgaggagcgccttgaaattccttacaaggcactgagagaagccataattaactcgctatgccatcgtcagtgggagaaatataatctgctcaatagcatcgctatctatgatgaccgcgtagaaatcggcaatcccggtatcttcccttctcagattacacccgaaaacatcaaggaacctcacgactcctacccctataacgtcaaaatggcagaagcactctaccgctcaatgtggctggagaattggggctcaggagcaaaacgcataatcgaggcttgccaggaacaagacgtagaagaacccacatggcgttgggatggcggcttcgtctacgtcaccttcaagcgaccggtaaaagcacatgagactgcaaaggagaacttagggggtaatgtcgctctaaaccctgacaatgtcgctcaaaatgtcgctcaaagcacaaccaatgtcgccctaaatgtcgctcaaaacaaaaatgatgtcgctcaaagcctggatgagagaatactacaaatcataaaatcaaattcatccatcagacgcgaagatattgcagctcaactttctgttaataagaaaacggtagagcgacatctaaagcatctgggcattaagtgggaaggtcactcaaaaaccggacattggagaatttcaaagtaataatatcaaactgaaagtaacacataaacatttttggcgttttggtccattttatttgttttgggagttatttcatgatttcactttcacgagcatcaaaatgctctgggggcggatgcaatgggggggcagtgggaggggaaacagagggggtcagatgcagaggaggatgagtagctgggctattactacgcgggtgaacatcgtcagggggtagactgtggcgtaggccactgcgggattgtctccttctatcgtgtcggagacgtaggtcagagccatgggattggccatcgctccgcagagcattccgcaacaggcaccgaagtcgaggcgcttgattcgcattgccagccagcccgtcatcagtacgggtaacactgtgattataaaaccgaggccgacccatagtaatccgtcgccggcaatcagtgtctcgaagaaactgcttccggcttccaaccccagacaggccaaatagagagatagtccgattccgcgtagcatgagattggccgaacgtgtagtataggtcacgatatgaagcgtcggaccgaaacgtcccatcagaatacccactactatcggacctccggccagtcccagtttcatcggagttgtcataccggggatgtatatcggtattgatcctaagagcaagccaagcaacattccgataaatatcaccgccatattcggatcattcagggcggccgacctgttgccgagcactttcgccacattttcgatagacttctcttcgcctactactgtcagtcggtcgccgagctgaagcactaatccgggagtggccagcaatgtcacaccgctacgggtaacccgactgatatttataccgtaactattgcgtaggcgcaacgatccaagacgcttaccgttgagcgacgggcgcgtgacggatacgtgacgcgacaccagtttactatcgattgcattccagtcgatctcttcattgttccagtcttcattctcatgctcgccaaatagcatcgtcaggagtggcagatcctttacggtagtagccacgagtatgcggtcgccatccttcaggcggagttcggatgtaggaatcgacactactccgtcgcgccagagacgagagattacaaaatgcgtgccgcctaccaattccgcagcttccttaacggtcttatcaaacagagcaggattcactactttgaaggcatcgatatgagtcttattagctgcccctgattccggcactaccagattctccttccgggcaacgcatttgcggaggaaaatgagtcctaatatcacgccgaccacacctaagggataggtgactgcacaacttagcgccatgccgctggcagggagtcctaattgctgaagcgactgctgagcggcagccagagccggagtattggtagtggcaccactcagaacgcctaccatatcggatatcggcaccgtccaaccgtaactgatagccaccgtcagaagcgtaccgagtaatatcactgtcaaagccaacagattcagttggacgccaccctttcggaaagagctgaagaaaccgggtccgacctgcagacccaattcatagacaaaaagcaccaatccgaaattctgagcaaacacgagcatcgaagggtcgatcgacagaccgatatgacctgcaaagataccggcgaaaaacacccaagtcacacccagcgatatccccttaatcttaattttacccaatccgagcccaaccgcgattataagagcgatgataatcacagcctgcacagccgaatgatcaaccaatatcgagcgaatccattccataagtgaatatctctttataataagagagagcgcttgtggcgccctctccgaatgttttcacaacggataaaatccttattgtgattagcgattttttagttttgcatcgcaaatttatgaaaaaaattcttgtggtgcaaatttttttattacttttgtgatataattcgtagtttactcttttaccaacgaatatatcctcctccatcttacgatgacgcagtaaaaaattattgtatcattatcaaataatcaacatcataaaacataattaacaaaacgttccggacgtcatgagaatactcggacttgatttaggaattggttcagtcggttgggctcttattgagaccgatgataactatatccccatccgcatactcggcatgggaagcagaattctcaacctcacccctgatgaaatctcagggtttgagcgaggtaagggggaatccatctgtgcacagcgcactttgaaacgcactgcaagaaaaggctataaccgctatcagcaacggcgctcacttttacggaccctattggatgccgccgggatgcttccttccgaggatcagatgctccatatgcccccgctccggctatggggacttcgcgcagatgctgctaatgacgattcccatatttcacttactgagctcggcagagtcctgcttcatatcaaccagaaaagaggctatcgccattcacgcgctgaagtggcttcgggcgataagaaacagactgattatgtcgaagccgttgaacgccggcataaagaaatcagggaagccggaaagacagtcggccaattcttctatgataaattgctcgaatccaaatacgttctttccaacggcactgagaccgtcaacttccgtattaaaaacgaagttcttccccgcagggcatatcaggaagaattcgatagaataatggaggtgaaacgcaagagattccctgacgtactcaccgaaaacctcatcgaactcctgcgcaatgcaatcttctatcagcgtccgctgaaatcctgtaaacacctcgtcagtctatgcgaatttgaatcgcataaatactcgacagccgacggccgggaagtcaacggaggtccgaaagttgcgccacgcacttctcccctttcgcagatcgtaaggatttgggaggttatcaacaatatagtccttaagaattccgctaataaatcgagaaaggacaacccattagtaggagatcaatttaaggaagcttccgaacctaaggcagcccgactgctcgaatatgaatatcgtcctgacgcggaagaacgccaacgcatcttcgactatcttcagaccaacgacaaaatgagttttacggctcttttgaaacttctcggtctgaagaaatccgacggctttactctcgacaaagggagcgaatccatcttcaaaggcaactccaccctcacatctcttcggaaagccctgtcagagattcctaacgctgaagagcttactcaatttaacctatcgacagagattgagactaaggtggataaatctacgggagaggtcagcagcacacacgaagtaatctcaccggattatatccatcagcccctctatcgtctttggcatcttctatactcaattgccgataaagatgaattggcgaaagcacttgagaagcaattcggcataacagacgtcgctaccgtcgatgccttgtacgctatcgacttccgtgctcccggctactccaaccggtcagcgcgctttatgcgacgcattcttccgggcctcatggcaggcaagatgtattccgaagcctgcgaagagataggaatcaatcactcctccagccttacaaaagaggaaaatgaaaaccgcgagctcaccggccatctcaagttgctgcccaaagggagcctgcgtcagcccgtagtagagaaaattctcaatcagatgatcaatgtggtcaacgctctgatcgacgaatatggagagattgatgaagcacgcgtagagttagctcgtcagctccggcaatcggcatcccagcgagccgaggcatcctcagcaatctccaagcgagaaaaagacaataaggtaattgctgataaaatagccgaatacggacttaaggtatccagaaaccggattcagaaatataggatgtgggaagagactggccatgtctgcatgtactgtggtcagcccgtcggagtaaaagaatttcttgaaagcaacggtgccgaagtagagcatatcatcccgcgttcgctatacttcgacgatagttttgccaacaaaacgtgtgcctgccgtcgatgcaatcgcgagaagaaaaattccaccggttatgatttcatgaaatccaaatcagaaaaggaatttgaatcatatctttctcgggtagactccttcttcaaagataaaaggatcggcaagaaaaagcgtgattatctgctgatgaaaaaagaggagatccccttggattttatcaatcgcgacttagggcttacccaatacatctcacgcaaggcacgagagatactgaccgaagccatccggactgtcaatgcctcatcgggcactgtcaccgacttcttccgccattcatggggatacgacaatattctgcatgaactcaacgtagaacgttacagtcagggcgagatgacagaaatgactgaatttgaacataaaggacagatccatagcgaacttcgcatcaaagactggaccaagcgccttgatcatcgtcatcacgcgattgatgcgcttacgattgcacttactcgtcaggcttatatccaacgccttaataatctttcagcgaataaagacgatctgctcggaatggagattcttgagacgggtcatgatcttaagcgcgaacggcggcttgtgcaatgggcggagactcgcccacacttctcagtggaggatgtgaggaagcatgtcgcggagattgcagtgtcgcagaaaagcggcaagaaactgacagttccgggaaagcgaagaatccgtcgcggaaggaagaatgtaattgtgcagagtggtctggcgattcctcgcgggatgttgcataaagagactatctacggacgtattctcatgcccgatggagagaagaaagtgaaggatgtgtttgaagatcctacgcttatcgtcaatgccaaagtgcggagtctggtagaagagcgacttgcggcacatggcggagataccgtaactgccgtaaaatcgctgaaaaagaatccgctcaaactgactacgcgacacgggatagtcgaagtgaaaagcgtgaaatgcaataagcgagtatttgtggtaaagactccggtagagggacttcgacctgtagacattccgtcgatcatagattcccacgtccggacattggtagcagaacgctatgcggaggttgggaatgatcaaaagaaattccaaagtagtcttacggaacggcccctttacttcaataactcgcaaagtcctattaagtcggtaagatgcacgaccgggttggcggaagcttcaatggttgcgccacgtcgggattctgacggaaaagtcacaggctatgccctatccgggaacaatgatcatgttgcgatctatgaagatgaaaacggaaagatcaaaactcaggtcgtcaacttctggactgcagttaagaggaagaatgcaggtctgccgattatcatcacagatccacaacttggttgggacagacttatggaaattcctgatgaggagattcgcgaagaattatcgaagagcctacctcaacctaattggaaattcctccaaagccttcgtatgaacgagacttatattcttggtcttacggatgaagaattctctgacgctatggcatccggcgataatgcattgctattgtcacatctgtacaaggtgaccggggtatcggacaatgactataatttccgtttgcacactgacaccacaagtatcaaggacaagccttacctaagtgcagggttatatcgtagattgacatccttcaaagcgattgctgaccagaatccaaagaaagtccgagtatccgtaataggagaactaacatatgattaagcagactctactattctcaaatccggcttatctctcagtcaggaacgggcaactcgttattgatacccgatccgaccgaggggtagcgacgcggccgattgaggatataggtctgatagtcatcgaaagtcatgcggtcactctgacctcagctctgatggcagcacttactgacaacaatgtgtcgattgtgttatgcgattcaaaacatttgccttcggctctgatgcttccactttcggggaatacgctactgactgagcgaacccgagcccaattatctgcctctcacccgctgaagaaacagttgtggcaacagacggttgttgctaagattcagaatcagggagccattctgaaacatcgtaatcccaaggaatcctcatgtatggaagagatggcaaagattgtaaggagcggagatcccgataatcttgaggcacgtgcggcagtgttttattggaagaatctctttccggatcgaccgggatttcttcggagtgatgaagatgattgtgtaaattcgatgctcaactatggctacgcgattcttcgggctgttatcgccagagcattggtgggagcgggaatgattccgcatgtaggtatcttccatcgcaacaaatataatgcctactgccttgctgacgatatcatggagccctaccgaccatacgtcgacaatcttgtaagtcatatgatagattgccatggtattcctgaggaactgaccacagagcaaaagaggctgctgctgtcaatccctacgcttgacgtagaattaggaagagtgaaacgcccattaatgattgcagcagagatgactgctgcttcacttgcccgatgctacacaggggagatccgaaaaatcacctatcccgagataaaatgaaaccgacttccgaccgatttaattcctatcagataatgtgggtagtagtattctttgatttgccgaccgaaaccaaaatccagaggaaaagatatgccgactttcgaaaggcattgatttcagacggatttacaatgtttcagtactcaatctatgttcggcattgtccaagccgtgagaatatggaagttcacataaatcgcgtgagtggaataatcccggaagaaggaaaggtgtgtataatcacattgacagataagcaattttcatcaatcaaaatatttgaaggtcggaaaaaggctgatccatgtgtagaagccatccaacttgagatatggtaataccccctctacgaaaaccgaaactacaaaataattaaaaaagatgtgtcctcggacacatctttttaattcctatcacctcgcataaaatattgtccatcaatatcttacacagattcagttgtgatagatagtgcaaagatactaaaaatatcgctaatcacaacatatgtcggcaaataccactgtggataagagttgtgatagatagtgcaaagatactaaaaatatcgctaatcacaacagattcctgatacgtccgtttaaaattcggttgtgatagatagtgcaaagatactaaaaatatcgctaatcacaacaaattccaaatcatcaatctttaatttcttgttgtgatagatagtgcaaatttaaataaaaatcgcgagatttttacaccggcaggataaaaaatcaaggctggcgccttgattcccgtcccctcctgtgtgctctttgtcactattttattaatttggaggaaaattttcaaattcaaaagatatggacaggaaccgaacagtcgacggccttgatgtccacaaagatagcatttatctttgtattatggggcatgatgaggcaattatttttgaaaaaacctacggagtactgactcctgacctacgccggatgtgtgaggacatgttggagcgtggggttacggaggttgccatggagagtacagcagtctactggataccggtatggaacgaactttgcgagtcaatggagcttaagcttgtcaatccctacttcataaagcagcttcccggccgcaagagcgatgtcaaggatgcgcagtggatagcggagtgtttgctcaagaaccttataaaaggtagtttcgtaccggaacccgttgtacaggagatgcggaaactcaaccgccgtatcatggatctcaacgaggacatgacttataacaccaacaagcttgatgcagctctccagcgatgcggcttccgcctgagcaactatgtgagccatatacagagcaagagctatcagtctgtcctgaagtccatcatcaacggcatcagagatccggaagacctggtgaagcttgtacacggaagaaccgtgaacaaacatggacgtgacacaatcaaagcagctgtcacaggtcttttctcggatacggacctcattatattccgccagacaaaggaggtcatcgacatgatagagcgacagataacggaatgccagaatgaactgacggcactttgtgagcggcatttccccgaacagtacagacgtctgaagaccatccccggagtcaaggaacgcgcagccacagcaataattgcggagacaggggttgacatgaagatgtttgccacggcggcatgccttgtgggatggtgcgggctcagacctcgcaacgatgtgagcaacggacggtataagagccgcaaagtgacgcacggcaacaggtacctcagacagatactcattgagatcgcatggagcgcatcaaggacccgaaactgcttcttctcaaatttcagctatatccagacaacagtaaagaagaagagcaagatgaaaattcaggtggccatagcacgtaagatcttagttgccgtatggcacatgctcacaaaagaagaggactttattgacatctatctcaaacgccttgaaaaagagagggagatggatgagaaactgaaaaaccttaattcaaaagcggttgtctgaaccacccgacataccttccgctgtaatgtaattaactttgtggtgcatcatagtccggcttacaaatttacgtaggcagtggaaggagttggacaccggcataagctaaccaagcttgtagaggaaagtaacaatcttatatctgattctgaggcctatgcctcggaatgtgacattatacccttatattacgaaattagcttagtttagtaccttgttaaaagaggatacccgattacgttttagaggaaagttacaaataatcttccattctgcctgtcagcgcattgcagttttaagactaaataagggaagacttaagactaaataaggttgga

SEQ ID NO: 4467 - DNA, 9746 bp, synthetic construct
  source 1..9746: mol_type = other DNA
  misc_feature 1..9746: note = Synthetic
actgattcacgccaaaagtggccgtgagagccacgtcttcccgtgaaactcccgaatcctctccactccacccgcaaaatcactttagaacacaaaaaccactacatggcgagaatcaaaataagtaaagtagcaaaagatctcaacgttgccctgcctaccgttgtagagttcctgcgaggcaaaaacatcgaggtcgacgacaaccccaacgcgcgcatcgaggaagacgtcgttgagcttctggaaagctcgttcaagaacgaccgcgaccagaaaaacaagtcgcagcaactctcgaccgaccgcgcccgcgagcgcgagaaggccaaacccgctcctgcgccgcgcgaggtagaggaggtgcgtcttacctccgaaatcaataagccgaagattcttggcaagatagagcttgacgctcatggcaaccccatccgtaagcaggcgcccgcacctgctcccaagcctgcgccgagcgcagaggtgaagccggaaccgaagccggcagttacctccacgccccagccggctactcaggcagcccctaaacccgctcctgcgcctcaggccgagcctaaggccgttcccgctcaggaaccccctgtggcgaaggctgaaactgctcccgcccccgcatccgctcctaaggagaatgccgcaccggcagctgcccctgctctcgaagctccaaaggccaaggaagaggaaatcttcaccgtcggcctcccggccaacggccccacaatcaacgtggtcggcaagattgacctttcggccatcaaccagtccacacgccccaaaaagaaatcgaaggaggagcgtcgcaacgagcgcatagccaaggcaaacggcggcaacggcgccgcttccgaagccggcggcgaccgcaagaagcgccgtcgcatcggcggcaaggagaaaatcgatatcgagaagacctcgggccagcagtccgggcagggcggaggccgcggccgcgacggaaagtcgggcaaaggcggcgaccgcaaccgccgcggtcccggtcataacgacgtcaacgaagaagacgttcagaagcaggtgaaggaggtgctcgcacgcctcaccgccaaggataaaggtcagaaacgtggtgtgaaatggcgtaaggagaagcgcgaggccatagccgagcgcgaacgcgaagccgccgaactcgaagcagcagagagccgcgtgctcaagctcacggagttcgttaccgccaacgacctcgcctcgatgatggacgtgcccatcaacaaagtaatcggtacctgcatgaacatcggagtgatggtttccatcaaccagcgtctcgacgccgagaccatcaacctcgtggccgaggagttcggcttcaagaccgaattcgtttcggccgaggtagtcgaggccatccatcaggaggaagaccaggcggaagacctcatggcccgtccgcccatcgtcaccgtgatgggccatgtcgaccacggcaagacatcgcttctcgactacatccgcaaggctaacgtaatcgccggcgaggccggcggcatcacccagcacatcggagcctacaacgtgacgctctccgacggccgccacatcacattcctcgacaccccgggccacgaagccttcaccgccatgcgtgcccgcggcgccaaggtcaccgacctctgcatcatcattgtggcagccgacgacgatgtcatgccccagaccgtcgaggcaatcaaccacgcctcggccgccggagtccccatcgtgttcgccatcaataaaatcgacaagccggccgccaaccccgacaaaatcaaggaggaactggccgcaatgaactacctcgtggaggaatggggcggcaaataccagagccaggacatctcggccaaaaaaggtatcggcgtggaggagcttctcgagaaagtgctcctcgaagcggagatgctcgaactcaaggccaatcccaaccgcaacgccaccggttcgatcatcgagtcgagcctcgacaagggccgcggctatgtggccaccgtgctcgtgcagaacggcacgctccgcgtgggcgacgtaattctggcaggcacacactacggcaagatcaaggcgatgttcaacgagcgtaaccagcgcatcaaggaggccggccccgctgagcccacgctgattctcggacttgacggcgctcccaccgccggcgacaccttcaacgtgctcgacaccgagcaggaagcccgcgagattgccaacaagcgccagcagctgcagcgcgaactgggcatgcgcacctccaagcgccttacccttgaggaaatcgcccatcgtcaggccctcggctcgttccacgaactcaacatcatcgtaaagggcgacgtcgacggttccatcgaggccctcagcgactcgctcatcaagctttcgacccccgaggtgcaggtcaacgtgctccacaaggccgtcggcgagatttcggaaagcgacgtcacgcttgctgccgcctccgacgccatcatcatcggcttccaggtgcgcccctcgcaggctgcgcgtcgcgacgcagagcgtgagggagttgaaattcgcctctattcggtcatctatcaggccatcgaagaggtgaaggacgccatggccggcatgctcgctcccgaggtgaaggaagagattaccgggtcggccgaagtgctcgagacgttcaagatttcgaaggtcggcactattgccggagccattgtgcgcgaaggcaaaatcaaacgttccaacaaagtgcgcctcatccgcgaaggcatcgtacgctacaccggcgagctcggctcgctcaagcgcttcaaggacgacgccaaagaggtcgttgccggtctcgactgcggtctttccatccagggttacaacgacatccaggtcggcgatatcatcgaaggcttcgagcaggtggaagttgcccgcgccctctgatgtagcgctccgcagctctgcatccggccggaattccggcacaccttgcaatacaccccgatatggccacagcgcatatcaacataggatccaacctcggcgacagccgcgcctatctggcgcgtgcggtcgccggggttgccttattgtcggagccctccgggcttcaggtatccgacataatcgaatcggagccgtggggcttcacgtcgtcgcatcgcttccttaacgtgggaatgaacatccataccacgctcagtgtgcccgagcttatggagcggttgcatgccgtggagcggtcgatttccgatgctccccaccgccatgccgacggaagctatgccgaccgcactgtcgacatcgacttgatttgcctcgacgatactgttgtgcgtcagcccggcatcgaagtgccccatccgcgcatgcatttgcgcgaattcgtgctgagacccatgattcagctgtggccgcagtgggttcacccccagctccggctcactcccgccgaaatgcttgccggactaaaaaaaatgagctaaatttgagtgtcggcctttccttcggcccgacagcggaacaatcccctcttaccaagccccatggagcaactgatgcaatttgtatggcagcaccgcctcggtctccgtggcggtcagaccactgtcgacggccgtcgcgtctgcgtcgtggaccaggggatactcaacgccgatgccgggcccgactttttcaacgctaccgtggaaatcgacgggcagacctgggtgggaaacgtggaaattcatgtgcgcgcctccgactggttccgccatcaccatgatgccgatcccgcctacgattcggtgatactgcatgtagtgcaggtcgacgacgcgcccgtctaccgctccagcggcgagctgattccccagatgataatgcgttgcacccccgagggagcgcgccgctgcaacctgctgatcaaccatgccggggcgtcgctcccatgcagttccaccatcgcctcgctgccccatatctaccataccgactggcttacgtcgctcggtgccgagcgactttacatgaagagcgaacgaatccgcagtctcgtcgacgatagcgccggcaactgggaagctgccgcgttcgtcaccctcgcccgcgccctcggcttcgggctcaacagcgaacccatggaaatactcgcgcggcagctcccgttgaaattcctcaaccgccaccgcgacgagctgacatctgtcgaagccttcatgttcggtcaagccggccttattccgccgcccgacgcaggcgaggacccctacataacgcgtctgcgcgacgattaccgttttttcagccacaaatattccctgcggccgctcgcactcgcgtggaagatggcgcgtacccgtccgcagaactttccccaccgccgcatagctgccctggcacagaaagtccacgaaggcttctatctgatgagcagccttgtggaagccgacaccatcgaccgcatgcgccagctcttcgacataaccctgcgcggcttctgggctacacactatacattcgccccgacgcaggccacatcgccccgggcacttagccgcccttccatcgacacactgataatcaacgccgccgtacctctgcgccacgcctacgccacatatcgcggcgacgacgacacactcacctccgacatcgagctactccaggccatcgaacccgagaacaactccgtcacgcgccttttcgccgacgcaggcatcgaagccgccgacgccttcgatagtcaggccctcatccagctgcgccgagaatactgcgaaaagcgcaaatgcatctactgccgcttcggccaccgcatgctctccgccgaaatctcccgctaacccccattgataaaatgaaaaaaagagaaagggattgctccccttctccggatgttttcacaacggataaaatccttattgtgattcgctatagttagtattgcactacaaatttaaaattaaatttttatatttgcaaaaggtgactctataaaagtctcggatagaattttagccatttaatctgaagaattaacgcatataggccatgaaagtactcggtcttgatctcggggttggctcagtcggatggtgtctgattgaagtcgacggtaaatacaatcccattgaaatactcggtatgggtagccggatattgagtctcacacccgatgaatcctcaaattttgacaggggaaatggcgaatccgtatgcgctcaacgtacgttccgtcgcactgcccgaaaaatgctctgtcgctacaagatgcgtcggtgcctgttgcgttcgcagctggcgtttctgggtatgcttgactcggcagattccttgaacagcctgagtccactggaattgtggaaactgagatccgatgcggccacgtcaggtgtgcggcttacattgccggaaatcggccgtgtacttctgcatcttaatcaaaagcgaggctataaacatgcgaaaactgatgtggctgatgcgaaacagactgaattcgttcagggcgttaaccgtaattatgtcgagattcatgctgaagggaaaacttacggtcaacatttctatgaacgacttttagccacagctgctaccaccgacaaaggtgcgaaagtggcaaccttccgcatccgcgagaatgtgtttcctcgtcaggcctacgaggatgaattcgatacaatcatgcgcgttcagcgcaaattttatccggaaatactgaccgacgaagttatcgcaggattgcgtaatgcaattttcttccagcgtccgctcaaatcatgcaagcacctggtgagcgtatgtgaattcgagggaaaaaactatcgtacggccgatggccgcgaggtatttggcggcccgaaggttgctccgcgcacttcgcctctggcgcaggtgtgccgcctatatgaggtaatcaacaatattcgtctggtcaacgtacgcaataaggatgccgcccccatacctgatggtatcgtttcttcggaagcgagaaagagccagtatcagtttgtatttactgcggaggaacgtgaaagaatctatgaattcctcaacacccacgagaagatgaccgtgacagacctccttaaactcatcggtttgaagaggggcgacgggttcagacccgaccagtcgctcgggaaggggattccgggcaacaagacctatactgccctcttcaacgctcttgagggggtggaccgtcgcgatgagttgctaaggttcaatcttagattcatcgattggaatgccgactccgccacgggcgacatgcgtcgcgttgtatctcccgactttatcaatgaaccgctctacaggctttggcatacggcttattccatcgccgaccgcgatgaactggctgctgcgctcgccaagaacttcggaatcacagatccggctgttgtagaccgtatattcgccattgacttcaccggcgcaggtttcagcaaccgttcggcacgcttcatgcgcagaattatcccatatctcaccgaggggatggtctattccgacgcggctgccgcagccggtgtcaaccattcggcgtctgtgacagcagaggaaaatgccgcgcgcgtcctcgtcgaccatctcgatattattaagaaaggcagtctgcggcagccggtcatcgaaaaaattctcaaccagatgattcatgtggtgaatagccttatcgcacaatttggcccgatagatgaggtgcgcgtggagctggcccgctcgctgaaacagagcgctaaggagcgttccgatgcctctaccgccatcaatgcccgcgagaaagaaaacaaagccctcggcgagaagattgctgaatacgggctgatgccttcgcgaagaaccatccagaaactgcgtttgtgggaggagacggaacatgtgtgcatgtactgcgggcagcccgtatcggctacggaattccttacgggggatgccgaggtcgaacatatcattccgcgttcgatattcttcgacgacagtctctcgaacaagacatgcgcctgccgtcggtgcaacaaggccaagaacaatcgtaccgcctacgattttatgaaggaggatcataccgatgaggaattccgcgcctatatagcccgcgtggaggctatggcggaagcaaagaagatttcacggacgaagcgcgaccgtctgctctgcccgaaagaggaaattccttcagacttccttgaacgcgacctgcgccagtcgcagtatatcgcccgcaaagccatggagatacttcatacggttgtacgaaacgtttgggcgacatccggttcagtgacggacttcttccgtcatcagtggggatacgatcgcattctccatgaccttagcctggataaatatgcgttggccggtcttgtagaggaagttgaatacgagcataaggggcagacccaccgccgccagcagataaagaactggagtaaacgatttgaccaccgccatcatgctgtcgatgctcttgtaattgctctaacgcgtcagggctacgtgcagcgactcaacaacctcaatgccgagcatggaaacatccatgccgagcttgtgaaggaaaatgcagatttcacacgcaacaaatcgcagcttgaactctgggcttcgacgcggccacgtttcgatattgaaacggtgcgtaaggccgtggaggggattgcagtttcgttcaagtcgggtaagaaactcactacgccaggcaagagggctataatgcgtggtggaaaaaagactgtggttcaggataaactggtcataccgcgtggggccctccatcaggagacggtatatgggcttatccgacttcccgacgggcgaaaaaccttgaaatatgcttttgatacgccgacccttgtaagcgatccggctgcccgcaaagcaatccaggccatcttggagcattttggcggcaatgtaaaaaaagctctcaagagtcttcccggagaaggtcttgaggtgatgagaaaggggaagagagaaaatgtcactgaggtgtcttgccatcgcttcgaatatgtggtgcgtaaaaatgtcgctgcgctaaaatacaaggatatactgaaaattgtcgatggagcagtaaggcggagcgtcgaaggccgcttcgccgaatgtggcaataaggatagcgatatcagaagagtttcgcggaacggcccctcatacttccgggcgcgtttactcctatacgtactgtgcggattgccacaggcttaaagccgaaatccatggctgcagtgcgccgcgattcttcgggcaatcccataggttacgctaagaccgccagtaaccatcatatagccatttatgaggatagcgtaggcaggaaactctgctctgtgacctcgatgtgggatggtgtgttgcgacgtctcaatggcattcctgtgatagtgaagcatccggacgatgcctggaacttactgatggatattgccgacgaggatgtgcgcgagcggcttgccgcatctctgccacgcccggactggaagttccttatgagtctgcagatgaatcagatgtttgtgctcggcctttcggaggatgaattcaacgatgccgtcagaaacaatgaccgagcgactcttgccgcccatctctatagagtacagaaactcgctgacaatgatttcttcctgcgaagacatactaacaccactgccgatgatacgacggagtttaggaagatgttagatgtctatcgcttgtcgacgcaagccttttaaacctcaatccacacaaggtgaaaattaccccgaccggcgattttgcttatgattaaacagactcttctcttctccaaccgtgcctttctctcgctgaaactcaatcaactggtaatcgatacgaaatccgaaaggggaattttgacacgtccgctcgaggatatcggactgatagtgatagaaacgccgtgtgtaacgctgacatcggccctcatggctgagctgtcggcaagaaatattgccgtggtaatttgcgattcccgacatatgccttcaggaatgcttcagcctctcgaaggcaatacactcctgtcgcagaagtcgcgtgcccagcttgccgcatcacttcccttgaaaaagcaactgtggcagcagacagtcatggctaaaattcggaatcaggcgtgtgtactgcgtatgcgccgacaatgtgagactggatgcatggagcagtggtctaaaaccgtaaggagtggcgaccccgataattttgaggcccgtgctgccgtgtattattggaaaaatttgtttgccgatagtggattctttcgtggggatgacgataatccggtaaactcactactcgattatgggtatgctattctcagggctgtgatagctcgggctattgtcggtgccgggctgattccgcagtgcggtctgtttcatagaaacaaattcaacgcattctgtctggcagacgatgttatggagccctataggccctacgtagatatgcttgtatgcgagatcctttccagccatgcctgcagcgtggggttgactccagagattaaacgtgagcttctgggaatcccggtcctcgatgtaatgattggtggacttagacgacctcttatggtagctacgtccactacagtagcctcattggtaaagtgctatgaaggctcagcccgtaaaattttatatcccgaaatataacgttgttatgtcgaccgaacgcttcagttactatcgcattatgtgggttttcatatttttcgacctcccgaccgagaccaa

SEQ ID NO: 4468 - DNA, 22478 bp, synthetic construct
  misc_feature 1..22478: note = Synthetic
  source 1..22478: mol_type = other DNA
agctcaggttctagtatatgtggtgcggcggccgtcttggctacaaatagtgtagtaaacgctgattcaaacagagtcgccgtggcgatttgtacggttgtcgtctttggaagcttgggaatgtttctatatcctttgatctacaatcttggttttagcggacttagtgagctagaagcagggtttatgagcggggttagcttacacgaagtagctcacgcagtagcagcgggaaatgccataggagaagacggcgctagagttgctgtcattgttaagatgctcagagttttgatgctagtgccatttttgatcttgttaagcgtgtttagcttatattttttatgcgaaaagaaaaaaggtgataaaagagggtctttcccttacttcgcagtttggtttatagtggctttagtggtcggctcattaccgttttttcctagagacacgctgatgccattgataaatttatctgatacgtttatgctatgcgtggcgatgggagctcttgggcttactatcacgaaaaacgctttaaaaagtgctggaaaaataccttttatattggctactattttgtttttttggttgatgtttttaggatttattttggctaaaagttttatttgataagccttttaaaatagaagaatttaaaaggctgcaaatttattttttaagatcttttaaaaattcttctatattgtactttgctctgtaagcttcgctcataagatggatcatgatatcgcctaggtcgatcactgtccagtcatcgctgctctcaacgcctagaaattcttcaccatttggtttgagttcagtttttagatcgtctaaaagtgcgtaagcatggcgaccagtaagagtcgtggctatgatgacgaatttagctaaatattcgcgaccttgcatatctacaacttcgatattttcagcttttttttcatcaagtagtttcgtgatcctatttatcctgtcttgcatttgtttttcctcgtaaaatttgataacgtccctgcgtataagttctggaacattagaaaagtcaagctcgtctctgacttttgtcgatgagattttaacatttaaatctagtttttgcaaatttggcggtacataaatatcatcccttgaggcgactacgaactttactaaggtatttaaaatgttaaatttataccatttttctaaatttgcaagctgatccgcgccgatgatgagatagatcatacctggattataaatttttttaaaatgcaaaacgctttctagactaggtacggctctattttgttctatttcaaacttactaatctctactttttttaaatttccccaaagagtttcgcaccaaacaaggcgttttttgggatctgtgctaaatttagatttaaatggatttaaaaatgttgggacaatgatgagcttatctatatctaaaactagcaaagcggtttttactattgcgttatgaccgttatgaggaggatcaaaacttccgccgaaaattgcaatattcaatattttttaaccttttttttagtagaattaaacttaattatacccaaaaaaggaataaaatggcgcttaaaattgcaatcaatggttttggaagaatcggtagatgtgctgcaagaattatattaaataatcctgagtatgaacttgctgttataaacgataccgctgagcgaaagatgactagatatctactgaaatacgacaccgttcatggcgaatttgataaagaagtaaatgttatagatgataattatatcgaagtggacggtaaaaagatcatggtttattctactcgtgagattgagagtttagatctagagggtatcgacgttgttttagaatgtacaggtaaatttctcacaactgaaaaatgtgaagcatatctaaaacaaggcgctaaaaaagtagttatgagcgcacctgcaaaagacgatactcctacttttgtcttaggtgtaaattcaaacacttataaaggcgaaaagatagtgtcaaatgcgagctgtacgacaaactgtttgggtcctgttactagagtattagaagatctttatggtatagagaaaggtcttatgactactatccacgcttatacaaacggtcaaagtttagtagatgtaaagtgccgtgactttcgccgtagtagagccgctgcggcaaatataatacctactagcacgggcgcagcaaaagctatgaagcttgttatgccaagcttgaacggtaagctccacggacagagtgttagagttcctgtgccaaatgtttctatggtcgatcttactgcggttttgggtaaaagcgtgagtaaagaagagctaaacgctgcttttgtaaatgctagtaagacaagtctaaaaggcattatggctgttgattttgatgaaagagttagtagcgattttaacacttcgaattactcaagcatagttgcagccgatcttactcaagtaatttgcggcgatatgataaaagttatggcgtggtatgataatgagtggggttatacttcaagactcgtagagatggctaaatttataagcgagagatgatatgagcgagataatttctataaaagatataaattttaaaagcggtagtaaggtttttgtaagatgcgattttaacactcctatggatgagttttataatatcacagatgacagaaggatccgctcagcgatccctactatcagatacattttagatcaaggttgctctgttgttttggcgagtcatttaggacgtccaaaaaacggctacgaagaaaagttttctttacttccagtagcaaagaggttaggcaggcttttagatagagatataatctttgctactgatgtagtaggaaatgatgcaaagaacaaagtagcttctttaaaacaaggagaagttcttttactagaaaatctccgtttcgaaaaaggtgaaacgaaagacgatgaaaacttagctaaagagctaagtaaatttggggattattacgtaaatgacgcttttggagtatgccatagagctcatagctcggttcatgctattacaaaactatttgacgatgagcataaggctgctggatttttactgataaaggagattgaatttgctagaaatttgataaaaaaaccgactagaccgtttgtggcagtcgtgggcggaagcaaggtcagcggaaagcttcaagcacttacaaatttacttcctagagttgataaactcatcatcggcggcggtatggcgtttacctttttaaaggctattggtgaaaatatcggaaattctcttcttgaagaagaccttgtagaagaagctgcaaatatacttaaaaaaggacgcgaactaggcgttaaaatttatttgccagttgatgtagttgcggctcaaacatttagtgctgactctgctataaagtacgtctctgttcaagaaattccaaatggttggatggggcttgatataggtccagctagcattagactatttagagaagtcttgagtgacgcgcaaaccatatggtggaatggtcctatgggcgtgtttgagatggataaatttagcaaaggtagcataaaaatgagccatgctatagctgagggttttgctacttcagtagtcggcggtggtgatacggctgatgttgtagagcgcgccggagacgcagatgagatgacgtttatctcgactggcggtggagcgagtttggagcttatagaaggcaaagagcttccaggcgttaaagtattgctcaaagctgaatcttgagtctgatagcagcacgaagtggatgcttgcatactcaaataaatttagataatagactaacatatctgtttttactagaagcattaaagggtcataaatgatatatgcggcaaatttgaaatgtaaccacacaagaagcggttttttggagtatgcaggagagcttgacaacaaaataagcggtgagaatgtgatagtttttccgccttcaagcgcgtttttagaagctaagtttaaatttgttcaaggtgcacagaacttttatccgtgtgatagtggctcatttaccggagagataggggcagctatgcttgatgagtttggcatcactactgtcttgatcggacatagcgagagaagagctttaggagaagacgagccgtttttaaaggcaaaatttgattttgcaaagcaaaaaggctgggatatcatctactgtataggtgaagacgatataactcatatgaacggaagtacaaaagagtttttaacagatcaacttgaaaatatcgacttagaatatgaaaatttagtcatagcttacgagcctatctgggctattggtacaggaaaaagcgcaaattctgcgatcataacagatattttggattttatatctacaaaaacgactgcgccattgctttatggtggaagcgtaaatgagaaaaatatatgtgatataaaagctataaaaaactgcaatggagttttggtgggaactgcgagctgggacgcaaaaaactttataaatttgataaaagcttaaataaaaaggaaaaaatagtggtaatgaatggtaaaaaaggacttatagtcggcgtagcaaataagatgagcatagcttatggcatcgcaaaagcgtgtaaagatcagggtgcaactttggcttttacgtttttaaatgacgctatcaaaaagcgcgttgagcctatcgcaactgagcttggaagctctcttatatatgagcttgacgtaaataacaaagagcatttagactcattagtaagtaagataaaagctgattttggggatatcgattttatagttcatgctgttgcttacgctcctaaagaagctttagagggtgagtttatagatactacaaaagaagcatttgacgtggctatgggtactagtgtgtattcgcttataagccttactaaagctgttttgcctgtgctaaaagagggcggttcggtgcttactttaagttatcttggcggagctaagtttgtgccgcattataacgtaatgggtgtggcaaaagcggctcttgagagtagcgtaagatatcttgctcgagatcttggaaagaaaaatataagggtaaatgctatctcagcaggtcctataaaaacactagcggctagtggaataggcgactttaagatgatactaaaatggaatgaatgcaacgctccactaaaaagaaacgttagtatagatgatgttggcaaaagtggaatgtatcttttaagcgaccttgctagtggtgttacgggtgaaattcactacgttgatgcaggatataatataatgggaatgggcgacgccgtagtaggcgaaaacggctctactgtccttgcgtgggataaatttaaagagtaaatttgataaaagtgttttttattttaaaaacacttttcttctatagaaactctatttagctgtggtaagcttagctccatatcacgaatttcttttagagcatttttacaatgtgagttcatctttccattaagtccgtagtacgcccatacgccttttctttcaacgcttaaaaagccggcatcttttaagatttttagatgtcttgaaagacgtgattgtatcatttgcaaagaattctgtagatcgcatacgcaaagagtaccgtatttttgtaaaaaagctagaatttttactctactttcatcattcaaagccccggtaatttttaaaaaatcatctaaattttccattttattcctacaaaaatatatctattaatactccaaatattatagcgataaaaagcacacacgagataaatatcaacaagaaattcattttaaaaatgcgttttagtaagatgagttctggtaaagaacagcctcccccagatattaaaaagctcatcactgctcctaaagatacgccacaatccatcaaagatagacctatagggatgatggcttcgactctgatataaagcaaaactccgacaaaagcagctattacgacactaaagatctcgaattcttgtagataagtttgcaaaaattcttttggaacaaaaccgtggataagagctccgatgcccatacctatgacgatatacggaaggattttcttataatctttcagtacttttaaaaataaatctttatagctacttttcgtttgcgaatttgaattcaaactctgtttttgagtactgaaatttattattttagtttggcaacagttttgtttgcttatattgtgatgttttgatagagtattttgctcttctttgataaaatccttgtttaaaaatttatccgagtcaaatttagaaatactcaaagaaaatataaaaacaaaaacaaaaataaataatatataaaataagctgagttttaaaccaaaagatatgactagcatagcgatgattatcgggtttacaagtggcgaaacaaaaagataagccacgctcactccaaagcttacccttgcttttagcaaagcacttagcaaaggtatggtagagcaagagcaaaaaggtgttaaagctcctaaaaacatagctttgatatagctcaaaagagagtttgcacttagatatctctctattttcttagaaaatttctgatttaatagtgctactataaaagcaatcgcgataaataaaacagaaagttcaataaaataaaatataaaagctttaatgctttcaagaagtttttctaacatttttttccttgtagaatcgattttttgtaatcatatcataaaaattataatatatcaagatatattgatatattataattttcttttgaattaaaatagaaataactaagttgggggaaatgggagtaccctaactaaggtgttatttatctaatcattatctttcaaaatctcaggttcgccaaatagtctttttagctctctcgcatttgagttgagttgtgctagaagaggatcttcgtctttttttgtgaagactggtatgctgagttttgtctcaatgttttgagattgttctatagctaactttttatctgggacttgaggtagctcgctttctaaaagtttttggactgctttgttttctttatgctcagcttctaccttttttatttctatttttgcgctatttccaaagcatttgcgcagtatttccattatgatagcagatgaccttctaagaatttcttgatttttaccgcttgcacttgagtttagtatcaaaatattatctttaaattcgacaaatttcacgcactcatcaaagcaacttccaagatcaaaatctctatcgtaaatttgatttaaaaagtcttgataaggagtttgaattttctttatctgtatttgctctggtgctactatgcttgtttgcacaagctctagtttactgtctttgagctcttttatagcgtcatctatgctagttagattaaaagcttcaagcatcataaaaagcgctaaatacaaggcaaactcaggatcactgccttgacctagcatattttttgtttcagacaatatcctgaaaaatcgctcaaaaataagtatagaaaactttgagttttgatttataaatttatcttttaaatttataatgagttcgtcgatgatcagctctgcgtcgcttccgccaagttcttttaataaatttaaaagagcgtttttatctctgctggctactacttcaaggatctcttctatcttttgcggatcaagaagtccaagcatatctgcgactgatttttgactaacgaattcgtgagagaagataatggcttgatcaagtaaagttagagtatctctaaggcttccagatccacttcttgagagtatctcaagtgctttttgttcgtattttataccttctttgtttagtataaactcaagatgttttagtatatttgactttgatatcggtctaaatctaaagtgctgtgtacgtgagagtatcgtggctggaagcttaagcggatcggtggtcgctagtataaactttatgtattctggcggctcttcaagtgtttttagtaaagcattaaatgcttcttttgtgagcatatgaacttcgtcgatgataaagatcttaaatctagcgcttgatggagagtattttgtatgttcgatgagctctcttatatcatcgatttttctgtggctagcggcgtccatctcgatgatatctaggtgacgtccttcgtttgccataatacagtttgcacaaacctcacaaggatgtgagccgatacctttctcacaaagcaaagctttggcaaatatcctagcactgcttgttttaccacttccccttaaccctgaaaaaagatatgcatgaccaagtctgccagagtcaagtgcgtgagataagctattagctacaacgtcttgaccgataagctcatcaaagctctttgggcggtattttagggctagtgctttcaagctttttcctaatcgttcatacttccaagaagctcttcgttactcgcggttttaagcatttttgagtataagaatttgagcgcttctacgtcttccattgttgctatgatatttcttatagcccaaattttgcctaatttgtctggaccttgaagaagctcgtcttttctggtacctgattttaagatgttgatagctggataaattctcctatcgctgatgttcctatctagtacgatctcgctatttccagtacccttaaactcttcaaatatcacgtcatccatacgtgagccggtgtctatcagagccgttgcgactatggttagacttcctccgttttctatatttcttgctgcaccgaaaaatctttttggtttatgtaaagcgtttgcatccacgccaccacttaatactttaccgctacttggagttgcagtgttataagcacgagccaaacgagtgatgctatcaagcaagatcactacatctttacccatttctactaaacgttttgctttttctataacaagttcggctacccttacgtgatttagcgcaggcaagtcaaaagtcgagctaaatacctctcctcttactgagcgttccatatcagtaacttcttctggacgctcgtctataagaagaactatgagctcaacttctggatgatttctagcgatcccgtgagctagttctttcataagttcggttttacctgttcttggaggagcgactatgagtccgcgctgtccttttcctattggcgtaaaaaggtctaaaacgcgcccagttagcttcatcgggtcatattctaattttaatttttgagttggaaaaatcggtgttaggttgtcaaatagcggtctttctttggcttcttggatggatttataatttatagcttctatttttaaaagagcgtaatatttttcttgttctcttggctctctaacttgtccagtgatgatatctccgacacgaagagcaaattttttgatttggctgagacttacgtatgtgtcatttgccgagtcgcttaaatttgcgtctgttgcccttaaaaatccatagccgtctggaactatttccaaaataccggtaaatagtataaatccaccttgttttgtttgcgcttttagtatctcaaatacaagttcttgacggcgaaattcgcgtggattttccactcctacttcgtctgctatggctactaggttgttaaggtcgagttgtcttaattcttcgattttgtatccatcaactggaatatgagtacgcgaatgttgctttttattgttccccgcgttgtaggattgctctttgacattgtctttattttccattaaacctctttaaatttttgtgataatatgcagtcacaatgaataaattatgtagttttgatgttgagattttatacaaaaaatataaacttgtcaagtttgataatggaatttagactgtcttaattataaatttattttagatttatttattgaatatattttaagcttattttatataacattatacaaagtatataaataagggcaaatatatgaaaatagcggcttttgatataggtattagtagtatcggctggtgtttatgcgaacaaaatgataaagagtataaggtaatcgattgtggcgtaaggatattcacagctgcagagcatcgaaaaactggagatagtttagcagctccaagaagggaagctagattatctagaagaaggctataccgaagaagaactagattggctgagttacgaaatttactttgcaccgagtttgggttagataaaaaaatatttgaaatgcaaggtgctaatttacctcaaatttataaaacttcaaaagaaattttaagtccatgggaacttagggttaaggcgttggatttaaaagttgatatcaacgagctagttaggattattttacacatagcgaaacatagaggatatgcaaatttaataaataataatgaaaaagataaaggtaaagttttatcagcaatagcacaaaatcaagaagatattaaatcatatctaagtggtgctcaaatgcttgtggagcgttattttaataaagaaataaaaagtggactatatgagagtattagaaataaaactgatagctataaaaattcactttcacagtcattaacaaaagcagaattagagcttatactaaatactcaagaaaaattaggatataaattttctccaaaatttaaagaaaaagttttggatattgcgtattttagaagacctttaaaagattttagtgataaaattggaaattgtgtattttttgaagatgaaaaaagagcacctaaattcgcgattgattcattggagtttgtcgctatttctaggataatcaatgagttaaaagctatttcaaatgatactggcttggtatttgatgtaaaagatgtaatagaaaagacgctaaatgaagcaagaaaaatcaaaaaatttacatatgccaaatttagaaaaatattatttcttgatgaaaaaatcacattcaaaagcttaagatacatcaaaaacaatccggaaaatagtgagtttataaatttaggtggttttgtagagttatcaaaaataatcggcgataattttactagagatgagtttaataaaatagcactatatgtaacattgtcaaaagatacaaatttgctaagacagaaactaagagaaatagggcttgataaatttgatgatgaaacattaaatagcattttgaatttaaaatatgctcattttataaatcttagttttaaagcgttacaaaaaatacttccgtacatgaaagatggatttagatatgatgaagcttgcattcaagctggtctatccatcaagtcaaatttaaataaaagtgattttttacctccttttatcgatactccatattcagatcaacttacaaatccagttgtttcaagggctgttcgagaatatagaaaagttgtcaatagcattgtaaaaaaacatgggaaattccataaaatccatatagagcttgcaagagaaatcggtaaaacttttgaagaaagaaagaaaatagaaacagagcaagcaaataatcataaattaaataatgaggctatgatattttgtcaagaaataggactaaatccatatagcaatcaaaatatattgaagataaaattatggcgtgagcaacaagaaatttgtatgtacagtggtaaaaaaatatcaataaatgatatattgtcaaatttggttgaaatagatcatatactaccgtattcaagaagttttgatgatagtatgagtaataaagttttggtttttgctaagtttaaccaagaaaagaaaaatcaaactccttatgaagcttttggtgataaagatttttggaatgatattgtattgcgagcaaaatccttaaataatagttctaaatttaaaaagctaactacagctaattttgttaacaaaaaagatggaagtgattttatacaaagaaatctaaatgatacacgttatattagtagactggttgtgaattatactagggattatttaaattttcttgattttgacgatggcaaaaaggaacatttactgtgtgtcaatggatcacttacttctatgcttagacattattggggttttggagataaagatagaaatggacatattcatcattttgttgatgctgcgatactatctgcttgctctcctagcgttatcaaagcttttagtgattttaaaaaaaccgaagagataaacaatgccaaatattatgctgataagataagcggtctaagaataaaatctaaatttgatccttttataaattttagaagtattgttttggatgctgctaaaaatatttttgttagtaagccgccacgcaaaaaagttactggtgcattacaccaagaaacgataataagtaaagatgatatcttaaaagagcaaaaatatggcagcgagctaggattaaatagggctttaaatcttggtaaaattagacaaataaattattgatatgtagataatgcagagatgccaagggtagatatttttgctgatagaaaaaatggtaaattctatggagttcccatatatactatggattttgcacttggtattttgccaaataaagcttgtgtgaagggcaaagacaatcaaggaaatatcaaagattggcttgaaatggatgaaaattatgagtttaaatttagcctgtttaaagatgaccttataagaatccaaaaaagtggtatgagtgaagctatagtttgctattataattcttttaatgtttctagttgttcaataagcgtagagaaacataatgccgatgcaaaagatttgagtgacaatgaaaagcttttatatccatcatctaaaaataaacgaaaaaaagatgatttagatgatgcaagccctgctacttatgaagcaattcaacctagtcttggtattcagtctttgcttaaatttgaaaaacttatcgtttctcctttgggtgagatcagtgagtttaaattcgagcctagagcagatgtgagattaaaaacatccaaaaagactaataatgtttgatgagagttttaggactattttatttgtaaatccggcaagattatcacttaaaaattcgaatttattcgtgcaaagagatggctttgatgatgtcagtttgccgctaaatgatatagcctatattattttggaaagtccttgcattacattgagttctgctttgcttagcaagctcgctagctccaaaaccatactgcttacatgtgatgatagtcatatcatcaatggtatatttaatccatatttgactcattttgaggtaaataaaatcataaaacttcaggtgagtcaaggcgatgcacaaaaatctattctttggcaaaggataatcaaatctaaaatctcaaatcaagctaaatttataagtctttttgatgataaaatatcggaaaatttgatgattctacaaaaaagagtcaagctcagtgattctcaaaattgtgaagcaaatgctgcagctatatattttaaagcactatttggcaaggattttactagagatgatttatgttttataaattcagctttgaattatgtgtatagtattattagggcttgtttggtaagagacatagtgagtagtggattgctaccaaattttggtttgtggcacgatagcgtttataatcaattcaatctagccgatgatttgatggagcagtttcgtatttatgccgatagattgatatattctatgatgaatgatagcaaagatatatttttagacacaagagacaagcaaattatgattggtattttggatactaaagttatgatggggaataagagctttacattggctatggcatcaagagtatgcgttcaaagctataagcatgcgatcttaagtggagaaaatagcttggatctaccggagtttgtttgatggagccgtttatgcgagtaatggtaatgtttgatataccagttaaaacaaaagatcaaataaaaagggctactaagtttagaagccaactaataaaacgtggatattttatgatgcagttttctgtttatatgcgtgtagttcgcggtatgacaagtgctagggctcatatagaaagactaaaaggaatcttgccgcccgaaggaaatataagagctattgttgtcacagaaaggcagtttgataacataataattttgcttggtgacaataatgagcaaatgaaaaagtcaaaaccagtacaacttactctgttttaaaaaattcggttttaagggattgtaaccctgcgcagaccgaaaactgcttattttaggcacttcttaaatttgttttcgaattttatcagaatatattttatctgtcaaatatatctcagatacctattttataggcatttacactaggtctattgtagcataaacaaatttaagaagtgcctaaaaccttcatttttattaggtgttgtttttacgaattgtagcataaacaaatttaagaagtgcctaaaatacctgctatatattatgtaaaaaaataatatatgaacaacataaaacaatacgaaaaattaaaaaagtacaaataaaaaataaatataaacaatccttttattgctaatataaaaaggctaaaacaccagtacaagctaatctttagagcttaaatctgcgctcgaaatagcgcttaaagagataaaattataaaacagtttaagagctatccaagtaaatattatattgattcaataccatccaaataatgatttgtttgtatctaagtgtgaaattttagttaaatcttcatcatcaagactaaaatcaaaaatatctatattttctatcattctgcttttttttggtggtttttgggatagcgataataccgttttgtatcaagtatctaagcccgatctgtgctatatttttaccgtgttttttagcgataccgtctaaaacaagatttgaaaaatacccgtttttgccgtttgcaaaaggactccaggcctctaaacgtgtatctttcatgactgctcttagctctttttgcataaaaaacacatgagtttccatttggtttatcataggcgttattttgacgtcttttacaaaatcaacatattttttagtggtaaaatttgaaatcccgatagcccttaaaacaccgttttcatagagctcttccatagctttatacatctgttttgagtcagaatacgccccatgtataagaagtaggtctatatactcgagcttaagctttttaagggctacatttatggattttaaagtctctttatagctcatattttgtgatagttttgtagtgatgaagagctcatgcaatggcactttgcttatgcgcaaagcttctcctacctcttcttcattgccatacatttgggctgtgtctataagcctatatcctacgcttagcgcgtctaaaacgcatttggtagtatcgctcaaatcatatgttccatagcctaaaataggcatttttacgccattatttaaatttacgcttggaatttgtggtttgtttgtagcaaataaatttgagttcataagcgctaatcctccgctaaatttgactaaattcgatataaattctcttcttgtttgcattttgcactccttgtttattatacgataaaaataaaaaataaaagtagaacaatactccagatctcttgccttatcctataaaaatcgttttttaaatttatttgtgacaaaaataaaacaaattattttatatcttaagcgatatttttatataattatctaaatttaaaatatggatctttatgggtaaatttaagtgccttcactgtaaaagcgagtttgatactagcggtgtgattttagacgaaaacggtaatgaattttgctgtaacggttgtaaaaatgtatttgcttttttgagttcaaacgggcttgacgagttttacgacaggcttggaaagcagacacatataaaagcaaaaatcggagcttttaaagatgagtctagtaaaagtttttacaaaaattatgttaaaaatagtgatggtttttgcgaaatttatcttatcatagaaggaattcactgctcggcttgcgtatggctaaatgaaaaagttttatctagcttaaatggtgtagtcgaagtagagataaacgctgcaacaaacaaagctcacataaaatgggacgatagcatagtaaaattgcctgaaattttaaataagattatggctatcggctacaatcctctaccttatgacccaaacaaagcagaagcaagagcttcacaaaaaagaagggaattttatgcaaaaatgcttactgggcttttttgcacgatgaatataatgtggatcgccgtggcgctttatggcggatattttagcggaatgagtagtgacgtaaaagacatcttgcattttgccgagtttgttctttctagtcctgtgcttttttataccggtagcgagttttttaaatctgcttatttgggactgaaaaacaaaagagtaggtatggacttgagtgtagctgtcggggctagcacggcgtatttttactcggtttatgcgatgctttcacgcagcggcgaagtctattttgatagtgtagcgatgataatcacctttgtgtttatagggaaatttttagaagttataagcaaaaaaagagctattgataacttagatagtttaagcggtatgctagttagtgaagttagcgtgaaaaatggtgatgattatgaactaaaaagtgtgaatgatgtacaaataggcgatatcttagctttgcgccagtcagaaagagttcagatagatggtgtcgtaaaaagcggagtggggagctttgattattcgagtttgagcggtgagagcttacctgtgcttttaaaaagtggtgatgagataataagcggggcgatatgtgtagatggagctttggagtatgaagcaaagaaaacttttgaaagttctatgcttagtaaaatcatctctttgcttgaaaatgcaagctttaaaaagccacgcattgaagagtttgcaaatcaaatttcgggtaaattttctattgcaattttgcttttaggaatgcttacatttatattttggagctttaactctagtgtgccaaatgcagtaatcatcgctgtttctgttataatcatcgcttgtccttgcgctctgagcttagccactccagtagctagcttgataggtcttggagtaagcttgaaaaaaggtgtgatatttaaagaagcaaggatattagagagtttagcgaagtgtaaatgtatagtttttgataaaactggcactcttactaaagctaaactgactttggtaaaagctactaaatttgaagaatttgatgaaaacttgctttattctttgcttagtgtttctactcatccagtaagcgttgcacttaaaagctcattagaagggaaaatttaccctttacaagaagtacaaaatgtattggctcgtggagtaaaagctaaatttaatggtattagcctagttggtggaagtagtgagtttatgcgtgagcttggaatttatgcagattttagggatgcgaattattgttttgcgataaatggtagagcggttgctttgtttgagctagaagacgagctaagaagtgatgcaaaagatgtcataacaaagctgatagatagcggttttaaggtcgttatgctgactggagatgataaaaaagtagccaaaaaagtagctaaaacacttggtatagatgagttttatgccggagtggatcctattagaaagtctactatcataaaagaattaaactcaaatatgcctactgttatggtgggagatggtataaatgacagcgttgcgctgagtctggcaagcgtgggtatatgccttggaagtggcgctgcgatcagcgtggaaaaaagcgatgttatcttgctaaatgataatctaagtagtctaaaagatgccatagatatctctagatatacatttaaagctattaaacaaaatctcgctttttcgcttatttataacgctataaccatacctttggctatggcagggttcatcataccgctatttgctgcactttctatgtcttttagctcggtaatagttgttttaaactcatctaagatcaaattcaaatttaaaggttaaaaatgggagcgatcatagctataatgcttggaatttctacattgcttggagctttggctctttttgggctaatttggggtgtgaaaaatagacaatttgatgattattccaaatttttagatggtacaaagtacgatagcgaggattcactcaatgatgcatataagatggaaaaaagaaaagaagagcttataaaaaagaaaaaagaaggcggttatcgtccgcctgattaaagtaaatttgcacccaaatttgataaatttaggatgcaaatttgactaaaagcttattttaaagttgagatatagtcattaacagcagccatatcagcttcgcttagtggagccatttgacctttcatgattccgcccataccaactttacctttaccgccatttaatgatccgtctttgtatgctttcatatctgctagacgtgttgcagcgtctatctcagtaagtactggaactttatttaggtattttttctcagcttttgcaccgtggcaaactgcgcattttttgaaaatagtcgcgccatcagccgcaaaagcgctacatgcgaaagcagctataacagaaacaaataaaatctttttcattttttgtccttaataaatagaaatgttcgttattataatgataaaaggctaaattttcgtttaatagaatttgtataataaatgcttaagatttgcggtgattgcggataaaaaaagcagcgatttcgctgcttaatattatttcaaagttgaaatatagtcattgacagcagccatatcagcttcgcttagtgtagccatttgacctttcattacgccgcccattccaaatttacctttaccgccttctactgtgccagctttatactctttcataagagcaagtctctcagcagcgtctaccgtagtaagtactggaactttgtttagatagcttttctcagcttttgcgccgtgacaagctttacatttgttaaaaatagtcgcaccatcagcagcgtacaaactacagctcaaagcagcaagtgcagagataaataaaatttttctcataataatctccctcaaataaaaaaattaattttgaaattatatattcgttttataaaattaatagtaaacgagatgattaaattttgataaataaaaataaatcataaaaatttaatgaaaaatctcaatatatttgatttattatttatctgattgataaacgatttggcttataaggtttacagtttgatctatgctcttttcgatactaaaattcttagaaaattcgacattttttgcttgtatgtttgccataaactcattgtttaaaaataacttatcgataaatgtggttatactgcggtcttttggatcttgcattataaaatcattttctagtatctcgctagctccgttttgagccgtcgttatcgctacgcaaccatagctgagtgcttctaggattgcatttgaaaatgactcatagtgtacaggaagcaacagtaagtcagaaccttcataaaactcgctaataatcctttgtctaccgataaaaagagcgtttataccaagtttcgttgctatttttttaaatttatttgattttttatcattgttgataagaatagcattaaattttgtatttaatttacttaaaatttctaaaaattctttgatcccttctgttttattacttacaaatagcactatgggcagctcataatccaaaccaaatttagcgcaaagtctcatttttgcacttcctttttcgatcttgctcggtaagtttataccattatatatggttattatcttgctttcatctattttatatgtatttatgatctgctgtttggtcaaatttgagctaacgatgatctttttggcatttgtaaagcattttttctctaaataaacatatataaagcttataggatttaaaaaccaaaatcgttttaataagcggtatattttatatactccatcgctaactttacaaatatctgcgcaggttatttttgataagctaaaatatatctcgtcgtttgcttttgttttgcaagcttttgtattgaatttcatagcatttttaagacatttatctcgctcatctttgtcaagatcttttatttggtttgctataccgatcttatcaagtgcatttttaagatgatttagatatctttttatttctgcttcttgatctgatccatttttgagaaatataacttttttcatagttatcattttttatttttcaaatttatctcatacaatttagcttcttttaaaaatgcgtaaaaagccaaatttatagctgatataaagcctactgtgccgtttaaaaaatttctttttattatgtatgatttaaaaaacgctaaatgaaatacgaatataagcttaaatatagatgagtttctgtttttctctgctttttctctggctcttagagatgagtataaatttattttatttatatgtgtactaagatcatttgttccatagtcgtatatgaagtttttgctcttttttgctctacctgtaaatttgatactctcatgcaccagttttggtggataaaatccaagttcttttttgaaaaatcttattcgtgtgatagacttgcaaagaatatgtggaaatttatttaaatatatacttgaaattttgacttctaaagcatctgcgctatttaattttatagtttcttctatctcattttttagctcactgcttagttcttcgtctgcgtctagatttaaaacccactcatttgagcatagatttttagcaaattctttttgtttagcatatcctaaaaaattttgatgaaaaatcttgcttgtatattctttggcgatatctaatgtagcgtctgtgcttccgctatctacgactatgatctcatcaaagtctttgacgctctcaagcattcttcttatgtgcttttcttcgttgcagcagatgacgtaaactgaagcttttatcatagcttattccttatcctagtaaatttcaaataaaaatcaaaaaagctctccgttcctaagactccgatacgttttatagcaaatttatcatctcttgattcaaaaactccacgctttacgatgactgcattttcgtatttcgcttctttggtagcctttaaaatcttatcgttaaatttaccgtaaggatatgcaaaagccttgcaaatcttcccagtgagcttctctacttctagctttgagttttgtagttcgttttgtagctctagctcacctagtgtggataagtttttgtggcttagcgtatgtgatccaaattcgatcaaatttgagttttgcatctgcgctatttgctctgcgttaagcatgtttgagacgctattcgtgtttgctttttcccagtggtttgtactttggtttgggactagataaatggtggctttgaagtcgtactttttaagtatctcaaatgcattttcaaagttatctgcatatccatcatcaaatgttatagctactgattttttactaatagtttgcgaatttgcaagctcgcttatcttgtaacttgtaaaaccgtgatttttcatccatttgatttgacgctcaaagtcttctggctttactcgccatttatcaaatttatccccacaatgtttgcttatagagtgatacataagtacacgagctttggtgtagctcacaggaatacgccagatattatagcgaagcaaaaatgccatacatatgagcagtataaagatagaatagatcattttatcacgcttctatatgcttgtatgtatttttctgccattttttctatgctaaaattatcctttgtttcttttatttttgcgaataattctttatatttgtcgtagttttcgtaaacttgtgtaagtttaatggctaaattttctggactattttcaaaaatcaattcatcaggaagtatttgtgcgcaaattccggttcttgtagacaacaaaagtggcgaataataaattccatcaatcgctgttagtccgtaaggttcaaaaacactagcaatgatttgcacattgcagctagctaaataatcttgcaaattatctgtaaagccttgaagcgtaattttatcttgcagatttaatgaatttattaaattttgcaattcatctttttgttcgccttgcccaaaaatatcaaatttaaaatcaaaatttaccatagaaagtgcttctatgattatttgatttccttttacaggtgagagtctactggcactaataatataaaatttatcatctctttgcaatttttttggctctttatatgccataccgttt

SEQ ID NO: 4469 - DNA, 22442 bp, synthetic construct
  source 1..22442: mol_type = other DNA
  misc_feature 1..22442: note = Synthetic
tatattggctactattttgtttttttggttgatgtttttaggatttattttggctaaaagttttatttgataagccttttaaaatagaagaatttaaaaggctgcaaatttattttttaagatcttttaaaaattcttctatattgtattttgctctgtaagcttcgctcataagatggatcatgatatcgcctaggtcgatcactgtccagtcatcgctgctctcaacgcctagaaattcttcaccatttggtttgagtttagtttttagatcgtctaaaagtgcgtaagcatggcgaccagtaagagtcgtggctatgatgacgaatttagctaaatattcaaggccactcatatctacaacttcgatattttcagcttttttttcatcaagtagtttcgtgatcctatttatcctgtcttgcatttgtttttcctcgtaaaatttgataacgtccctgcgtataagttctggaacattagaaaagtcaagctcgtctctgacttttgtcgatgagattttaacatttaaatctagtttttgcaaattcggcggtacataaatatcatcccttgaggcgactacgaactttactaaggtatttaaaatgttaaatttataccatttttctaaatttgcaagctgatccgcgccgatgatgagatagatcatacccggattataaatttttttaaaatgcaaaacgctttctaggctaggtacggctctattttgttctatttcaaacttactaatctctactttttttaaatttccccaaagagtttcgcaccaaacaaggcgttttttgggatctgtgctaaatttagatttaaatggatttaaaaatgttgggacaatgatgagcttatctatatctaaaactagcaaagcggtttttactattgcgttatgaccgttatgaggaggatcaaaacttccgccgaaaattgcaatattcaatattttttaaccttttttttagtagaattaaacttaattatacccaaaaaaggaataaaatggcgcttaaaattgcaatcaatggttttggaagaatcggtagatgtgctgcaagaattatattaaataatcctgagtatgaacttgctgttataaacgataccgctgagcgaaagatgactagatatctactgaaatacgacaccgttcatggcgaatttgataaagaagtaaatgttatagatgataattatatcgaagtggacggtaaaaagatcagggtttattctactcgtgagattgagagtttagatctagagggtatcgacgttgttttagaatgtacaggtaaatttctcacaactgaaaaatgtgaagcatatctaaaacaaggcgctaaaaaagtagttatgagcgcacctgcaaaagacgatactcctacttttgtcttaggtgtaaattcaaacacttataaaggcgaaaagatagtgtcaaatgcgagctgtacgacaaactgtttgggtcctgttactagagtattagaagatctttatggtatagagaaaggtcttatgactactatccacgcttatacaaacggtcaaagtttagtagatgtaaagtgccgtgactttcgccgtagtagagccgctgcggcaaatataatacctactagcacgggcgcagcaaaagctatgaagcttgttatgccaagcttgaacggtaagctccacggacagagtgttagagttcctgtgccaaatgtttctatggtcgatcttactgcggttttgggtaaaagcgtgagtaaagaagagctaaacgctgcttttgtaaatgctagtaagacaagtctaaaaggcattatggctgttgattttgatgaaagagttagtagcgattttaacacttcgaattactcaagcatagttgcagccgatcttactcaagtaatttgcggcgatatgataaaagttatggcgtggtatgataatgagtggggttatacttcaagactcgtagagatggctaaatttataagcgagagatgatatgagcgagataatttctataaaagatataaattttaaaagcggtagtaaggtttttgtaagatgcgattttaacactcctatggatgagttttataatatcacagatgacagaaggatccgctcagcgatccctactatcagatacattttagatcaaggttgctctgttgttttggcgagtcatttaggacgtccaaaaaatggctacgaagaaaagttttctttacttccagtagcaaagaggttaggcaggcttttagatagagatataatctttgctactgatgtagtaggaaatgacgcaaagaacaaagtagcttctttaaaacaaggagaagttcttttattagaaaatcttcgtttcgaaaaaggtgaaacgaaagacgatgaaaacttagctaaagagctaagtaaatttggggattattacgtaaatgacgcttttggagtatgccatagagctcatagctcggttcatgctattacaaaactatttgacgatgagcataaggctgctggatttttactgataaaagagattgaatttgctagaaatttgataaaaagaccaactagaccgtttgtggcagtcgttggcggaagcaaggtcagcggaaagcttcaagcacttacaaatttacttcctagagttgataaactcatcatcggcggcggtatggcgtttacctttttaaaggctattggtgaaaatatcggaaattctcttcttgaagaagatcttgtagaagaagctgcaaatatacttaaaaaaggacgcgaactaggcgttaaaatttatttgccagttgatgtagttgcggctcaaacatttagtgctgactctgctataaagtacgtctctgttcaagaaattccaaatggttggatggggcttgatataggtccagctagcattagactatttagagaagtcttgagtgacgcgcaaaccatatggtggaatggtcctatgggcgtgtttgagatggataaatttagcaaaggtagcataaaaatgagccatgctatagctgagggttttgctacttcagtagtcggcggtggtgatacggctgatgttgtagagcgcgccggagacgcagatgagatgacgtttatctcgactggcggtggagcgagtttggagcttatagaaggcaaagagcttccaggcgttaaagtattgctcaaagctgaatcttgagtctgatagcagcacgaagtggatgcttgcatactcaaataaatttagataatagactaacatatctgtttttactagaagcattaaagggtcataaatgatatatgcggcaaatttgaaatgtaaccacacaagaagcggttttttggagtatgcaggagagcttgacaataaaataagcggtgagaatgtgatagtttttccgccttcaagcgcgtttttagaagctaagtttaaatttgttcaaggtgcacagaacttttatccgtgtgatagtggctcatttaccggagagataggggcagctatgcttgatgagtttggcatcactactgtcttgatcggacatagcgaaagaagagctttaggagaagacgagccgtttttaaaggcaaaatttgattttgcaaagcaaaaaggctgggatatcatctactgtataggtgaagatgatataactcatatgaacggaagtacaaaagagtttttaacagatcaacttgaaaatatcgacttagaatatgaaaatttagtcatagcttacgagcctatctgggctattggtactggaaaaagcgcaaattctgcgatcataacagatattttggattttatatctacaaaaacgactgcgccattgctttatggtggaagcgtaaatgagaaaaatatatgtgatataaaagctataaaaaactgcaacggagttttggtaggaactgcgagctgggacgcaaaaaactttataaatttgataaaagcttaaataaaaaggaaaaaatagtggtaatgaatggtaaaaaaggacttatagtcggcgtagcaaataagatgagcatagcttatggcatcgcaaaagcgtgtaaagatcagggtgcaactttggcttttacgtttttaaatgacgctatcaaaaagcgcgttgagcctatcgcaactgagcttggaagctctcttatatatgagcttgacgtaaacaacaaagagcatttagactcattagcaagtaagataaaagctgattttggggatatcgattttatagttcatgctgttgcttacgctcctaaagaagctttagagggtgagtttatagatactacaaaagaagcatttgacgtggctatgggtactagtgtgtattcgcttataagccttactaaagctgttttgcctgtgctaaaagagggcggttcggtgcttactttaagttatcttggcggagctaagtttgtgccgcattataacgtaatgggtgtggcaaaagcggctcttgagagtagcgtaagatatcttgctcgcgaccttggaaagaaaaatataagggtaaatgctatctcagcaggccctataaaaacactagcggctagtggaataggcgactttaagatgatactaaaatggaatgaatgcaacgctccactaaaaagaaacgttagtatagatgatgttggcaaaagtggaatgtatcttttaagcgaccttgctagtggtgttacgggtgaaattcactacgttgatgcaggatataatataatgggaatgggcgacgccgtagtaggcgaaaacggctctactgtccttgcgtgggataaatttaaagagtaaatttgataaaagtgttttttattttaaaaacacttttcttctatagaaactctatttagctgtggtaagcttagctccatatcacgaatttcttttagagcatttttacaatgtgagttcatctttccattaagtccgtagtacgcccatacgccttttctttcaacgcttaaaaagccggcatcttttaagatttttagatgtcttgaaagacgtgattgtatcatttgcaaagaattctgtagatcacatacgcaaagagtaccgtatttttgtaaaaaagctagaatttttactctactttcatcattcaaagccccggtaatttttaaaaaatcatctaaattttccattttattcctacaaaaatatatctattaatactccaaatattatagcgataaaaagcacacacgagataaatatcaacaagaaattcattttaaaaatgcgttttagtaagatgagttctggtaaagaacagcctcccccagatattaaaaagctcatcactgctcctaaagatacgccacaatccatcaaagatagacctatagggatgatggcttcgactctgatataaagcaaaactccgacaaaagcagctattacgacactaaagatctcgaattcttgtagataagtttgcaaaaattcttttggaacaaaaccgtggataagagctccgatgcccatacctatgacgatatacggaaggattttcttataatctttcagtacttttaaaaataaatctttatagctactttttatttgcgaatttaaattcaaactctgtttttgagtactgaaatttattattttagtttggcaacagttttgtttgcttatattgtgatgttttgatagagtattttgctcttctttgataaaatccttgtttaaaaatttatccgagttaaatttagaaatactcaaagaaaatataaaaacaaaaacaaaaataaataatatataaaataagctgagttttaaaccaaaagatatgactagcatagcgatgattatcgggtttacaagtggcgaaacaaaaagataagccacgctcactccaaagcttacccttgcttttagcaaagcacttagcaaaggtatggtagagcaagagcaaaaaggtgttaaagctcctaaaaacatagctttgatatagctcaaaagagagtttgcacttagatatctctctattttcttagaaaatttctgatttaatagtgctactataaaagcaatcgcgataaataaaacagaaagttcaataaaataaaatataaaagctttaatgctttcaagaagtttttctaacatttttttccttgtagaatcgattttttgtaatcatatcataaaaattataatatatcaagatatattgatatattatattattcttttgaattaaaatagaaataactaagttggggaaatgggagtaccctaactaaggtgttatttatctaatcattatctttcaaaatctcaggttcgccaaatagtctttttagctctctcgcatttgagttgagttgtgctagaagaggatcttcgtctttttttgtgaagactggtatgctgagttttgtctcaatgttttgagattgttctatagctaactttttatctgggacttgaggtagctcgctttctaaaagtttttggactgctttgttttctttatgctcagcttctaccttttttatttctatttttgcgctatttccaaagcatttgcgcagtatttccattatgatagtagatgaccttctaagaatttcttgatttttaccgcttgcacttgagtttagtatcaaaatattatctttaaattcgacaaatttcacgcactcatcaaagcaacttccaagatcaaaatctctatcgtaaatttgatttaaaaagtcttgataaggagtttgaattttctttatctgtatttgctctggtgctactatgcttgtttgcacaagctctagtttactgtctttgagctcttttatagcgtcatctatgctagttagattaaaagcttcaagcatcataaaaagcgctaaatacaaggcaaactcaggatcactgccttgacctagcatattttttgtttcagacaatatcctaaaaaatcgctcaaaaataagtatagaaaactttgagttttgatttataaatttatcttttaaatttataatgagttcgtcgatgatcagctctgcgtcgcttcggctaagttcttttaataaatttaaaagagtgtttttatctctgctagctactacttcaaggatctcttctatcttttgcggatcaagaagtccaagcatatctgcgactgatttttgactaacgaattcgtgagagaagataatggcttgatcaagtaaagttagagtatctctaaggcttccagatccacttcttgagagtatctcaagtgctttttgttcgtattttataccttctttgtttagtataaactcaagatgttttagtatatttgactttgatattggtttaaatctaaagtgctgtgtacgtgagagtatcgtggctggaagcttaagcggatcagtggtcgctagtataaactttatgtattctggcggctcttcaagtgtttttagtaaagcattaaatgcttcttttgtgagcatatgaacttcgtcgatgataaagatcttaaatctagcacttgatggagagtattttgtatgttcgatgagctctcttatatcatcgatttttctgtggctagcggcgtccatctcgatgatgtctaggtgacgtccttcgtttgccataatacagtttgcacagacctcacaaggatgtgagccgatacctttctcacaaagcaaagctttggcaaatatcctagcactgcttgttttaccgcttccccttaaccctgaaaaaagatatgcatgaccaagtctgccagagtcaagtgcgtgagataagctattagctacaacgtcttgaccgataagctcgtcaaagctctttgggcggtattttagggctagtgctttcaagctttttcctaatcgttcatacttccaagaagctcttcgttactcgcggttttaagcatttttgagtataagaatttgagcgcttctacgtcttccatcgttgctatgatatttcttatagcccaaattttgcctaatttgtctggaccttgaagaagctcgtcttttctagtacctgattttaagatgttgatagctggataaattctcctatcgctgatgtttctatctagtacgatctcgctatttccagtacccttaaactcttcaaatatcacgtcatccatacgtgagccggtgtctatcagagccgttgcgactatggttagacttcctccattttctatatttcttgctgcaccgaaaaatctttttggtttatgtaaagcgtttgcatccacgccaccacttaatactttaccgctacttggagttgcagtgttataagcacgagccaaacgagtgatgctatcaagcaagatcactacatctttacccatttctactaaacgttttgctttttctataacaagttcggctacccttacgtgatttagcgcaggcaagtcaaaagtcgagctaaatacctctcctcttactgagcgttccatatcagtaacttcttctggacgctcgtctataagaagaactatgagctcaacttccggatgatttctagcgatcccgtgagctagttctttcataagttcggttttacctgttcttggaggagctactatgagtccgcgctgtccttttcctattggcgtaaaaaggtctaaaacgcgcccagttagcttcatcgggtcatattctaattttaatttttgagttggaaaaatcggtgttaggttgtcaaatagcggtctttctttggcttcttggatggatttataatttatagcttctatttttaaaagagcgtaatatttttcttgttctcttggctctctaacttgtccagtgatgatatctccgacacgaagagcaaattttttgatttggctgagacttacgtatgtgtcatttgccgagtcgcttaaatttgcgtctgttgcccttaaaaatccatagccgtctggaactatttccaaaataccggtaaatagtataaatccaccttgttttgtttgcgcttttagtatctcaaatacaagttcttgacggcgaaattcgcgtggattttccactcctacttcgtctgctatggctactaggttgttaaggtcgagttgtcttaattcttcgattttgtatccatcaactggaatatgagtacgcgaatgttgctttttattgttccccgcgttgtaggattgctctttgacattgtctttattttccattaaacctctttaaatttttgtgataatatgcagtcacaatgaataaattatgtagttttgatgttgagattttatacaaaaaatataaacttgtcaagtttgataatggaatttagactgtcttaattataaatttattttagatttatttattgaatatattttaagcttattttatataacattatacaaagtatataaataagggcaaatatatgaaaatagcggcttttgatataggtattagtagtatcggctggtgtttatgcgaacaaaatgataaagagtataaggtaatcgattgtggcgtaaggatattcacagctgcagagcatcgaaaaactggagatagtttagcagctccaagaagggaggctagattatctagaagaaggctataccgaagaagaactagattggctgagttacgaaatttactttgcaccgagtttgggttagataaaaaaatatttgaaatgcaaggtgctaatttacctcaaatttataaaacttcaaaagaaattttaagtccatgggaacttagggttaaggcgttggatttaaaagttgatatcaacgagctagttaggattattttacacatagcgaaacatagaggatatgcaaatttaataaataataatgaaaaagataaaggtaaagttttatcagcaatagcacaaaatcaagaagatattaaatcatatctaagtggtgctcaaatgcttgtggagcgttattttaataaagaaataaaaagttgactatatgagagtattagaaataaaactgatagctataaaaattcactttcacagtcattaacaaaagcagaattagagcttatactaaatactcaagaaaaattaggatataaattttctccaaaatttaaagaaaaagttttggatattgcgtattttagaagacctttaaaagattttagtgataaaattggaaattgtgtattttttgaagatgaaaaaagagcacctaaattcgcgattgattcattggagtttgtcgctatttctaggataatcaatgagttaaaagctatttcaaatgatactggcttggtatttgatgtaaaagatgtaatagaaaagacgctaaatgaagcaagaaaaatcaaaaaatttacatatgccaaatttagaaaaatattatttcttgatgaaaaaatcacattcaaaagcttaagatacatcaaaaacaatccggaaaatagtgagtttataaatttaggtggttttgtagagttatcaaaaataatcggcgataattttactagagatgagtttaataaaatagcactatatgcaacattgtcaaaagatacaaatttgctaagacaaaaactaagagaaatagggcttgataaatttgatgatgaaacattaaatagcattttgaatttaaaatatgctcattttataaatcttagttttaaagcgttacaaaaaatacttccgtacatgaaagatggatttagatatgatgaagcttgcattcaagctggtctatccatcaagtcaaatttaaataaaagtgattttttacctccttttatcgatactccatattcagatcaacttacaaatccagttgtttcaagggctgttcgagaatatagaaaagttgtcaatagcattgtaaaaaaacatgggaaattccataaaatccatatagagcttgcaagagaaatcggtaaaacttttgaagaaagaaagaaaatagaaacagagcaagcaaataatcataaattaaataatgaggctatgatattttgtcaagaaataggactaaatccatatagcaatcaaaatatattgaagataaaattatggcgtgagcaacaagaaatttgtatgtacagtggtaaaaaaatatcaataaatgatatattgtcaaatttggttgaaatagatcatatactaccgtattcaagaagttttgatgatagtatgagtaataaagttttggtttttgctaagtttaaccaagaaaagaaaaatcaaactccttatgaagcttttagtgataaagatttttggaatgatattgtattgcgagcaaaatccttaaataatagttctaaatttaaaaagctaactacagctaattttgttaacaaaaaagatggaagtgattttatacaaagaaatctaaatgatacacgttatattagtagactggttgtgaattatactagggattatttaaattttcttgattttgacgatggcaaaaaggaacatttactgtgtgtcaatggatcacttacttctatgcttagacattattggggttttggagataaagatagaaatggacatattcatcattttgttgatgctgcgatactatctgcttgctctcctagcgttatcaaagcttttagtgattttaaaaaaaccgaagagataaacaacgccaaatattatgctgataagataagcggtctaagaataaaatctaaatttgatccttttataaattttagaagtattgttttggatgctgctaaaaatatttttgttagtaagccgccacgcaaaaaagttactggtgcattacaccaagaaacgataataagtaaagatgatatcttaaaagagcaaaaatatggcagcgagctaggattaaatagagctttaaatcttggtaaaattagacaaataaattatggatatgtagataatgcagagatgccaagggtggatatttttgctgatagaaaaaatggtaaattctatggagttcccatatatactatggattttgcacttggtattttgccaaataaagcttgtgtgaagggcaaagacaatcaaggaaatatcaaagattggcttgaaatggatgaaaattatgagtttaaatttagcctgtttaaagatgaccttataagaatccaaaaaagtggtatgagtgaagctgtagtttgctattataattcttttaatgtttctagttgttcaataagcgtagaaaaacataatgccgatgcaaaagatttgagtgacaatgaaaagcttttatatccatcatctaaaaataaacgaaaaaaagatgatttagatgatgcaagccctgctacttatgaagcaattcaacctagtcttggtattcagtctttgcttaaatttgaaaaacttatcgtttctcctttgggtggatcagtgagtttaaattcgagcctagagcagatgtgagattaaaaacatccaaaaagactaataatgtttgatgagagttttaggactattttatttgtaaatccggcaagattatcacttaaaaattcgaatttattcgtgcaaagagatggctttgatgatgtcagtttgccgctaaatgatatagcctatattattttggaaagtccttgcattacattgagttctgctttgcttagcaagcttgctagctccaaaaccatactgcttacatgtgatgatagccatatcatcaatggtatatttaatccatatttgactcattttgaggtaaataaaatcataaaacttcaagtgagtcaaggcgatgcacaaaaatctattctttggcaaaggataatcaaatctaaaatctcaaatcaagctaaatttataagtctttttgatgataaaatatcggaaaatttgatgattctacaaaaaagagtcaagctcagtgattctcaaaattgtgaagcaaatgctgcagctatatattttaaagcactatttggcaaggattttactagagatgatttatgttttataaattcagctttgaattatgtgtatagtattattagggcttgtttggtaagagacatagtgagtagtggattgctaccaaattttggtttgtggcacgatagcgtttataatcaattcaatctagccgatgatttgatggagccgtttcgtatttatgccgatagattgatatattctatgatgaatgatagcaaagatatatttttagacacaagagacaagcaaattatgattggtattttggatactaaagttatgatggggaataagagctttacattggctatggcatcaagagtatgcgttcaaagctataagcatgcgatcttaagtggagaaaatagcttggatctaccggagtttgtttgatggagccgtttatgcgagtaatggtaatgtttgatataccagttaaaacaaaagatcaaataaaaagggctactaattttagaagccaactaataaaacgtggatattttatgatgcagttttctgtttatatgcgtgtagttcgcggtatgacaagtgctagggctcatatagaaagactaaaaggaatcttgccgcccgaaggaaatataagattgttgtcacagaaaggcagtttgataacataataattttgcttggtgacaataatgagcaaatgaaaaagtcaaaaccagtacaacttactctgctttaaaaaaattcggttttaagggattgtaaccctgcgcagaccgaaaactgcttattttaggcacttcttaaatttgttttcgaattttatcagaatgtattttatctgtcaaatatatctcagatacctattttataggcatttacactaggtctattgtagcataaacaaatttaagaagtgcctaaaaatacctgctatatattatgtaaaaaaataatatatgaacaacataaaacaatacgaaaaattaaaaaagtacaaataaaaaataaatataaataatccttttattgctaatataaaaaggctaaaacaccagtacaagctaatctttagagcttaaatctgcgctcgaaatagcgcttaaagatataaaattataaaacagtttaagagctatccaagtaaatattatattgattcaataccatccaaataatgatttgtttgtatctaagtgtgaaattttagttaaatcttcatcatcaagactaaaatcaaaaatatctatattttctatcattctgctttttttggtggtttttgggatagcgataataccgttttgtatcaagtatctaagcccgatttgtgctatatttttaccgtgttttttagcgatgcggtctaaaacaagatttgaaaaatacccgtttttgccgtttgcaaaaggactccaggcctctaaacgtgtatctttcatgactgctcttagctctttttgcataaaaaacacatgagtttccatttggtttatcataggcgttattttgacgtcttttacaaaatcaacatattttttagcggtaaaatttgaaatcccaatagccctcaaaatgccgttttcatagagctcttccatagctttatacatttgttttgagctagaatatgccccgtgtataagaagtaggtctatatactcgagcttaagctttttaagggctatatttatggattttaaagtctctttatagctcatattttgtgatagttttgtagtgatgaaaagctcacgcagtggcactttgcttatgcgcacagcttctcctacctcttcttcattgccatacatttgggctgtgtctaaaagcctatatcctacgcttagcgcgtctaaaacgcatttggtagtatcgcttaaatcatatgtcccatagcctaaaataggcatttttacgccattgtttaaagttacgcttggaatttgtggtttgtttgtagcaaataaatttgagcccataagcgctaatcctccgctaaatttgactaaatttgatataaattctcttcttgtttgcattttgcaccccttgtttattatacaataaaagtaaaaaataaaagtagaacgatactccatatctcttgccttatcctataaaaatcgttttttaaatttatttgtgacaaaaataaaacaaattattttataccttaagcgatatttttatataattatctaaatttaaaatatggatctttatgggtaaatttaaatgtctgcattgtaaaagcgagtttgatactagcggtgtgattttagacgaaaatggcaatgaattttgctgtaatggttgtaaaaatgtatttgcttttttgagttcaaatgggcttgatgagttttacgataggcttggaaaacagacgcatataaaagcgaaaaaagtagaagagtttaaagatgagtctagtaaaagtttttacaaaaattatgttaaaaatagcaacggcttttgcgaaatttatcttatcatagaaggaattcactgctcagcttgcgtatggctaaatgaaaaagttttatcaaatttaaatggcatagtcgaaatagaaataaataccgcatcaaataaggctcacataaaatgggacgatagcatagtaaaattgcctgaaattttaaatatgattatggctattggctacaatcctgtgccttatgacccaaacaaagcagaggcaagagcttcgcaaaaaagaagggaattttatgcaaaaatgcttactgggcttttttgcacgatgaatataatgtggatcgccgtggcgctttatggcggatattttagcggaatgagtagtgacgtaaaagacatcttgcattttgccgagtttgttctttctagtcctgtgcttttttataccggtagcgagttttttaaatctgcttatttgggactgaaaaacaaaagagtaggtatggacttgagtgtagctgtcggggctagcatggcgtatttttactcggtttatgcgatgctttcacgcagcggcgaagtctattttgatagtgtagcgatgataatcacctttgtgtttatagggaaatttttagaagttataagcaaaaaaagagctattgataacttagatagtttaagcggtatgctagttagtgaagttagcgtgaaaaatggtgatgattatgaactaaaaagtgtgaatgatgtacaaataggcgatatcttagctttgcgtcagtcagaaagagttcagatagatggtgtcgtaaaaagcggagtggggagctttgattattcgagtttgagcggtgagagcttacctgtgcttttaaaaagtggtgatgagataataagcggggcgatatgtgtagatggagctttggagtatgaagcaaagaaaacttttgaaagttctatgcttagtaaaatcatctctttgcttgaaaatgcaagttttaaaaagccacgcatcgaagagtttgcaaatcaaatttcgggtaaattttctattgtaattttgcttttaggaatgcttacatttatattttggagctttaactctagtgtgtcaaatgcagtaatcatcgctgtttctgttataatcatcgcttgtccttgtgctcttagcttagctactccagtagctagcttgataggtcttggagtaagcttgaaaaaaggtgtgatatttaaagaagcaaggatattagagagtttagcaaagtgtaaatgtatagtttttgataaaactggcactcttactaaagctaaactaactttggtaaaagctactaaatttgaagaatttgatgaaaacttgctttattctttgcttagtgtttctactcatccagtaagcgttgcacttaaaagctcattagaaggaaaaatttaccctttacaagaagtacaaaatgtattggctcgtggagtaaaagctaaatttaatggtattagcctagttggtggaagtagtgagtttatgcgtgagcttggaatttatgcagattttagtgatgcgaattattgttttgcgataaatggtagagtggttgctttgtttgagctagaagacgagctaaaaagtgatgcaaaagatgttataacaaagctgatagatagcggttttaaggtcgttatgctgaccggagatgataaaaaagtagccaaaaaagtagctaaaacacttggtatagatgagttttatgctggagtggatcctattagaaaatctgctatcataaaagagttaaatttaaatatgcctactgttatggtgggagatggtataaatgacagcgttgcgctgagtttagcaagtgtaggtatatgccttggaagtggcgctgctatcagcgtggaaaaaagcgatgttatcttgctaaatgataatctaagtagtctaaaagatgccatagatatctctagatatacatttaaagctattaaacaaaatctcgctttttcgcttatttataacgctataaccgtgcctctagctatggcagggttcatcataccgctatttgctgcactttctatgtcttttagctcggtaatagttgttttaaactcatctaagatcaaattcaaatttaaaggttaaaaatgggagcgatcatagctataatgcttggaatttctacatttcttggagctttggctctttttgggctaatttggggtgtgaaaaatagacaatttgatgattattccaaatttttagatggtacaaagtatgatagcgaggattcactcaatgatgcatataagatggaaaaaagaaaagaagagcttataaaaaagaaaaaagaaagcggttatcgcccacctgattaaagtaaatttgcacccaaatttgataaatttaaggtgcaaatttgactaaaagcttattttaaagttgagatatagtcattaactgcgaccatatcagcttcgcttagtggagccatttgacctttcataattccgcccataccaactttacctttaccgccatttaatgttccgtctttgtatgctttcatatctgctagacgtgttgcagcatctatctcagtaagtactgggactttatttaggtattttttctcagcttttgcgccgtggcaaactgcacattttttgaaaatagtcgcgccatcagccgcaaaagcgctacatgcaaaggcagttataacagaaacaaataaaatctttttcattttttgtccttaataaattgaaatgttcgttattataatgacaaaaggctaaatttttgtttaatataatttgtataataaatgcttaagatttgtggtgattgtggataaaaaagcagcgaaatcgctgcttgatattattttaaagttgagatatagtcattgacagcagccatatcagcttcacttagtgtagccatttgacctttcatcacaccgcccattccaaatttacctttgccaccttgtactgtgccagccttatactctttcataagagcaagtctctcagcagcatctactgtagtaagtactggaactttgtttagatagcttttttcagcttttgcgccgtgacaagctttacatttgttaaaaatagtcgcaccatcagcagcatacatactacagctcaaagcagcaagtgcagaaacaaataaaatttttctcataataatctccctcaaataaaaaaattaattttaaaattatatatttgttttataaaatcaatagtaaatgatatgattaaattttgataaataaaaataaatcataaaaatttaatgtaaaatcgtgtaaaatgcactttatgaaaaaaataaaagcgatttttttagatagagacggagttataaataaagacttgggttatgttagtaaaatcgatgatttcgtgttttgtgatggtatttttgaagctttgcgcggatttttgaagcttggttttgcgctatttgtagttacgaatcaatctggcataggaagaggatattacactgaggatgattttttaaatttaactaaatttatgcttgatagatttaaaaaagaagacattgacataaaaaaaatatattattgccctcatgttccagaagaaaactgcgattgtagaaaaccaaagccgggtatgattttaaaggctttgagcgaatttgatataaatttagaaagttctatgatgataggtgataaaaatagcgatatactagccgcaaactccgcaggtatcgataattgctatttaatcggcgaagatagcagcttaaaaaccgttttagacgtgtataagttagtatataaggaatgtatatgaaaatagtagtaactggaggagccggatttatcggttcaaatttagccaaatattttatggacgaaaatgaagttttggttgtggataaatttagaagtaatgaagtttttagcaacggaaatttaaaaagttttggtcattttaaaaatttaatcggcttcaaaggcgagatttactgcggcgatatctgttctaaagagactttaaaacgcatagagaattttaatccagatgttatatttcacgaagcagcgatctcagatactactgtgagtgagcaagacgagataataaaaataaatttaaactcattcaaggatctattaaaaatagctaaaaactgtggttcaaaaatgatatacgcaagcagcggtgccacatacggcaatgctccaagtccgcaaactgtcggacatcttgaaaatccagcaagtgtttatggtttttctaagctgatgatggatgagctagctaaagagttttatgctaagttcaaaactcatatcgttgggcttaggtattttaacgtatatggcggaggtgagtttttcaaaaacaaaacttcttctatgattttgcagtttgggcttcaaattttaagtggcaaaactccaaaattatttgaaggtagtgataaaattttaagagattttgtgtatataaaagacgttataaacgcaaataaactagctataaatggtataagcggagtttataatgtaggaacagcaaatcctaggagttttcaagatatcgctgatattttgcagcgtgaaatcggtgtaaatttaggcaacgaatatataaaaaatccatataccactcagtatcagtttcatactcaagcaaatatcactactacaaaaaatgggttaaaatatgaaccaaaatggagtttggaagatgggattaaggattatttgccagagatcagacgtatttttaaggaagaattaaatggttaatgttttagtggtcggtgatttgatgatagatcactatgtgtggggaagttgcgatagaatctctccagaagctcctgtgcaagtagtaaatatcaaaaacgaaactaaacgcttaggcggcttgggaaatgttatttcaaatttaaaaactcttggcagtgaagtaggcgttatcagtgttgttggcgatgatgatgtgggtgatgagatacttgaacttctaaaagataggggcgctaaaactgagcttataatcaaagaaaaaggacgaaaatccagccaaaaaagtcgcattatggtagctcatcaacaagttcttaggctcgataccgaaagtgtttgcgagataagcgtaagcgatgatatcatatctaaatttgaaaatattttgagccgatatgatatcgtgttactgagtgattatggaaagggtgtattaagtccatatcttacaaaagagattataagaatcacgaaaaaatcagggaaaatggttttaatagatccaaaaggtaaagattactcaaaatacagcggcgctactttgctaacaccgaataaaaaagaggctagcgaggcgcttggatttgcgataaatgatgaagatgatttaaaaagtgctttaaaaatgcttaaagataaattcaagctcgattattcgttaatcactttaagcgaagatggaatagggcttttagatcaagaagtaaaaaaatttccagcaattgcaaaagaggtatttgacgtaacaggagcaggcgatagtgtgcttgctactcttggatactgtcttgctagcaaaatgagcttagaagagtctatagaaatagcaaatttagcagcagctgttgtaattggtaaagtaggaagtgcggatgctagttggggtgaaatcgagaatttgaagtctaaaaaaagcggctttgaacgtaagattataagtcttagtgagctgttaagagtgggcagaagcggtaaaactatggtatttacaaatggttgttttgatatacttcattttgggcatattagttatttgcaaagtgcgaaaaaactaggagatatgcttgttgtaggattgaactcagatagatctgttaaagagctaaaaggagaagatagaccagtaaatgctcaaagtgacagagcaagtatgttggcggctttggaatttgtagattttgttgtgatttttgatgaggatacgcctttaaatttgataaaagcgttgaagcccgatattttagtaaaaggtgctgattacgcaggtaaaaaggttgttggaagtgagtttgtgcgtgaggtaaagttgataaattttgtagatggaaaaagcaccacaaatataataaataagataaaaggttaaaaatgaatactgtatttttaaatgagctagaagctcacaaagagactttagctaaaacttatgagctaaatgaaaatgttttaaaagcgtgtgaaatggtggttgaaactttaaaaaatggcggcaaggttttgatatgcggaaatggtggaagcgctgctgattctcagcattttgcagcagaacttacagggcgttataaaacagagagaactccgcttgctgggatcgctcttagcaccgatacttcggctcttactgctatcggaaatgattatggctatgatgaggtttttgcaagacaagcagcggctttaggcagacgtggtgatatcttgataggaatttctactagtggaaatagcgcaaatgttttaaaagcactaaaaacagcaagacaaaacggactaaaaacactcgggctaagtggtagaagcgggggcactatgaatgatttttgtgatttaaatttgataatacctgctaatgatactgctagaatccaagagatgcatattttggtgattcatactatttgtcaagctgtggatttagcttataaatagcatctagcaccatttttggtgttagatttttcatacattcgtgtgagttcaaaggacaaactctcttcatacagggcatacagtctaaatcaagatgtagtatctttgcattgttatttttatatggagaggtttctttgaacttagtaggtccaaaaagtgctatagtaggcactttaaaagttgctgctatgtgcataggaccgctatcgttagtgataaacatatcaagacctgctataaagcttgctagctcacaaatagtggttttgttacataaattttggtattttactccgtttttttcaagt

SEQ ID NO: 4470 - DNA, 21683 bp, synthetic construct
  misc_feature 1..21683: note = Synthetic
  source 1..21683: mol_type = other DNA
aaaggtggagttcaaagaaaaagacgcttttaaatttgatccactctcagcgccaacgccaagaaatgaaccaaagaaaaaggcaacacctagctttgaaaatagagccaaagaccaaagaatttatgcagggtttgagaggataagagaggttattaaaacacaaaaaggagagcaaaatgactgaaaaacaagccatgctaagaagacagctacttagcaaaattcacactcacaagcgatataaagagctaaaggcgagtgatgcgtgggagacgtttttggattgtcattttaaaatttgctcaagtgcaaaactaagcataaaagagctttatagctgtttagatctcttaaatggagctataaatagcgtagatgagatagactttaaaggcagagaagtcatagcaagagataaaaaagccataagtagcgctgcacaagtagacaggataaaagaattaatgaagattatcggctgggacgagctaagacttaaaaagtttgtcatcaaacagctaaaaatcatcgcagatccatttaaaatgagtgtaaaaaacagtagcaaactcatctatatacttggaaaaatagcaaaggataaaaaagcatgatatgtccgttaaaactggactttaaggagttactatgatatgtccattctgtggaaaaactactaaagtagtggccactataaaaggtcttgaaaataggcgttttaggcggtgcagtgcttgtaataaaacctttgaaaccaaagaaaaagtgcttataaagccgtttgattttgggtatttaaatggcgagtataaagaatatacagatgaagagaaggagatagaaaatgaaatatgataaaaacctactttcaaaacttttaaaaagcaaaatagcaaaatcaaaagataaaaaagcagtcatagatgagcttcttagctatcttggcaaggaaaatcaaaaagccttaaaaaatgcacttgatgagctgtttttgatgataataactcgcaaggatgatccaaatttgcaaagcctaatccaaaataagataaacgcacttgagctaaatataccaaatttagattatgagagcatatatgaaaaattcactgataatgcgttgccaaacgataagtttaacaatatcgcttttagcttcgatacaagcgatatcaaagcacttgaagttatgcgtaaaaacttctactggatgaaaaatgactacaatgaaaaagtaagcgatgaactaaagagtatcacggctaaagtctttagtggcgaaatttcaaggactgagatggcaagtgtgcttaaagagcagtttaaaggcgtgttatcagcaaatactagctattttgagggggtgagcgatcacataataagccagatgcaaaatatagctagagtaaatcaagccagcaaatacggcgtaactcactacaaagtagtagcaaggatagatagccgcactagccagtgctgcagatctatgaatgggcgcatagtgccagcttcacatatagaaactcaaagtaggaatatccaaaacgctaagaatatcgctgagaaaaaagcagcagctacttggcgaaatgagccattttatggtaaaattttgcctaagaattttgggcttccgccatatcattttagatgtcgcactgagcttgtgcctgtgtggattgatgaagagatgatagatggtaaaatcactaaaaatacgagcccaaaagccaaagatgagctttttagacatattgatagtatgggctatgaaagagttgctaaaagcgatatttacacgcacggacaaagcggatatattaagcctagtaaaacagaactaatatctgctatgaatagtatcagcgatattaaaactagcatacataatccagcaaggcaagtagcaataagcggtaaaactattatcatttatcaagatgataaggtttggactgttattaaaaagcatagccaaaattcggcaaaacaatactttaaaaataacacggagaataaaatatggaaaagcgaaaattatatattttcatcgatgaaaaaggctggcatattacagacaataatgaaaaaaatagttggttaaatgatgatgagctagatacaaattttgccgaagtatttggcataaatgaaaaaataggttttttaggagaatggacttggagcgataatttccttaagttaaagagcgataaattaaatgaaatttgcgactttgaagtactagcaaacggctataaattcagcggtactttcatagatgctttggagtatatcaaagcgaatttaaccactatttaaaagccctttaaaaaagcttaatttaaataaattgtgataaaataaagccttaaaataaaagaaggttatttatgtataaaacattttttaagcttatttttgataatattctcatattcaacttagtagctacggctattaaccgagcctctaaattttaggggcttggacttatgagagtttatgcctacattgacggatttaatctttatcactccattttatcatttaacgagccacgcctaaaatggctaaatttacgctcactttgcgaaagttttttacaaaaaggcgacgaattaaacgaagtttatttcttttcagcatatcttacacatatccaggataaattctcacgccattttaattatgtaaaagccttacaaagcgtaggcgttacgccagtaatgggtaaatttaaaaagaaatatccaaaatgtaagatttgttttaataagtatcaaacttacgaagaaaaacagagtgatattaatatcgctattacgcttttacgagatgcttttttggataaatttgataaagcttttttgattacagctgatactgatttagtttcaaccataaaaatgattaaagagcttttccctaaaaagccagttattttacttataccgccaaagcgtagaaaatatgcaaatgaactaatacaaacggctaacgctaattttgagataaaaaaggcaaatttattaaaatcgcttttgtctgataccatctatttaaaagatgaagtgataaaaataccaaatgagtatttaaaacccctttaaatgggcttttgatactttttaataatacttaaaagctcatctaaggttttgcctttttcgtagtaaaacaaaaatggctcaacccaatatggcgtctcatctttttgcttccagttcataagcgtttgatatggcattcctacaatttcgacaaattcctttttacttaaatttaatatattaagtctgttttcaaactctacattagtcataaggcacctttttaattaaaataatagaaattatacaaaaaaataactaaaataattataaaacccttgacaaaactattaaattaagatataattacaacataaattaactgaaatagttaatttaaattaaaaagaaaggtggaaaagatgaaaaagttaagattaatcgcgatagtcttacaaatcgccttttatgtaatggcgatactcaagctcttaacaagctagagccagcccgcaagttgcgggattttcatcttttccgtgttgcgattataccaaaaaaaggagtaaaatgagctttgaatttattttaatcgctgttttagcagcgtgggttgggattaatgagtggcgtttaactcgcctagaaaatgaagttaaaaatctaaaggataaaaaatgaacgaagttatcgttataaatggtcaaagtgtagagtttgaagtggcggatagtggggtattcgccacttctttgagtgtttcaaaagtattcgagaaacaacacaatcatattttagcaaaaatagctgaatttccagacgataattttcgtgcgtcaaattttcgacttacggagcgaaccgctaaatttggggctgtcgtgcgaagtgagccgtattataaaattacccgcgacggcttttcgcttttggttatgggctttacgggagaaaaggcttacaggtggaaaatcgaatttatcaacgcttttgataaaatggaaagcttgataaaagctgctaaaaatagtgatctagatctccaatctaaattcgctgaaattttatctgctttaaaagaaaaatcaaatgaggcagatgagtataaagctaagtattatgagagtttagaaaatgaagttgtgcttttaaggcaagtagcaaatcagagtaaaaaagaagttatctataacacaaagttaagtaagtctgaaaaagaaaatatcataaagctttataaaagtggtataagccaagctgaaatttgccgccaaactaatagaagcgacgcggcagtaagaaatgctataaggggtgcattatgaaagatataagcgtattttacttagacgaggtagaaaatgccagagagcttttatttggtcttagcgtcttacttgaagggcttggtaggatttgcgaagatgacggcggcagagttggactaacacaggctttatatgtgcttgataatctttgctttgatatggctaagaaattgcaagatacgccgatagaatgcaaaggagtaacaccggctctctagctcgtctatcgcatagcgtaagccatgctactctctcacgaacggataatgagtagtcgttgtcctaccttatccgctcacttccagatgaaatttagaaattcaatcccttataaagagataatggactttttagcaagtaagaagatatctataaatctattcttctacaatcaaagctcaaagagcaatatttcaagcgaacgcagatataagactttgagactttttaaagcaaaagctagtcttggtggtggagcttggaatgaagatactctgagcgatgaacttattgttgataaaaagatgaccgagttttttaggagcgataattgtgacattatcgagaccataggtgatagtatggagcctcatattcaaagtggggattggtgttttatagatagaagtgacaaaaagatgaaaaatggcgaagtttgggctgtcaatacccctgatggagtagtcatcaaagagtgctatatacaagaaaatgagcttatgctagtatcatttaatcctgtgtataaaccagttagattttatatttgtgagtgtcaattagtaggaaaatttatagggttgcttaggagaaattagctgttttacagaaacgtttaaaaagagttgattgtgagagacttttgcgtttaaaatcaaactattttttagtccgtttttaaagcagtttgattttaagctaaaagtagtttgattttaaaaagcgttttacagctttcaagaagtttttctaacatttttttccttgtagaatcgattttttgtaatcatatcataaaaattataatatatcaagatatattgatatattatattattcttttgaattaaaatagaaataactaagttggggaaatgggagtaccctaactaaggtgttatttatctaatcattatctttcaaaatctcaggttcgccaaatagtctttttagctctctcgcatttgagttgagttgtgctagaagaggatcttcgtctttttttgtgaagactggtatgctgagttttgtctcaatgttttgagattgttctatagctaactttttatctgggacttgaggtagctcgctttctaaaagtttttggactgctttgttttctttatgctcagcttctaccttttttatttctatttttgcgctatttccaaagcatttgcgcagtatttccattatgatagcagatgaccttctaagaatttcttgatttttaccgcttgcacttgagtttagtatcaaaatattatctttaaattcgacaaatttcacgcactcatcaaagcaacttccaagatcaaaatctctatcgtaaatttgatttaaaaagtcttgataaggagtttgaattttctttatctgtatttgctctggtgctactatgcttgtttgcacaagctctagtttactgtctttgagctcttttatagcgtcatctatgctagttagattaaaagcttcaagcatcataaaaagcgctaaatacaaggcaaactcaggatcactgccttgacctagcatattttttgtttcagacaatatcctaaaaaatcgctcaaaaataagtatagaaaactttgagttttgatttataaatttatcttttaaatttataatgagttcgtcgatgatcagctctgcgtcgcttcggctaagttcttttaataaatttaaaagagcgtttttatctctgctagctactacttcaaggatctcttctatcttttgcggatcaagaagtccaagcatatctgcgactgatttttgactaacgaattcgtgagagaagataatggcttgatcaagtaaagttagagtatctctaaggcttccagatccacttcttgagagtatctcaagtgctttttgttcgtattttataccttctttgtttagtataaactcaagatgttttagtatatttgactttgatattggtttaaatctaaagtgctgtgtacgtgagagtatcgtggctggaagcttaagcggatcagtggtcgctagtataaactttatgtattctggcggctcttcaagtgtttttagtaaagcattaaatgcttcttttgtgagcatatgaacttcgtcgatgataaagatcttaaatctagcacttgatggagagtattttgtatgttcgatgagctctcttatatcatcgatttttctgtggctagcggcgtccatctcgatgatgtctaggtgacgtccttcgtttgccataatacagtttgcacaaacctcacaaggatgtgagccgatacctttctcacaaagcaaagctttggcaaatatcctagcactgcttgttttaccgcttccccttaaccctgaaaaaagatatgcatgaccaagtctgccagagtcaagtgcgtgagataagctattagctacaacgtcttgaccgataagctcgtcaaagctctttgggcggtattttagggctagtgctttcaagctttttcctaatcgttcatacttccaagaagctcttcgttactagcggttttaagcatttttgagtataagaatttgagcgcttctacgtcttccattgttgctatgatatttcttatagcccaaattttgcctaatttgtctggaccttgaagaagctcgtcttttctagtacctgattttaagatgttgatagctggataaattctcctatcgctgatgttcctatctagtacgatctcgctatttccagtacccttaaactcttcaaatatcacgtcatccatacgtgagccggtgtctatcagagccgttgcgactatggttagacttcctccgttttctatatttcttgctgcaccgaaaaatctttttggtttatgtaaagcgtttgcatccacgccaccacttaatactttaccgctacttggagttgcagtgttataagcacgagccaaacgagtgatgctatcaagcaagatcactacatctttacccatttctactaaacgttttgctttttctataacaagttcggctacccttacgtgatttagcgcaggcaagtcaaaagtcgagctaaatacctctcctcttactgagcgttccatatcagtaacttcttctggacgctcgtctataagaagaactatgagctcaacttccggatgatttctagcgatcccgtgagctagttctttcataagttcggttttacctgttcttggaggagctactatgagtccgcgctgtccttttcctattggcgtaaaaaggtctaaaacgcgcccagttagcttcatcgggtcatattctaattttaatttttgagttggaaaaatcggtgttaggttgtcaaatagcggtctttctttggcttcttggatggatttataatttatagcttctatttttaaaagagcgtaatatttttcttgttctcttggctctctaacttgtccagtgatgatatctccgacacgaagagcaaattttttgatttggctgagacttacgtatgtgtcatttgccgagtcgcttaaatttgcgtctgttgcccttaaaaatccatagccgtctggaactatttccaaaataccggtaaatagtataaatccaccttgttttgtttgcgcttttagtatctcaaatacaagttcttgacggcgaaattcgcgtggattttccactcctacttcgtctgctatggctactaggttgttaaggtcgagttgtcttaattcttcgattttgtatccatcaactggaatatgagtacgcgaatgttgctttttattgttccctgcgttgtaggattgctctttgacattgtctttattttccattaaacctctttaaatttttgtgataatatgcagtcacaatgaataaattatgtagttttgatgttgagattttatacaaaaaatataaacttgtcaagtttgataatggaatttagactgtcttaattataaatttattttagatttatttattgaatatattttaagcttattttatataacattatacaaagtatataaataagggcaaatatatgaaaatagcggcttttgatataggtattaataatatcggctggtgtttatgcgaacaaaatgataaagagtataaggtaatcgattgtggcgtaaggatattcacagctgcagagcatcgaaaaactggagatagtttagcagctccaagaagggaagctagattatctagaagaaggctataccgaagaagaactagattggctgagttacgaaatttactttgcaccgagtttgggttagataaaaaaatatttgaaatgcaaggtgctaatttacctcaaatttataaaacttcaaaagaaattttaagcccatgggaacttagggttaaggcgttggatttaaaagttgatatcaacgagctagttaggattattttacacatagcgaaacatagaggatatgcaaatttaataaataataatgaaaaagataaaggtaaagttttatcagcaatagcacaaaatcaagaagatattaaatcatatctaagtggtgctcaaatgcttgtggagcgttattttaataaagaaataaaaagttgactatatgagagtattagaaataaaactgatagctataaaaattcactttcacagtcattaacaaaagcagaattagagcttatactaaatactcaagaaaaattaggatataaattttctccaaaatttaaagaaaaagttttggatattgcgtattttagaagacctttaaaagattttagtgataaaattggaaattgtgtattttttgaagatgaaaaaagagcacctaaattcgcgattgattcattggagtttgtcgctatttctaggataatcaatgagttaaaagctatttcaaatgatactggcttggtatttgatgtaaaagatgtaatagaaaagacgctaaatgaagcaagaaaaatcaaaaaatttacatatgccaaatttagaaaaatattatttcttgatgaaaaaatcacattcaaaagcttaagatacatcaaaaacaatccggaaaatagtgagtttataaatttaggtggttttgtagagttatcaaaaataatcggcgataattttactagagatgagtttaataaaatagcactatatgcaacattgtcaaaagatacaaatttgctaagacaaaaactaagagaaatagggcttgataaatttgatgatgaaacattaaatagcattttgaatttaaaatatgctcattttataaatcttagttttaaagcgttacaaaaaatacttccgtacatgaaagatggatttagatatgatgaagcttgcattcaagctggtctatccatcaagtcaaatttaaataaaagtgatttttacctccttttatcgatactccatattcagatcaacttacaaatccagttgtttcaagggctgttcgagaatatagaaaagttgtcaatagcattgtaaaaaaacatgggaaattccataaaatccatatagagcttgcaagagaaatcggtaaaacttttgaagaaagaaagaaaatagaaacagagcaagcaaataatcataaattaaataatgaggctatgatattttgtcaagaaataggactaaatccatatagcaatcaaaatatattgaagataaaattatggcgtgagcaacaagaaatttgtatgtacagtggtaaaaaaatatcaataaatgatatattgtcaaatttggttgaaatagatcatatactaccgtattcaagaagttttgatgatagtatgagtaataaagttttggtttttgctaagtttaaccaagaaaagaaaaatcaaactccttatgaagcttttagtgataaagatttttggaatgatattgtattgcgagcaaaatccttaaataatagttctaaatttaaaaagctaactacagctaattttgttaacaaaaaagatggaagtgattttatacaaagaaatctaaatgatacacgttatattagtagactggttgtgaattatactagggattatttaaattttcttgattttgacgatggcaaaaaggaacatttactgtgtgtcaatggatcacttacttctatgcttagacattattggggttttggagataaagatagaaatggacatattcatcattttgttgatgctgcgatactatctgcttgctctcctagcgttatcaaagcttttagtgattttaaaaaaaccgaagagataaacaacgccaaatattatgctgataagataagcggtctaagaataaaatctaaatttgatccttttataaattttagaagtattgttttggatgctgctaaaaatatttttgttagtaagccgccacgcaaaaaagttactggtgcattacaccaagaaacgataataagtaaagatgatatcttaaaagagcaaaaatatggcagcgagctaggattaaatagagctttaaatcttggtaaaattagacaaataaattatggatatgtagataatgcagagatgccaagggtggatatttttgctgatagaaaaaatggtaaattctatggagttcccatatatactatggattttgcacttggtattttgccaaataaagcttgtgtgaagggcaaagacaatcaaggaaatatcaaagattggcttgaaatggatgaaaattatgagtttaaatttagcctgtttaaagatgaccttataagaatccaaaaaagtggtatgagtgaagctgtagtttgctattataattcttttaatgtttctagttgttcaataagcgtagaaaaacataatgccgatgcaaaagatttgagtgacaatgaaaagcttttatatccatcatctaaaaataaacgaaaaaaagatgatttagatgatgcaagccctgctacttatgaagcaattcaacctagtcttggtattcagtctttgcttaaatttgaaaaacttatcgtttctcctttgggtgagatcagtgagtttaaattcgagcctagagcagatgtgagattaaaaacatccaaaaagactaataatgtttgatgagagttttaggactattttatttgtaaatccggcaagattatcgcttaaaaattcgaatttattcgtgcaaagagatggctttgatgatgtaagtttgccgctaaatgatatagcctatattattttggaaagtccttgcattacattgagttctgctttgcttagcaagctcgctagctccaaaaccatactgcttacatgtgatgataaccatatcatcaatggtatatttaatccatatttgactcattttgaggtaaataaaatcataaaacttcaggtgagtcaaggcgatgcacaaaaatctattctttggcaaaggataatcaaatctaaaatttaaaatcaagctaaatttataagtctttttgatgataaaatatcggaaaatttgatgattctacaaaaaagagtcaagctcagtgattctcaaaattgtgaagcaaatgctgcagctatatattttaaagcactatttagcaaggattttactagagatgatttatgttttataaattcagctttgaattatgtgtatagtattattagggcttgtttggtaagagacatagtgagtagtggattgctaccaaattttggtttgtggcacgatagcgtttataatcaattcaatctagccgatgatttgatggagccgtttcgtatttatgccgatagattgatatattctatgatgaatgatagcaaagatatatttttagacacaagagacaagcaaattatgattggtattttggatactaaagttatgatggggaataagagctttacattggctatggcatcaagagtatgcgttcaaagctataagcatgcgatcttaagtggagaaaatagcttagatctaccggagtttgtttgatggagccgtttatgcgagtaatggtaatgtttgatataccagttaaaacaaaagatcaaataaaaagggctactaattttagaagccaactaataaaacgtggatattttatgatgcagttttctgtttatatgcgtgtagttcgcggtatgacaagtgctagggctcatatagaaagactaaaaggaatcttgccgcccgaaggaaatataagattgttgtcacagaaaggcagtttgataacataataattttgcttggtgacaataatgagcaaatgaaaaagtcaaaaccagtacaacttactctgctttaaaaaaattcggttttaagggattgtaaccctgcgcagaccgaaaactgcttattttaggcacttcttaaatttgttttcgaattttatcagaatatattttatctgtcaaatatatctcagatacctattttataggcatttacactaggtctattgtagcataaacaaatttaagaagtgcctaaaaatacctgctatatattatgtaaaaaaataatatatgaacaacataaaacaatacgaaaaattaaaaaagtacaaataaaaaataaatataaataatccttttattgctaatataaaaaggctaaaacaccagtacaagctaatctttagagcttaaatctgcgctcgaaatagcgcttaaagatataaaattataaaacagtttaagagctatccaagtaaatattatattgattcaataccatccaaataatgatttgtttgtatctaagtgtgaaattttagttaaatcttcatcatcaagactaaaatcaaaaatatctatattttctatcattctgctttttttggtggtttttgggatagcgataataccgttttgtatcaagtatctaagcccgatctgtgctatatttttaccgtgttttttagcgataccgtctaaaacaagatttgaaaaatacccgtttttgccgtttgcaaaaggactccaggcctctaaacgtgtatctttcatgactgctcttagctctttttgcataaaaaacacatgagtttccatttggtttatcataggcgttattttgacgtcttttacaaaatcaacatattttttagtggtaaaatttgaaatcccgatagcccttaaaacaccgttttcatagagctcttccatagctttatacatctgttttgagtcagaatacgccccatgtataagaagtaggtctatatactcgagcttaagctttttaatggctacatttatggattttaaagtctctttatagctcatattttgtgatagttttgtagtgatgaagagctcatgcaatggcactttgcttatacgcaaagcttctcctacctcttcttcattgccatacatttgggctgtgtctataagcctatatcctacgcttagcgcgtctaaaacgcatttggtagtatcgctcaaatcatatgttccatagcttaaaataggcatttttacgccattatttaaatttacgcttggaatttgtggtttgtttgtagcaaataaatttgagttcataagcgctaatcctccgctaaatttgactaaattcgatataaattctcttcttgtttgcattttgcactccttgtttattatacgataaaaataaaaaataaaagtagaacaatactccagatctcttgccttatcctataaaaatcgttttttaaatttatttgtgacaaaaataaaacaaattattttataccttaagcgatatttttatataattatctaaatttaaaatatggatctttatgggtaaatttaagtgccttcactgtaaaagcgagtttgatactagcggtgtgattttagacgaaaacggtaatgaattttgctgtaacggttgtaaaaatgtatttgcttttttgagttcaaacgggcttgacgagttttacgacaggcttggaaagcagacacatataaaagcaaaaaaagtagaagagtttaaagatgagtctagtaagagtttttacaaaaattatgttaaaaatagcaacggcttttgcgaaatttatcttatcatagaaggaattcactgctcggcttgcgtatggctaaatgaaaaagttttatctagcttaaatggtgtagtcgaagtagagataaacgctgcaacaaacaaagctcacataaaatgggacgatagcatagtaaaattgcctgaaattttaaataagattatggctatcggctacaaccctctaccttatgacccaaacaaagcagaagcaagagcttcacaaaaaagaagggaattttatgcaaaaatgcttactgggcttttttgcacgatgaatataatgtggatcgccgtggcgctttatggcggatattttagcggaatgagtagtgacgtaaaagacatcttgcattttgccgagtttgttctttctagtcctgtgcttttttataccggtagcgagttttttaaatctgcttatttgggactgaaaaacaaaagagtaggtatggacttgagtgtagctgtcggggctagcatggcgtatttttactcggtttatgcgatgctttcacgcagcggcgaagtctattttgatagtgtagcgatgataatcacctttgtgtttatagggaaatttttagaagttataagcaaaaaaagagctattgataacttagatagtttaagcggtatgctagttagtgaagttagcgtgaaaaatggtgatgattatgaactaaaaagtgtgaatgatgtacaaataggcgatatcttagctttgcgtcagtcagaaagagttcagatagatggtgtcgtaaaaagcggagtggggagctttgattattcgagtttgagcggtgagagcttacctgtgcttttaaaaagtggtgatgagataataagcggggcgatatgtgtagatggagctttggagtatgaagcaaagaaaacttttgaaagttctatgcttagtaaaatcatctctttgcttgaaaatgcaagttttaaaaagccacgcatcgaagagtttgcaaatcaaatttcgggtaaattttctattgtaattttgcttttaggaatgcttacatttatattttggagctttaactctagtgtgtcaaatgcagtaatcatcgctgtttctgttataatcatcgcttgtccttgtgctcttagcttagctactccagtagctagcttgataggtcttggagtaagcttgaaaaaaggtgtgatatttaaagaagcaaggatattagagagtttagcaaagtgtaaatgtatagtttttgataaaactggcactcttactaaagctaaactaactttggtaaaagctactaaatttgaagaatttgatgaaaacttgctttattctttgcttagtgtttctactcatccagtaagcgttgcacttaaaagctcattagaagggaaaatttaccatttacaagaggtacaaaatgtattggctcgtggagtaaaagctaaatttaatggtattagcctagttggtggaagtagtgagtttatgcgtgagcttggaatttatgcagattttagggatgcgaattattgttttgcgataaatggtagagcggttgctttgtttgagctagaagacgagctaagaagtgatgcaaaagatgtcataacaaagctgatagatagcggttttaaggtcgttatgctgaccggagatgataaaaaagtagccaaaaaagtagctaaaacacttggtatagatgagttttatgccggagtggatcctattagaaagtctactatcataaaagaattaaactcaaatatgcctactgttatggtgggagatggtataaatgacagcgttgcgctgagtctggcaagcgtgggtatatgccttggaagtggcgctgcgatcagcgtggaaaaaagcgatgttatcttgctaaatgataatctaagtagtctaaaagatgccatagatatctctagatatacatttaaagctattaaacaaaatctcgctttttcgcttatttataacgctataaccatacctttggctatggcagggttcatcataccgctatttgctgcactttctatgtcttttagctcggtaatagttgttttaaactcatctaagatcaaattcaaatttaaaggttaaaaatgggagcgatcatagccataatgcttggaatttctacattgcttggagctttggctctttttgggctaatttggggtgtgaaaaatagacaatttgatgattattccaaatttttagatggtacaaagtacgatagcgaggattcactcaatgatgcatataagatggaaaaaagaaaagaagaacttataaaaaagaaaaaagaaggcggttatcgcccgcctgattaaagtaaatttgcacccaaatttgataaatttaggatgcaaatttgactaaaagcttattttaaagttgagatatagtcattaacagcagccatatcagcttcgcttagtggagccatttgacctttcatgattccgcccataccaactttacctttaccgccatttaatgatccgtctttgtatgctttcatatctgctagacgtgttgcagcgtcgatctcagtaagtactggaactttatttaggtattttttctcagcttttgcaccgtggcaaactgcgcattttttgaaaatagtcgcgccatcagccgcaaaagcgctacatgcgaaagcagctataacagaaacaaataaaatctttttcattttttgtccttaataaatagaaatgttcgttattataatgataaaaggctaaattttcgtttaatagaatttgtataataaatgcttaagatttgcggtgattgcggataaaaaaagcagcgatttcgctgcttaatattatttcaaagttgaaatatagtcattgacagcagccatatcagcttcgcttagtggagccatttgacctttcattacgccgcccattccaaatttacctttaccgccttctactgtgccagctttatactctttcataagagcaagtctctcagcagcgtctaccgtagtaagtactggaactttgtttagatagcttttctcagcctttgcgccgtgacaagctttacatttgttaaaaatagtcgcaccatcagcagcgtacaaactacagctcaaagcagcaagtgcagagataaataaaatttttctcataataatctccctcaaataaaaaaattaattttgaaattatatattcgttttataaaattaatagtaaacgagatgattaaattttgataaataaaaataaatcataaaaatttaatgtaaaatcgtgtaaaatgcactttatgaaaaaaataaaagcgatttttttagatagagacggagttataaataaagacttgggttatgtaagtaaaatcgatgatttcgtgttttgtgatggtatttttgaagctttgcgcggatttttgaagcttggttttgcgctatttgtagttacgaatcaatctggcataggaagaggatattacactgaggatgattttttaaatttaactaaatttatgcttgatagatttaaaaaagaagacattgacataaaaaaaatatattattgccctcatgttccagaagaaaactgcgattgtagaaaaccaaagccgggtatgattttaaaggctttgagcgaatttgatataaatttagaaagttctatgatgataggtgataaaaatagcgatatactagccgcaaactccgcaggtatcgataattgctatttaatcggcgaagatagcagcttaaaaaccgttttagacgtgtataagttagtatataaggaatgtatatgaaaatagtagtaactggaggagccggatttatcggttcaaatttagccaaatattttatggacgaaaatgaagttttggttgtggataaatttagaagtaatgaagtttttagcaacggaaatttaaaaagttttggtcattttaaaaatttaatcggcttcaaaggcgagatttactgcggcgatatctgttctaaagagactttaaaacgcatagagaattttaatccagatgttatatttcacgaagcagcgatctcagatactactgtgagtgagcaagacgagataataaaaataaatttaaactcattcaaggatctattaaaaatagctaaaaactgtggttcaaaaatgatatacgcaagcagcggtgccacatacggcaatgctccaagtccgcaaactgtcggacatcttgaaaatccagcaagtgtttatggtttttctaagctgatgatggatgagctagctaaagagttttatgctaagttcaaaactcatatcgttgggcttaggtattttaacgtatatggcggaggtgagtttttcaaaaacaaaacttcttctatgattttgcagtttgggcttcaaattttaagtggcaaaactccaaaattatttgaaggtagtgataaaattttaagagattttgtgtatataaaagacgttataaacgcaaataaactagctataaatggtataagcggagtttataatgtaggaacagcgaatcctaggagttttcaagatatcgctgatattttgcagcgtgaaatcggtgtaaatttaggcaacgaatatataaaaaatccatataccactcagtatcagtttcatactcaagcaaatatcactactacaaaaaatgggttaaaatatgaaccaaaatggagtttggaagatgggattaaggattatttgccagagatcagacgtatttttaaggaagaattaaatggttaatgttttagtggtcggtgatttgatgatagatcactatgtgtggggaagttgcgatagaatctctccagaagctcctgtgcaagtagtaaatatcaaaaacgaaactaaacgcttaggcggcttgggaaatgttatttcaaatttaaaaactcttggcagtgaagtaggcgttatcagtgttgttggcgatgatgatgtgggtgatgagatacttgaacttctaaaagataggggcgctaaaactgagcttataatcaaagaaaaaggacgaaaatccagccaaaaaagtcgcattatggtagctcatcaacaagttcttaggctcgataccgaaagtgtttgcgagataagcgtaagcgatgatatcatatctaaatttgaaaatattttgagccgatatgatatcgtgttactgagtgattatggaaagggtgtattaagtccatatcttacaaaagagattataagaatcacgaaaaaatcagggaaaatggttttaatagatccaaaaggtaaagattactcaaaatacagcggcgctactttgctaacaccgaataaaaaagaggctagcgaggcgcttggatttgcgataaatgatgaagatgatttaaaaagtgctttaaaaatgcttaaagataaattcaagctcgattattcgttaatcactttaagcgaagatggaatagggcttttagatcaagaagtaaaaaaatttccagcaattgcaaaagaggtatttgacgtaacaggagcaggcgatagtgtgcttgctactcttggatactgtcttgctagcaaaatgagcttagaagagtctatagaaatagcaaatttagcagcagctgttgtaattggtaaagtaggaagtgcggatgctagttggggtgaaatcgagaatttgaagtctaaaaaaagcggctttgaacgtaagattataagtcttagtgagctgttaagagtgggcagaagcggtaaaactatggtatttacaaatggttgttttgatatacttcattttgggcatattagttatttgcaaagtgcgaaaaaactaggagatatgcttgttgtaggattgaactcagatagatctgttaaagagctaaaaggagaagatagaccagtaaatgctcaaagtgacagagcaagtatgttggcggctttggaatttgtagattttgttgtgatttttgatgaggatacgcctttaaatttgataaaagcgttgaagcccgatattttagtaaaaggtgctgattacgcaggtaaaaaggttgttggaagtgagtttgtgcgtgaggtaaagttgataaattttgtagatggaaaaagcaccacaaatataataaataagataaaaggttaaaaatgaatactgtatttttaaatgagctagaagctcacaaagagactttagctaaaacttatgagctaaatgaaaatgttttaaaagcgtgtgaaatggtggttgaaactttaaaaaatggcggcaaggttttgatatgcggaaatggtggaagcgctgctgattctcagcattttgcagcagaacttacagggcgttataaaacagagagaactccgcttgctgggatcgctcttagcaccgatacttcggctcttactgctatcggaaatgattatggctatgatgaggtttttgcaagacaagcagcggctttaggcagacgtggtgatatcttgataggaatttctactagtggaaatagcgcaaatgttttaaaagcactaaaaacagcaagacaaaacggactaaaaacactcgggctaagtggtagaagcgggggcactatgaatgatttttgtgatttaaatttgataatacctgctaatgatactgctagaatccaagagatgcatattttggtgattcatactatttgtcaagctgtggatttagcttataaatagcatctagcaccatttttggtgttagatttttcatacattcgtgtgagttcaaaggacaaactctcttcatacagggcatacagtctaaatcaagatgtagtatctttgcattgttatttttatatggagaggtttctttgaacttagtaggtccaaaaagtgctatagtaggcactttaaaagttgctgctatgtgcataggaccgctatcgttagtgataaacatatcaagacctgctataaagcttgctagctcacaaatagtggttttgttacataaattttggtattttactccgtttttttcaagttctaatgctatttcgtcgcagatattttgttcat

SEQ ID NO: 4471 - DNA, 23162 bp, synthetic construct
  misc_feature 1..23162: note = Synthetic
  source 1..23162: mol_type = other DNA
agcatgcccagcgtgacgatgaaggacggcacgccccacagagcagtcaccaaaccgttggccgcaccgcataggaggcccgccatgaggcacaacggcagcgccgccgccagcggccaaccgcccttcacgagggcggcgcccagaacggcaccgctcagcccaagcacggaaccgacagacaggtctatgccggcgatgatcagcacgtaggtcatgcccacggccacgaccaccagcgacggaatctggttggcgacggtaagcagggtggtcatggtgaagaaattgtgcgccgagaatccgaagatggcgaccagcacgatcagcaccagagccatgccggcgtagtcggtcagtatgcggcgaaattgtgaagaggtcattgtgtgcttccctgacattgacttggtccgtcccaaggccccgcaattactccgtggaatctgaattcggaacgagcggctctatgctccgtatcaattcgggcacttggccgacggcgacgttccagagacgctcttggagaatactgccgtaaccatgggctaggatggtgcgcagtccaatgatcgcccgccagggtatgtcgggatgggcggcacgaaacgtttccgagagtttgcgagctgattcacccacaatctcaagggcgcgttccagtgccagttgctgcgttcgaccattcaaatagcctgcaagcgatttttcatttaccaagcccatcgcggtgcgcgcgtagcttagcatgtcccagagataggcagtgtcgcggtcttcaggctgcatagattaccttccgggcaggcagaatggtgcggcggagaaacggattttccagcccttccttttccaccagatcgaccttgcgcccgaaggcgtcggaaagctccccggtcatgaccgccatgtcgagcagcgatatgccggagtccggcaggaaacttaccagcacatccacatcgctgtcgggacgaaaagcctcgcccagcacggagccgaaaagggcaagttcgctgacccgccatttcgtgcagaagtcgctgatgaacgattcagagatttccaaagcttgctgtttcatggctgtctaatggttccattgccgccttgagtataacatctagcccgccgccgtctcgcccagatgcccgctaagtgccgcggccatgattctgtcctcggtccagtcgccccgggtgaagacttcggccatgcggcccgcgctcatcaccgcgatgcggtcgcagaggccgagcagttccttgaggtcggacgacacaaccacgagcgccttgcccgtggcggccagttcgcgcatgagcttgtagagttcgaatttggcgcccacgtctatgccgcgtgtgggttcgtcgaagatgatcacacggcagtcacggtgcagccagcgggccagaaccactttttgctggttgccgccgctcagttctccggcggcctggtcgatgcctgcacagtgcacggccaaccgttccacccagcgcctcgtcacggtgttttccgcccggcggcgtatccagccgacgggcccggaaaaggagcgcaggtcggcaagggtcacattgtcgcggatggaccggggcagcagcaggccctggcccttgcggtcctcagtgagcagggccacgcccagccgcacggcatcgcgcgggccgcggatccgggcggggagctcggacccaccaagatagacgttacccgattcgggctggtccgcgccgaagacggcgcgcatggtttcggtgcggcccgagcccatgagtccggcaaagccgaggatctcgccgggttgcacggaaaagctcacatcgcgcacacgtgcgccaagacagagattctggacgcgcaggagcggcgggcccggctgcgccgtggagacggtatcggcgtcgccaatgtcgcggcccaccatgcgccgcacaatttcgtccaccgtgagttcgctggcggcatgggtggaaacaagctgtccatcgcgcagaatggtgacgcggtcggccaggcgcaggatctcttccatgcggtgggagatgtaaaccacggcaatgccttcgcggcgaagccgcgcgatttttttgaacagaagttccgcctcgcgatcggtcagcgaagccgtcggctcgtctaggataagcacacggcaggtgcccgcgagtccccgggcaatctcgaccatctgctgctcgcccacacccaacgtgcccacgggggtgcgcggatcaatatcggtgagccccacggtctccatggcgccgcgcgcggcggcgtcgagggcggcccggcgcacaaatccaaagcgcgacggcagcgcatcaaggtaaatgttctccgccacggaaagcgtggggaaaaggttgagttcctgcatgacaaaacggatgccgagccgttccgccgcaggccgcgacaggggcgcatagggcgcgccgtcgaggaacatttggccttcggtgggccggatgatgccgccgagcagacgcatcagggtgcttttgccggcgccgttctcgccgaccagggcatgcacctcccccgcgcgcagaccgaaatccacgccgtccaatgcccgcgcgccgggatagtccttgaccatcccttcggcgcggaggaaggcggtgtccacggaaccgatcactgcggtcccagcgtccccaccgtcaccaggtccacgatcgtttccctgtcctggggctcgatttcggcgcggagcatctggagggcgtactggatgccgaaggcggccagcctgtcggcgtactgttggaccgtgcaaagaatctggccctttcggatgagatcctcgacggcggagatgccgtcgtaaccgcagatgagcactttgccggttttgtcggcggcgcggacggcggcggcggcgccgagggccatgctgtcattggcgcagaggatcgcctggatctcggggtgctcggtgaggatggacgaggccacctggttcgccttgtccatttcccaactggcggactgggacgtgaccagattcagcttggcgttttcgatggcgtcgtcgaagccgagcttgcgctgctggccgttgtaggcgctggggatgccctccagcatggcgacgggcgcgtcgcgttccagctttgaggccagaaaatcagcggccatctgggcgcccttgcggttgtcggggccgacaaagggaatgcggatctttttctccttgagaacctcgtcgtcaaacttgttgtcgatgttgacgacaacgatgtcggcgtcctgcgcgcgcttgcacacgcctacgagcgccttggaatcggccggggcgatgacgatggcgtccactttctgggcgatcatctgctcgaccagattgatctgctgcgccacgtcctgctcgtccttgatgccgttgcagatgagcgtgtattcggaggcgtgctctttctggtcctcctcggcgcctttttgcatggtgaggaagaattcattggccaatgatttcatcaccagcgcaatgcggtagggtccgggctttgcgacccgggccggcttgttgggtgaggtcggttcggcgccctttccgcccgacgacggagagcatccggaagcggcgagcaatgcgcacagcaccagcgcggacaggatggacaggcaggtgaatcgtttcatgggggacatctccttggtcttttatccagcaagataggcggaacggcgcacttggtgcaaatttgcgcccggtgtggcgggggaagggatgaggaaaggttgaagactcaggatctcaccgcgccggaaagccctgtcaacgggagggctgcaaccccatttgcggggtgccgggcgggcgtgccagaatagcgggcgggcgcccgtggcgtcttttcggcagtaaacgggaatgcaaaaccggccttattcctggtatttgcgtccctttccatggcgtcgcaaaggcttgggggaatagaacatgcgccgggtactgttgccaaaataagtggttgtggcaaggcggatggagcagattgcaagcaaacaccacgaaaaacggagtaaagtggatgtctatcccgagagacaacctggagaccgccacctacgagggaagccgcgtggagcgcagcacccgcgaggtggaggatcttgcccggggcgaatacaagtacggatggaccaccgacatcgaggcggacacctttccaaaaggcctgaatgaggatatcatccgggccatttcggcccgcaagaccgaaccggaatggatgctcgaatggcggctgaaggcgtaccgcaactggcagcggatggacgagcccacctgggcgaaggtccattacgagcagccggacttccaggacctgcgctactattcggcgcccaaaccgaagaagaccctcaacagcctggatgaggtggaccccaaactgctggaaacctttgagaagctgggcattccgctcgatgagcgcaagctgatggcgggggtggcggtggacgccgtgttcgacagtgtttcggtggccaccacgcacaaggacattcttgccaagcgcggcatcattttctgccccatttcagaggcgctgcgcgagcatcccgatctggtgaagaaatacatcggcagcgtggtgcccacgggcgacaacttttacgcggcgctcaattcggccgtgttcagcgacggctcctttgtgtacatccccaagggcgtgaagtgcccgatggacctgtccacctatttccgcatcaacgcatcggaaacgggccagtttgagcgcaccctcatcatcgcggacgaaggcgccgaggtgagctatctggaaggctgcaccgcgccgatgcgcgacgagaaccaactgcacgcagcggtggtggagctgatcgcgcacaaggacgcgaccatccgctacgccacggtgcagaactggtacgccggcgacgagcagggccggggcggaatcttcaattttgtgaccaagcggggcaaatgcgagggtgccaattcgcacatctcgtggacgcaggtggagaccggatcggccatcacgtggaagtacccgagctgtctgctcatgggcgacaactcggtgggcgaattctactcggtggcgctgacgcgcaacatgcagcaggcggacacgggcacgaagatgacccacctgggccgcaacacgcgcagcaccatcatatcgaagaccatatcggcgggccgcagcgacaacagctaccgcggcctggtgcgggtgatgccgaaggcggacaactgccgcaactacacccagtgcgacagcctgctgctgggcgaccagtgcagcgccaacacctttccctacatcgacgtgcgcaacacgtcgtcgcgggtggagcatgaggcgtccacctcgaaaatcagcgaggaccagttgttttactgccagtcgcgcggcatcggcccggaggacgccatttcgatggtggtaaacggcttctgcaaggaagtgttcgaccacctgccgatggagttcgcggtggaggcgtcgcgcctgctcagtgtcagccttgaagggagtgtcggataatgcttgaaatatgcgacctgcatgcgtccatcgcagggaaagagattctgaagggaatcaatctttccgtaaaggagggcgaagtacatgcgatcatgggaccgaacggctcgggaaaaagcacgctggcccaggtgctcgcggggcacgaggcctacgaggtggacctggaaaagagccgggtgacctttctcggccaggacctgctggacctgcccgccgaagagcgggcacggcttgggctcttcctggcgttccagtatcccgtggagattccgggcatatcgaacagctatttcctgcaggcctcactgaacgagattcgaaagagccgcggcctggaagagctggacgcgatggattttgacgggctgctgcaggaaaagatgaagatggtggaaattgacccgggcttcgcgagccgggccgtaaacgcgggcttctcgggcggcgagaaaaagcgcaatgagatcctgcagcttgcggtgttggagccccggctggccatattggacgaaaccgattcgggcctggacattgacgcgctgcgcgtggtgtcggagggcgtgaaccggcttcgctcgcccaaccgggccttcgtgctggtaacgcattaccagcgcctgctggactatattgtgcccgactttgtgcatgtgctttacaaggggcgcattgtaaaatcgggcggccgcgagttggcgctggagttggaagaaaagggctatgattggatcaagacggaggaagacgccggcgtgccggcctgagaggtatggcagtggcgacgactatcacagaagtaccggtctttgacctgacccgcgagcattttctgcgcgacatgagacggcttgctgaaaaagcagccccggcgtggcttgttaaagcccgcgccgaaggcgcggcaaattttgcggacaccgtctggccgcactccaaaatggaagaatggcgcgacacgaacatcggcgcgctggtggacaccgaatattattccatgacaacgttgccgcggcacacgctggcggcttttgacacttcgccgcaccgcattgagggctggatcaacctcgtgttcgtggacggtttttttgacgccgcgatttccgacacgtccgacctgcccaagggcgccgtggcgggcagcctggcagcggcgatcgcgggaccggcccaggatctggtgaagcggcatctgggaagctgcctgggcgcgcgcagcgcctacaccgcgctcaacacggcttttattcaggacgggccgttcctgtacgtcccgcagggcgtggaactggaccggccggtgcatttcctgtgcatcgccacggagcgccaggagaatgtggtgtcccactaccgggcgctgctcgtgctggaagcgatggcgaaggccaccgtggcggtgacgagcgtggcgatgggcgcgggcgaaaaccatttcgacaacgtggtcgaggaaattgtcctgggcgacggcgcggcgctgacgcactgcgcggtgattgacgccgggaccacgggacggcggctgtgcacgacggaaacgcggcagggccgcgacagcaggtttgactcatacagcatcacgctgggcggcgcgattgtgcgcaaccaaatgtgcgtgatgctcggcgaacccggcgcggagacgcatctgaacgggctgtatttgaatgccgcggcggcgctgatcgacaacaacctccacgtgacccatgcggcaacgaactgcaccagccgcatcgcctacaagggcgtgctcgacggcgccagccgctcggtgttcaccggccgcgtgctggtggtgcggggggcgcagaagaccgactctatgcagttgaacaacaacctgctgctgtccgacacggcgcgggtggagtcgcgcccccaactggaaatctatgccgacgacgtgaaatgcacccatgggtcaaccgtgggaccgccgccgccggagattgtgttctatttccgcagccgcggcgtggacgagaagaccgcgcgcggcatgctcacctacggcttcgccgaagaccttgccgggcgcattcccgatcccgcgctccgcaggcagttggacggcatcatctaccggcgcttcagccccggcatcaacggataagttcatggcagcatcggcactagagaagccccccgccccttacgacgtggagcgtgtgcgcggcgatttccccatcctgtcgcgcaccgtccgtaatggcaagaagctggtctatctggacaatgcggccacctcgcagaagccgcagtgcgtgatcgacgccatatcgcggtactacagccaggacaacgcaaacgtgcaccggggcgtgcattacctgagccagcgcgccaccgacctgtatgaggaggcccggcacaagattaacggcttcctgggcacggtggtgggctgtgaaacgatcttcacgcggggcgccaccgaggcgatcaacctggtggccaacggctttggcaagggcttcgtgaacgcgggcgacgaggtgctcatctcgcacatggagcatcattcgaacatcgtgccgtggcagatgctctgcgaggcccgcggggccacgctgcgcgtcattccgatcaatgacgacggcgaactcatcatggaggagtttgatcggctgctgaacggacgcaccaagatggtcgccgtaacgcacgtgtccaacgcgctcggcacggtgaaccccgtggcggaaatctgccgcaaggcccgcgaggccggcgcgaaggtgctgatcgacggcgcgcagagcgcgccccacatgcccatcgacatgaaggccatcggggccgacttcttcgtcgccgccgggcacaagatgtgcgggcccaccggcgtgggcgtgctctacggccgcgccgaactgctcgaccgcatgccgccctggcagggcggcggcgacatgattctgtccgtgactttcgagaagacggtgtacgcgcacattccggcgcgtttcgaagcgggcacaccgcccatcgccgaggtcatcggcctgggcgaggccgccgactatctcaccaagctcggcatggacaaggtggccgcgcacgagcacgatctgatggtctacggcaccgggcagttgaaacaggtgcccggcgtgactatcatcggcaacgcaaaggagaaggcgggcgccatatcgttcaccatggactgcgcccacccccacgacatcggccagctcctcgacgacgagggcgtggccatacgggccgggcaccattgcgcccagcccgtcatgcagcgctacgggctcgccgccacggcccgggcgtccttcggcctctacaacacgcgcgccgaaatcgacgcgctgatcgccggcctccacagggtcagggagatgttcgcctaatgtccgacgtgcgcgccatgtatgagcaggtcatcctcgaccacaacaagaatccgcggaactacggccggatggaagcgcccgaccgcatcgtcgacggcttcaaccccctctgcggcgacacgctcaaggtctacctgaaattcgacggcgacaccgtcgccgacgtgaaattcgaggggcatggctgtgccatttccaagtcctccgcatcgctcatgaccaccagcgtcaaaggcaaaacccgcgccgaggcacaggccctcttcgaggcctttcatgccatgctcaagtcagaccacaccgcccccgtcgacgaggccgccctgggcaaactgcgcgtcttcgccggcgtgcgcgaattccccgtccgggtaaaatgcgccaccctcccctggcacgccctcgcctccggcctcatccacgacctccccgaagagacggtcacgaccgagtaaaaaagccatgcggcaaaatgccgcctcccatcggcaaccccacacgcagacgcggcatcctgccgcatcttatgtactatcccaacgtagacgcggcatcctgccgcgttcttcctttaccctgggagcgccgttctcccgaacggctcccgcccctcgccagccaccgcgccaccggccccgaaggggtcgcacaacaatagccccgggcgaccctagggaacccggggtcaagaacccacaacaccccgcccctgaaaggggcgaacagcatcgcgcccctctttgccctttgcccttcagccttcgtccttgcatttccccccttccccttcacctctcctatctccatacataactatccccttgacatttctccattacccggctaagctatcggaatgccgccgcgcgcaaaccgcgcccgcgttgcggcaccgtcagggggtgcgcggcgggtgcagcaaaagaaaaagccccaaaccttgcggcaggggccaaaggggcggtgcaagcaccggaagccctacgtgatgactccttactgaaatcagtcaggaaccaccgctcagatatacttgcgttagtgtaaacgggtggacagcaaatgtcaaggggcgcaaacgcccaggagaaacaggggatgacacagcagtttgacaagaccattctggggatagatctcggcgccaattcaatcggttggtccctcgtcgggttcaagaacgacaggcccgctggcatagtcggcatgggtgtgcgcattttccaagcggggtctgacggtaatattgaggaaggacgggacgagtcccgcgccgttcaacggcgcgacgcgcgtcagcggcgccgccagaccaaacgccagtcctggcgcatgatgagtctggcccgcgcgctgcaaaagcacggtctgctgcccgaaggcgatgtgaagactggaaaagcacggcacgaccttctggaacaactggatcaggaccttcgcaacgcgtttatcgcgcagggtataccggccaacacctctgagggcttgcgcgagtttccctatttcctgcgagcccgcgcgctggaccatccccttgaaccctttgccttcggccgcgccctataccatctggcccaacgccgcggattcctgtccaacagaaaatccgacagggatgaaaaagagctgggcgtagtaaagcaaagcatttcggatctcgaacaggccatgaacgcctgcggcgtccgaaccttgggcgaattcttccaccgcctcgatccggtcattgagaagcgcatccggaaacgctggactgcgcgaagcatgtacgatgccgaattcgagaagatatgggccgcccaggcgcaacataacgccgcactgagtaatgccgacaccaagaagcatgtccatgatctcattttcaatcaacgccccctcaaaagccagaccggactggtcggtccctgcgaactggagccaaagaagaaacgggcgcccaaggccattttgcccgcacagcggtttcgcatcctgcaaaaggtgaatgacctccggctgtgcttagacgacggtacggcccgcgaactcaccccggaagagagaaagctgttggccgaccatatggacgcggtacgcgaagtgaccttccccggactgcgcaaattgctcggcattaagaagagtgaaaacgtcgagttcaaccttgaacgaggcggcgagaagaaactcaagggcaataccaccgccgcgccgctgcgcgacgtgtttggcgaccgatgggactccctctcccgcgacgagaagaacgccatcattggcgagctcatgggaatcgactcttccgaaactataaagcgccgtggccgtgaggtgtggggcttgtctgccgacaaggccgaggaactcgccaaggtccatcttgagccgggatacgccgccctgtcacgcgaagccctggcgaaaatgcttcctttcatggagcagggcgtgcccttcaagaccgccgaagaccaggtctacggccagtcggcctgggtgaaaaatacgtgcagcagattaatgcccgttgcagaggcaggcatagccgtgcgcaatccggtagtcatgcgctgtctgacggagttgcgcaaagtcgtcaatgccgtcctgcggaaatatgggaaacccggcgaaatacatatcgaactcgcccgggaactcaagaagtcccgcgaggaccgcatgcgcatctccaaggacaaccgcaagcggcaggattcgcgggagactggatacgagaggattcagaaggaaaccggcatccccaaccccaaacgggacgacattgaaaagtaccagcttgccgttgaatgcgcctggacctgtccctatacgggaaagggtattggtttcgaaaatctcttcggcgagcattcgcagtttgacgtggagcacattatccccttcagccgctgcctggacgattccttcatgaacaagacgctctgctatcacgaggaaaacaggcatgtgaagaggaataggacaccgtgggagtcctacgagcacagcgacaggtgggatgaaatcataggacgcgtacagaggttcaacggggatgccgcacggcaaaaactggagcgcttccagacccgcgacgtcagggactttgaagaggtgtcctccaccaagctcaacgacacgcgctatgcctccaagctggccgcacgctacctcggctggctctatgggccggaatatcgaagccgcatacaaaccaacaccggccagattacggcgtacctgcgcaatgcctggaggctcaaccgcatcctgggcgaaggagacaccaagacccgcgacgatcaccgccaccatgctgttgatgcgctggtcatagccctcaccacgcgctccgctgtcaagcagttgagtgacgcggcccaaaaacagcaccttttgaaggggcgcgcgcgcggtttcggcaagttggttgagcagccttgggattcgttcctggaagacacgcgcgcggctgtcgaatcgattctcgtgtcccaccgcgtggaccatcgtgtttcggggcggctccatgaggacaccttctacagcagaccccgcaccgatgagaacggaaagaactaccacgtggtgcgcaagcccctcggagacatgttctccgaggcggacatcgaccagatcgtcgatctcgccgtccgcgatgccgtccgtgagcacttcgaaggaaacggacgcaacgccaaaaaggcctttggcgacccagccaatcatcccgtcttgcggaatgacggcggcagcacacccattcatcgcgtgcgcattcgcaagtccattacggccttccccgtcggagaagacaaagatccgcggttcgtgacaaccgactcgaaccaccatatggaaatcatcgagaggaaagataggaaaggccgtatctcttgggatggagtcatggttgatcgctttgttgcagttcagcgcgttcgtctcgggcaacccgtagtagccacgaaccatggccccgatgcacggttagtgtgtaccctctcgcccggcgatctcttttgtatgagcgccggagattcaagagcctattatgtcgcgcgtaccatctccggggttaatatcgagtttgtgcgaatcaatgactcccgcaagaagaaggatataaaggacggagggcagtgggtaaagcgttccatagacgctcttcgcaatttgggtttcgagaagattgtcgtttcgcccttgggagaacctatcatcgcccatgactgaccgcatcctcgatttggcgtcggaccccgcccgtctttccgtcagcaatggactgttgctgatcgaacggaaggaaatgcccaatctgaccgtgccctttgaagagattgccgtgctgattggggcgcaccggcagttgacgttcacccaggccgtctttgcgaggcttgcagagatgggcggtgtatttgtcgcctgtgacacgaagagcctgcctgtggccatgatgctgcccattgaggggcaccatttgcaggcggagcgtttcgcggcgcagattgacagcgcggtgcccacgcgcaaacgcctgtggcaggccgtggtgcgggcaaagatatgcgcccaggcccaggcgctggaaacgctccacggaacggatcggggcctgcgcgccttggcggatcaggtgcgttcgggcgacacagcgaacatggaaggccaggcggcacggcgctattggacggcgctttttgccgatgaacccaagttcatccgcgaccgggacctgatggggcgcaacgcactgctcaattacggttatgccatgctgcgggccgtgacggcgcgcgcggtctgcggcgccggcctccatccgtcgctcggcatgcatcatcacaaccgctacaacgcgtatgcccttgccgatgacctgatggaaccgtttcgccccatgatcgaccaggccgtggcgcggcacaccgcgccgccgaaccagttcgctgaactcgacaaggacaccaaacggatacttttcggtgcgctgctcgaagtggtgctgttcgagggggagcgccgaagtctgttcgacacgctggcccgcattgccgcgtcggtggcgcaggtgtatcaggggcagcgccgcgaaatactgttgccggagttctgaacatgagcgagaccacactcgcactgtcggagtacaaaggcatgtggctcttcgtgctgtttgatttgcctgtcacctcggacgaggcaaaacgcaagtatgtgcagttccgcaacacgctgctgaaggacggcttctccatgttgcagttcagcgtgtacgcccgtttctgtcccagtgaagaggcgagcggtgttcatcgcaaacgggtgaagcaggcccttccccccaagggacaggtgcgcatccttggcgtcaccgacaaacagttcgccaagatggacagcttcgttggaaaaacgcccaagaatgtcgaggacgctccggagcaactccttcttttgtagcgcgccgcgcgcgctatcctggcccctgtcaaggggttacacaggaaatagtatatctgagcgggggttccggaccaactacagctggcgagcatcatcgcaaccttgtttctggagtatatctgagcgggggttccggaccaactacagcagtgtggacaacggtcaactatcgcggaacagtatatctgagcgggggttccggaccaactacagctttgtggcgcagattgtgcgtgaggggatcagtatatctgagcgggggttccggaccaactacagcgaataagtgcccacggtaacagctttgtagagtatatctgagcgggggttccggaccaactacagcgaatgttctaagggtagcgagaatccctcgagtatatctgagcgggggttccggaccaactacagctatagggcgttctagagctattagcagtaaagtatatctgagcgggggttccggaccaactacagcccaacatttgagcagttccgcggtaattaaagtatatctgagcgggggttccggaccaactacagccgacagcgtgcgcgagtcgcccaagcggttagtatatctgagcgggggttccggaccaactacagcaccagatgtttcccggaatttcaatcttttagtatatctgagcgggggttccggaccaactacagcccaccttagcagatcttcctttttcgtcttagtatatctgagcgggggttccggaccaactacagcagtccgaggacggcatgggcttcaacaagaagtatatctgagcgggggttccggaccaactacagcaccgaacaccggatatagttgccttgactgagtatatctgagcgggggttccggaccaactacagcgacccccgtacattcagggtgatgataggagtatatctgagcgggggttccggaccaactacagccttgggattaagtcgattgcccagtcaagagtatatctgagcgggggttccggaccaactacagccgaaacgaactgcacaaccatacttacgaaagtatatctgagcgggggttccggaccaactacagcataggaaccgggtacgtcaaggggaaacttagtatatctgagcgggggttccggaccaactacagcaaaacaatggacagttgataattgacaattgacactcggctctgtacgactgttcggaggatgggaatgaataactagggaacagtcttagggcaattgtatgctgacaacgctgatgcgcagttctccggtccagtcaggggggaatatgccttcggtgggcgggaggggcacggaaaagacggcggcctgggccgggtctaggtggggttgccagggggtgccatcgggatagttgaggacgcgtttttcggcggtgacgaggcctttttggtcgagaagggccacgcggacatcgaggacaataatggctttcttgccgcgatttaagacgcgggcgctggctacgtgaaggtcgggccgggcgtctattccgggaagccagccgacccagacgtcttcgacggatacgtatttctggaggtatttgctctcggggtcaacgtattttggtttgggggcggcgtatgcggcggggccgctgcagggggtcccggtgaggaccgcaatgccggtgatgaacaccggcaagaagaatttcaggcggcgcttcatatgttcacctctgttggataaaacagggtggatgttggggttcattccggggggaaagggaagaggaagagtgggggcgtttgcggaaattttttttcggggggaagggcaatcgcattaaaatgccgctgcgactaaaggcgggtgccgcgaagcggcgggggatgtggagccggaaccgggaccaacatccccctaaatcccccttcgaagggggacttaaaactgtatcttgcctacggcaacgtgggtttctccggggctggtgcagggggaagggagacaggaatgtctcccccatattgaaaacggcccggtttccatggatgggaaaccgggccggaatatgtatcgccgggacttgtcgtgtcagatgcggatgggcatgacgacgttgacgtagttgtcctggggggcgtcggtgtagggcttgatgatgccgggactggaggtgtctttgaggaggagacacaccttttcgccggatatgtagcggaggacgtcgaggatgaaggcggggttgaaggctatttcgacgggttcgccgtcgtaactggtggggatttcatcctcgaattcgccgacttcgggggtctttacctggactttcagggagccattgccggcaacaacgcgaacgctgcggaatttgtcgctggtgacggccagggagaggcgcatggaacggataaagtcggtggtggtaaggacaatttcgcggtcgtgttttttggggacaacggcgtcgtaattggggaaattgccctctatcagggcggaaacgatgcgcaggcggtcgaaagcgaaggccgcgtggctctcctccacccacacatcgacggtggaatcgccgtcggaggccaggagggtctccagttcgtggatcattttggcggggacaatgacgcggatgtcgtttgcatccacttcctcgtcggccacggccatgctcatgcggcggccgtcggtggccaccacggtcagcctgccgtcgcgcagctcaaagaggagtccggtgaggttgtagcgcgactggtcgctgcaaatggcaaaggaggtcttctggaagatgtttttgagcatggactgcttgaggaccatggcgccggtctcgggaaaagcctttacgggcgggaattcatcgggggcctggcagaagagcttggtgcagaccttgccgcagcgcagttcggccacgttgttttcgatcaactcgagcgtcacgtcggcgtcggcgggcagctcggccagaatcatggaaaggcgctggcactggaccgtcatggcgccgggacgctcgacggcgcagtctgtctccgattcaatgcttattttcaggtcggtggccgtcagcttgaccgacgactcgcctgtttccaggaggatatgggagagaatgggcagcgcgctcttggaagcgaccacgctcttgaccttgttgaccgccgccagcagatcttggcgggaaagggtgatcttcataagacatctccatcttttgaggttgtctaaaacttgtgcctgttttcaatagaacgatctatagataacccgtagtaccagtcataggcctgtggatacggttaagaaccgatctaaacatccttcaataaactggttacaactttaattccctggggataacggggaaacttatcccccgccgtccacaaaagtccggtggaccctttttcactgcgggataacttgggtgaatcggtggataactttgaggagttatccccgattgtgccgatttactccacaggcctccggttcaaattgttccacgacctttcacggaggttatccaccgcgtctttcttagtcaccattcaacttaggtgttttcactgaactgttttacagtgtccgtggaacaatgttatccaccgggtgcagtgtccatttgttcaactatctcgatatgtgcaaagtcttgtattaaaacaacttacgcattcatccgtcttagtgtgatcgatctgctaacactattctaacttgtcttggcacaacaacttgtgccagaagaactgattttacctctccacgctgctgcaccaccttcacgacttatcaacaagttatccacatgatattgggccgggttttaccccaacgcgtccccatgctagcaaaggatcgcgataaaagcaagaagaaacgcaccctctttccgtcttttttttggctgcaggacgggattggagagatatgctgtccggcggggctttagacgctgtttttcgcggatgaccgttggcgagacattatagatcctggtaggcattccactgggggtcattttcgaaaatccagcgatagtattccttctgttccagaaagtcgcctgccgcctcatcgaccaccacggtgcagtttgcgtgcagttggagggcggtggcggagatcatggaggtgacgggtccctcgacggccttggcaaggacgcgggccttgctcgagccggtgaccagcatgaggcactgatcggcttcgagaatggtgccgacgcccatggtgatggccaggcgcggcatgtcggcgggattttggaagagcggtgaattctgctcgaccgttttgggtgtaagggcttttacccttgtgcgtgagaacatggccgaaaggggctcgttgaacccgatgtgaccggaggcacccacgctgaggagctgcaaatcaatgccgcccacgtccttgatgagcgcgtcataggcagcgccggccacttcgggatcggctgccattccatcgggcaggtgtgtgttgcgcgggtcgatgttcaccttggagaaaaggtggtggttcatgtagtagcggtaggagttttcgtggtccggggacaggccgacgtattcgtcgaggttgaaagtgaccgtcagggagaaatcgagcccctcttcgcggtgcatccgcgccaggcgcgcataaagcgcctccatggtgcggcccgtggcgaggcccagcacgctgttgggcttgcgccgaagctgtgcggcgatcacgcgcgccgtgagttcgacggccttgtccttcgtctccagcaatatgacctgcatgatggtgcctccgttcctgggcctattatggcagaagcggacgggaaagggcacccgtgcgcgtttagcgcaacggcccccagacattgtgcaggatgccgaagaggatgattgcggcgagcagggcgattagcgctccattgcggattttaatcgccggaaggcgcatgattccgagcacgcggaaggcgtaggccgtgtaggcgtaaattgccgcgggtatgaacaggaggatggcgagaggattgagccgcagtgccgcgatgaaatggccgtgaagcagttcgtggagcgcccgctggccgccgcatccgggacagtaccaaccggttatccggtgaaaagggcaggtccagaatccgcgcgaggtggcggggtctaggaagtagaagatcaagactacggctatgagaatcacggtcaaaagggcaagtgaccggctttcgcgctgcgggccactgtgggaaatttcgtccggtccgattgttttgccgggatttgtctggttcataatggcatacactatactcaacgggcgggtgcgttgcgcagtgttcgcggtcccggtctttcattttttccgacgttcgaggtgccgggcgatttcttcggtcctgatgctttcgtaggcccgcgccagcttcgcgcaggaaaaccaatgcaggaataggccaagaccccagccaaagaaaggccagagaacccagaggtatccaggggttgtcaggagattcacgacgacgaggagaaggatgacgcacacgaacaccgtggtgtggatatacaaccccagcgtaattccagcgcggcgcgatgcccggatgtatatgtcttccttatcctgcggcgtgagttcatttttcgggatgaggtcctcggatgggtctactgcctgttcacgttcatgaatgtccatcatttgtctcccaacgaagtttcaggttgatcttcaaactgcgattgcagtctttcataacagttgccgcagaccaggcgttgcggaggtggcggcccatgggccaaccggacgtttgtgccgcgtgccaggacttggttgcagaccgcgcagcggccgttccgcatcaccatcacatcgctgaaagccgtggttgaccgcagaaactccggcgcgccttcgcctgtgggtgtttcggagaagcgctcctccaggtggcagcggaccaaatccgacacggacatgtcccgtgcggcggcctcggccttgattcgctccataatgtcgctttcaacccgcaggtgcagcacggcatccttcttgagtttccgttgcgcccatcgctgctctttcacatcccgttcgagttgtttggctgctttccggtcatcgtgcttcatttgtcaaccctcctctgcggtttgggccggggcattcaccggtatccctggcagggacaagggaacctgcgcacattcatgcggacctgtatttcgtctcgttgtggtcggcattgctgtctcaagcgcaagaaagcaatcaggcgaacaaccacatgtttgcgggtctttgccgccgggggaaatccatcgccccggacttgtataccattatgcacgattggtatacgtgtgtcaaccacaagattgagccgcgcatttgagctccaaatgaaacgggtgtctggtccacaaaggttgtctgtgggtcccttgaagcccaaccgacttcacgtggatgggagagtcttcgccgtcctgtcggctcagcggagcggctggccggggcgcagggtggaggcgagagggcagccttcgcagcgggggtgggtgcggcagtaatctttgccggtccacacgatcaggccgtggtattcgcggtaggtgtggaggtcgggggtgacgtgggtttcgaggagggcgcggagcggctcgtagccgatattgggctcgatcaacccgtgccgggagaggatgcgccgcgtgtaggcgtcgaccacgaagacgggcttgtcacaggcgtaaagcaggatatcgtcggcggtctcggggccaatgccatggagcgcgagcagttcttcgcgcagttctggcaggggccgggcggacatgcgcttgagcgagccgccatagtacgctgtgatatgttcgcagaagaggcggacccgttttgccttttggcggaaatagcccgaggggcggagcgctgtttcgagcgcctcatcggaggcggcgagcatggctttgggcgaaagcaggcgggccgccttgaggttgacgatggccttttccacattagtccaggcggtgttctgcgtgaggatggcgccgatggcgatctcgaagtccgtgtcgccgggccaccagtgggtgggtccgtagtgggcggacatgcgcccgtagaaatcgctcaggcgggctgccagccgctttgattgggcggggccgctcatgtgaaggtctttccctcgcgcaggagccggtcgagcaggaggatgccgatgacgctgaaggcgtcctgtatctcgcctgcggtgaccatgcggacggcctcttggaagggcacacagcgcagggccagcacttcggtgccttcgggctcggcttcgccctcgtggaggccggtggccacaaacagcctgcccctttcggaggagtggcagttgctcatgtgggtttcgccgccgatggctacccaatggtcggcagtcaggccggcctcttcgcgcagttcgcgcttgatggcggccagcggcgactcgccggggtcggtgccgccttcgatgatttcccaggagtattgctccatggtgtagcggtattgtccgacgaggtagagccgcatgtcgggcgtgagcgcgagcacgccggtggcgatgcgcgtttcgaccacgccataaatgccgggcgcgccgtcgggacggatgacctggtcctcgcgcaccgtgatccaggggttggtgtagacgatgcggctgtccagcgttttccagggatttgattcgggcatgggaaagactccttgagtgacatgatagcgcgtgttggcggagaagggaaaatggggggtgaggggcacggagaggcacggacggtcgcggatgacggatggagcgcagggcggttgccaccacgggtgcagcctccggcggggctttgcgttgtctatttgagagtgtagtgaatcaccgccgcggcgggtttgttggcgaggcttatgtcgaaaccggccgcgaggtctttgccggtgatgtcgcgcggcggggagctgtcccagtcggtgagggtgtaggttttttccgggtcgagaccgcgcggcgaaacgtggagatgatcctccgtgcagtcgtcgcggcggaaggccagcagcaggccctcattgcgcttgtcatcgtggtactgccacgccgcccagcggtctttgtcgaggctgcacggcatgagcggatagaagtcggcggtgaacaggtggcgtacggacttgacctgttcgaccattgcggcggctttctgccacatgtcggattcgtggtaccagtcaaagggcaggctgatgtggggacccatgccgccgcgcatgaggtaggggtcgggaaccaccgcgccgatgccgacatagggcatccatagggagagggctggcgtcatttgctggtcggcgatgggatcccagatatggtcgctgcgggtgagggtgagggcacggcgcatcatttcaaagtcgatgcggcgaccgccgctggcgcagttgtcgatgagcagcctgggatggtcgtgcatgagggtgtcgtagaaatcatagaggcccatgatgtggcggatttcgttcatgccctggcggttttcgggctcgccgttttgccagtaccagagcggcgagaggttggcgtcctgtcggtagatgtcgatgccggcctcgccgatgatgcgcgagtattcggccttgacccaggccagggcttccggattgcccaggttgagcatgtggaacttgtcgttttcctggtagcgccagggcatgggcgtatttgcgggcttgaggagccactcggg

SEQ ID NO: 4472 - DNA, 14634 bp, synthetic construct
  source 1..14634: mol_type = other DNA
  misc_feature 1..14634: note = Synthetic
ccggcttgagggcgtccgccacttcggggtcgcacgcgtaccccgccgcaatgcacagccatttccccacctccgtctcgccccggctgcgggcctcctgaatggccgcgcggagcggtgcccaagaggtgtcccccatctgcccaaacgcaagcagatgcccgttgagtgtgtagacgcgcggtgaaacatacgaccccataaccttcggatactccccggtgtaccggatatccctgataaaccgggccagaatcgggtcgaaccgcgtccgcacatcgtttttcgcgcacaagcccaacagtcggatgatcatgcccccgccggggtgcgtttccggccggttcacggcatccaccagcacccccagttcctcatcggtcaggggaaaggtgagcggccccgacaggtctgcccggtggagaagttgaaacagggccgtggtggacacgggcgcctggtcagtgcatacaagccgcaccagggcgcggtccgacgcctccccgggaatctcgcccaaaaggaaagccagcccccgccggaatgccggaccctccgggttcgcaagccgctcctgaatggcgggcaacgcgtccggccccaaggaaagcaacttcttacggcattcctcagaccgggcacgggcatcccccgcatcctcctttccctccacctgtgggtggagttcctcaagttcccgaacaagtagcgccgcctccggggaaacggcctccgctgcgccgcccacagaaaagaacaatgcaagtaacgccgcgcaagcaagcaacggaaacagctgacctattgaaggaatcggtaccatgagacattcatctcctacctgcggcccaccgtgtccagcacttcttcaaagttctcgttgttgaccgccccctcccccagttcttcgcgaaggacgcgcatcagcgtgtcgcgggctgtgttccggattatgaaccgtgtcggcgggaagtccgcgtggtactccgtctccgtggtgtcctccagcagcggccggagcacggccaccgcatccacgcccgccgtccagccataggcgggtatcgcctggcagcggacataacggtccggatcatgcagcaccacctcccgcagggcgtcggcaaccgccctgtccctgcaaaatccccgggccatggcaacccatttcgccgcctccaagtcccccgcacgttccgcggccgtgtgggcctctctcagtacgggcacagccctttcgggcatgtgtctgaacgccaggagaaacttgttcaacatgtatacgcggggagaagtataagagccgccgaccggcggctggtcgtccggggctttcacctccagcaggaaccgtttgagcattgcccgcacgacgggctccagatcgtttccgtggcagcatgccagaatgcgcatggggtcgcccacccccatcacggggcggtcccgaaccatggccagcagcgcctccatctgatcctcaggcacgcggaaggcaaaagggccgaaccgttccgtccgcatcacaagctggtcgcccgcggccagccccaccgttgaatcgccgcagcacagccgaagcaggaaacggtccacctcctcgcccggtatcatgcccagcgcggcaaccagcacctgccgcgtttgcgcatccttctccccgtcaatacgcgcggtgattgcgggcaccgcctcggcaccgcacctccccaattgttcccggagcgccagcacccggttccacgaggcctcccggtcgccggattgcgcggattcatccatgagcgcgtgaatggcatccatgacggcttccgctgaggggggaggagtcgccgatggaggggagggcgcctccgcgcgggcccgcaacggcaccagcaggcagcccgccgcgcagaaaacccacaataggaacacgcccattttccccgcccgcttgtgcatgatcacgtcttcctttccccactgggaggccggatcttcttgccgccggtttccaatctagcacaagccctctgttttgtcaaagggggcgagacgagaaagggcgcgccggccggctgcatgtgttcccgcgaccgcgctggtgacacgcgccggaatgccaggctggagcctggcgctcccagggggcgcgagggggaggtcatcccggaagcgacacgtcccagcaactccacggcttcggcgtgtcccttaccccgaaaggacagatacccgccggtcagcgcaccctgcccccctcagcgcacggatagccgccggtcagcgcaccctggaatcgccaggcttccccctggcacgggtactctccacggccaagaagaaacgcgttgacccaagaacacgcctggagaggaaagacaaggacgccgggacggcggcgccacgggcgctgaccccaagaacacgccgagaaggcggcatgtccaccctacgggaacgcggcctcctcgtcgcggtcgtcgaggaagtagttgtagggacgggcctcctggctttggagggcctcggcgacgtcgtaggggctgagggcggacagcagccggtcgtgcatggtgttgtcggagaccatgcgggcgaggctggacatgacctcgaggtggcggtcggccatgccgggcggcgtgacgaggagcacgagcacgcggacgggctctccgccgtcgtcgaaggggacgccgttgcggctgacggcgaggacgccggagacgcggcggccgcgcttgagggtgccgtggggcacggcgacgccgcggccgatgttggtggaggattcggcctcgcgccgcaggacgctttcctccagcgcggcgcggtcggcggcggacagatggtgcgtgaaggcgtagcgctcaacgaggctgcggagggccccgtcgcgggtgtcggcctcgaagggcacggcgatgtgctcctcctggaggaagtccatgatgcggcggcggtcgcggccggcctcgccggagcggcggatcgcatgccaggtgaacagggggccgagaagctcgttgaccgtgatggcgccgaggagcatggtgccgatgacggagacggtgtgggcggggatgttggggttggcctcaaggaggacgacgaggccgatggcgatgccggtctggggggcgagggcgaggccgatctggtggttcatgcgcgcgggcatgcgggccacccagccgccggcgagggcgccaaggtatttgcccgcgaagcgggccaccaggaaaaccacgcagaggatgccggcctcggcgacggcgtcgaggtggagcgaggcgccggcggcggtgaagaagccgacgtagagcaggggctccaggggctcgagggcttcggcgtggcgggagccgctttcggaggcgttggtgaggaagacgccgtagaacatgcaggacaggaggaagttgacgccgaggaaatcggagatgcccacggtgaacaggaccatgaccagaacgaggctgaagcggtggaaccgcgcgcggtggatgaggtagcccgtggcgcggcccatgaccaggcccagggcgagggagagcagcacctgcgccccggcgcgcaggacaatccacagcggtccgaggcggtgcccctcgccggtgtaggcgtagtccatgaggcggtaggccagggcgaacacgagcatgcacaggaggatgtccacggcgacgacggaaagaagggtcttgacgaagagccccctggcgcgcatctcgcggacgagggtgatggtggtggcgggcgaggtggccacggagatggcgccgagcacgagggccgtgggccagtccacgccgacccaccgcgcggcgagggtcaccagcgccatgcaggcggcggactcgcccagcgccacggcgcccacgcggcccagggcgttgtggagccgccggtagcacaggtggctgcccgcggacacggccagcaccccgagggcgacctccgtgacgggcttgaggctcgcggcgatgttcacctcgccgaagaggttgagcgccgccgggccgatgagcagccccgcggccatgtagccgagttcctggggcaggcggaccaggcgcgccagccagccgcccagcatgccggcgatgagcaccgccgacaggaagaacagggcgttctgttcgccttcaaaaaccatgcgtctttccgcgcgggccgggccgcgcgccgggggcgtcagccgcggtccggcgccaggtacgaggtcgcgatgagcgactggtagtcgtccacctgcccgtggtccaggcagcactcgatgatggtgcggccgagggggtgcaggtcgtcgtgcaggaactcgcgcaggtgcttgtgaaagaactccgtgagaacctccgcgccctcgtcgtaggcctcgtcgcccacctcgggctgcgtgttcacctggagcagccaccggggcagggcgttgccctccaccgtcaggtggtgcagggcgtggcccagcagggcgcagcgcgccgggcgtatctggtcgggtctgaacttggccacgccgcggcgggccaggtactcgcgggtgatccactggggcatgaaccccatctcccacgcgcccacgtgctggttcggcgtgaggatgtgcaccaccttgggcgtggcgacgatctggttcagcagcaggttcgcgtggtccaccctgcgccccgtggcgaagggccagtaggagcccacgccctcgctggtcatgccctcggtgtccgtgatgctggggttggcgaagccgcgcggcgccacgagccgccacagccacgacagcgccgggggcagcaggtggaagaggccgatgatgccgtaggtggggcgctcggcggtgcaggggggcgtgcgcacgcccaggctccgcacgtccacggccaccggggtgtccatgatgccgggaaagctgcgccgcggcacgatgacgcgcgggttggggcagggctttccggggctgtcctcgatgtgctcccagatcagggcgcggctccggggcaccgcgtccacgttgaggaacagcagcggctccggcggctccgctgtcaggcgctcgaaatgcgggtccgtggcgtagtgggtgatgtggttcacccggacgaaccacgcgttctccgcgtcggccaccgtcagcttgccgtcgccgcgctggagcgaggggtggcacagggccatgtcgtccgtgacggggcgcagctcgcagccccggggaatctcaatgaagcggcgctcgcccgtgacggtgttcgtccccagcggcaggcggccgtcggcctcgcggtgggcgacctcgagcatctccgacttgccgccgccgctggcgccctcgtgcatgatggtcagggtgttgtcgtagggcgtgaccacctgcacggtggagcagtgggccgtgacccagccctcgcgctcgccgagggcgagcaggccgccgtagacgcccttcttcgcgctggggccggggtacaggttgtaggcgtatatctcgtggaggtcgccggagcgcttgtgcaccaccacctggcggccgtcgaaatgggtgtggcggaacggcggcgcgacatagatgaccagcttcggggagaagcgcttgggcagcgcgtccagcggcaggatgccctggagcagcgccaggccgaaggcgaagaatcccgcgttggccggggcgatcaccagggcgtccgcccccatcttgcgctggccggccacgaacccgaacacggccagctcgcgccccttgagccagtccagggtggcggcgcgcagctcctcaaaatccttcccgaagtgctcccggtaggtcggcttgtccgacggctcgtcgtccccgatgaacatgcagtccgggtcgcgccggcgcatgtaggcgtcggggtagttcgcgcagaccccgttgcgcacgcgggcgacccgggcctccacgacatagccctgtccgggcacgtcatacccgacctcgaaggcgtcgctgccggggccgccgcaggccaggtctatgagttcgccgctgtgctgggcgacgatcacgttcgggctcgcctccaggacggcccgggcatcggcgggcgggttcagtttctgccacatggtacagctgctcctgttcgtgcatcgcttcatttggagaaagaacccgctcccgccctggaatcttccccgttcccgggggactccggccctccgggggggcagtgggttcctgttggagcgttagtatatgccaagcacccccctgggttcccggcgcacgcggtgtccggagcggtcaggggtcgaacttcgggcggaagccgtcctcggcgtaggggtcgcggtagtacccccgggcgttgtagaactggaccacccggagcagctccgagaggctgacggtccagtctgcgggcgcgtagtccgcgtcgtggaaggcgcactccgtgccgccgcccgggcccggctggaacccgtcctcggtgcccgaggcgcaggagaggccgccggagttgtagaactgcacgatgcgcagcagctcgcccacggcgacaaggccgtcctggttggtgtccgccgtgtggggctcggcatactccgggtccagggcgccgcaggagggcttcccggcgaggttggagggctcgaagcccgccgggacgccgcccccgcgggagaggcccgccacggcgtccgcggcgaagaggttgagccaggtgatgcggatcacgccgtcaaacatcatttcgacctggaaactgtgggagttttccggcgggtacagcagggaggagtcgtaggcgggcacgtcctcccaggtgacggccacgcggtccgccagctgcgcccagctcacgcggccgcgtttcagcgggttgaggtcggccaggaagggcgagatccgggaaaacgtgaaatgtgcggacaggctggctttccaggaaaagtccccgttcccgaaagtgatatacccgttgctcccgatgaagaagcaggtgtggctcgtcccgaagaagggaaccgccgcgccgcccgcgaggtcaacctgcacaaaagcgtcatcggcgagcgcgaccgccgtcgcggacgagggatccgtgccgaaatgggccgcgggttccaggcacgccttgtagccgtccgggttgtcgtcggggaacagcgtgagcatgcgcccggcgaggtccacggcgttcgccgagtcaaacacctccgtcagatagtcggggatgaacagggtggtgaaggtgtggcacgcgccgccgttgtcggaggtgccggtgttgcccgcgatgtccgtggcggacagggcgaagaagtattccgtctccggggtcaggaaattgagcgtgatctcgtgggccgtgccctgggggccggattccgcgccggcaagatccgcgcacgaggtgccatacagaaccaggggcgtggcggccttgtccgtggtgaagcggatcgtcgcctgggtgccgccgatatacggcacgctgatgccggaaatgaccgggggcaggcagtccaccgccgcgcccgccgtcacctccacgtccacgttgcccgccccgtcatccgcgtccacatacagggcctcgagcagctcgccgtgcgccgcctgcagcgtgccgtcgcccggcaccggggcgccgggggccagcgggagggttcccgaaaactcgccgcccgcgccggggatctcctccagcgcgacagtctccaagtcccccccggtcgcggccagcgaaaccgccaccaggcccatgcccgccaggtcgccgtcttcaagattcaccgacaccgtgtcctcgcagccgaaatacgggcgggaaaaggagacgctgcccgcagaactgaccagcgcggggatcgccgcggcggcgacggcgatctttgtgcagtcctcgccgcgcccgccggtgtcggtgaggatgttgctgtaaaagcagccatccgccgtgttgaacaggaaatccgtggcgccccggaccagaataccctccagcacccccgtgtcctggttgagcaccggcgagccggaattgccgccataggtgtccaggttggccacgaagaaagtgggctggagggagcgcaccgccgtggccgggccgaaggcgatcttcatgggcaggcccgccgggtggccgatgacgcccacccgctcacccacggtgatttcgccgcttcggcggatgccgaaggaccgcgcccccggcgcggtgaccgcgcggtccacacggacgatctggtggtcgttgttccccgacgccgcgtgggacacctgctccacaaagcggtagacccggtcggcatcgaaggcgagccggggcgtcgccgcgtccagcatctcccacccgaagacaaagcaggtctccgtgctcatgccgcagtggcccgccgtggcgatgaggtcgggccccacgagaaaaccggtgcagaaggctgccgtcggctggtcgccgaaaggctcctccgggcaggcggggtagccgccgcgaatgtaggccgaaggggtgaggacataactgccgtccggctggaccgaaagtttgttgctgtagatgagcgcgcaggtggacgccgcccaggtccggatcagcgggtcactctcctggtagacgtccatccggtcgtccgtgccgtagacgaccttcggctgcggccggggcggcgagggcgcccacggcacatcgctgatttccgtgtcggtcggcttctccccggggagttcctgcgctccggccgcagacagaaacaggacggccgccagcaccatcgccgcaagacgccaaggcgcggccgaaacgccgccctgatagtggattccgcgcaacattgcttctgtcaactccttgcggccgcccgggccgttcctccccctcccaaaaagtctaccatatcgcggcggtcacgccagcgactcgatgttcttcctcttgaggcgcacgctgagcgtgcggatgatgttcagcaggatctggatggccacccgcttcgacagcaggttctggaacgtgctctccgtcagcacgaacagcacgctgtccgcctccgccttcaccgtggccgagcgcggctcccggttcaccagcgccatttccccgaacatttccccgggggccagaacggcgatgcggtcctccccgttgtagacccccattttccccaccagcaccacgtacatctggctgcccgtcgtgcccttgaaaaagatcacctcgtccttcagcgcccggacggtcatccccttggagaagatctttcccacatcgtcccggtccagcccgtggaacaaatccacccgtttcaccagcaaatccagtttttcaggttcaagactcatcacgcggtcctcccgggccgtcggtcggcccgcttttcacattagtataacattcccccggtcggagggcgtgcccgaattcccgaaatccggctcgcgcccccctgggaccgcctggctccagcctggcaccgcgcgccccatgcgcgcgtccttatagcccccctctctcccccggacctttgcacttaccgcatgaactcacgggccttccttggccagcgggcggtttgacgcgggccgccggcatggtgtatactccgctctccctaaggaacctttttcgagaggagtattccccatgaaagtgctgagttcgctgaaatgcgccaagacgcgccaccccggatgcaaagtcgtgcgccgcaagggccgcgtctacgtcatcaacaaactggccccccgcttcaaggcgcgccagggctgacgcccgtccaaagcgccaatcacgtctatttcaccgccgcggccttccccaaggccgcggcggtcttgtgctttcccggcaacggcgggccgacaaaaaaatgcccccaaacctttcggcagggggcgataggggcggctcaacgccggagccctccgtggtgaaacccttactatgattagcagagaatcaccgctcaggtatactatgttgtatactatacagcacttgtctttcgttgtcaagggaaacagcagttcaaaaaggagggcgcaggcatgggcggtgtcacagagaagaccgttcttgggctggacttgggggccaattcggtggggtgggcgctggtggggtatgaggatggggaaccggcgcagatcgtggacatgggggtccgcatctttgaggcgggcacggacggcgacatcgccagcgggcgcgacgagtcgcgggcggtggagcggcgcggggcgcgcatgcggcggcggcagaccaagcgccagtccacacgcatgacggagctggcccgcacccttcagcggttcgggctcctcccgccgggagagctgcgaaagggcgccgaccgccacgccttctttctggacctggacaaccgcctgcgcgccgccttcgccgcgcaggggtttgccgtggaccagagcgacgggctccgcgagttcccctattttctccgggcgcgcgcgctcgacgcgcccctggagccgcacgccctggggcgcgccctgtatcacctcgccatccggcgcggcttccagagcaaccgcaagagcgacaaggaggagaaggagctgggcatcgtcaaagcatccatctcccatctggagcagtccatgcgcgacaccggcgcgcgcacgctgggcgaatactttcaccagattgacccgtcgctggagcgcatccgcaaacgctggacggcgcggaccatgtacgaggacgagtttaagcagattctcgacgcgcaggcgcggatggacgccctgaccctgtcccccgaggacctcaagacccttgagtaccgcatcttctaccagcgccccctcaagagccagaaggggctggtgggccgatgcgaacttgaatccaacaaacgccgcgcgccggtggccctgttttcggcgcagcgcttccgcatcctgcaaaaggtgaacgacctgcgcctgcactatctcgacggcaccgaacgcggcctgacggaggaggagaaaaagacgctggcggcgttcatggatgtccatgacgaagtgtccttccccggtatgcgcaaggccctcaaactgcccaagaacgtggacttcaatctggagcgcggcggggaaaagaagctcaagggcaacgtgaccaatgcccggctgctcaaggtcttcggcgaccgctggaacaccctgggcgatgcggagaagcaggcgattgtcggcgagattcttggcattgaggacttcatgacgctggcccgccgcgggctggcgtgggggttgggcgcggccgaggtcgaggcctttgccaagatccacctggagcagggctacagcgccctgtcccgtgaggcgctcaagaaactgctccccctcatggaggagggcgttcccttcaagacggcggaggaccgcgtctacggcaaccgcctgctcgggaaagaggcccggtccaagctcgaccccgtggtggtcgcccttccctccatccgcaaccccgtggtcatgcgcaccctcaccgaaatgcgcaaggtggtcaacgccatcatcgccaagcacggcaagcccgacgagattcacctggagctggcccgtgacctcaagaagacccgcgaggcgcgcgcccgccattcccgggacatccggggccgcgagcagacccgaaccgacgcccgggaaagcatccagacaaagctcggccagcaaaaaatctcccggcaggacatcgagaaggttctcctcgccgaagagtgcggctgggtctgcccctacacgggccactccatcaacatgtccaacctgctcggcgagcacccccagttcgacatcgagcacatcatccccttctcccggtgcctcgacgactcgttcatgaacaagaccctttgctaccacgaggaaaaccgcctgcgcaagggaaacagcaccccatgggaggcctacggcggcgatgaaaagcgctgggaggagatcatcgcgcgcgttgagcggttcagcggcgacgccagacgccgcaaactggagcgcttccagtcgcgggacatcgaggactacgaggggttcgccgcccagcagcttaacgacacccgctacgcctccaagctcgccgcccgctatgccggcatgctctacgggcaggacgccctgaaacaggtccagaccaattccggccagatcaccgccctcctgcgcgacgccctccacatcaacggactcctcggcggcggtgacaagaaaacccgcgacgaccaccgccaccacgccgtggacgccctcgtcatcgccctcaccaaccgcgccgccgtcaagcggctcagcgacgccgccaagcggcagaagctggagaagggacgcatacagggcttcctcaagaacgccctgcttccctgggacacgttccccgcggacgcccagtccgccgtggacagcatcatcatctcccaccgcgtcaaccacaaggtgcagggacgcctccacgaggacaccttctacagcgccccccgcaaggacgagaacggcaggctctaccatgtcgtccgcaagcccctcgacggcaacttcaagccctccgacgtgcagggcatcgaggaccccgccgtccgcgaggccgtccgcgcccacctcgccgcccacggcaacgaccccaagaaggccttcgccgaccccgccaacgccccccgcctccccggcgccaacgggcccgtccccatccaccgcgcgcgcatccgccgcgcctgcaccaccttccagatcggcggcaacgactacgcccgcttcgtcaccgccgactccaaccaccacatggaaatcgtcgaggagacccgcaacggcaagacccgatggaccggcgtcatggtggaccgcctccaggccgtctcccgaaagaagcgcggcgaggatgttgtccagaaggaccacggggaaggaaagaaactggtgtgcacaatcacgtcgggggacaccttcttcctaagcagcgataaccgctattacattgcacgaacaatatgggggcaaaacgtggagttcgtcagcgtatttgaggcaaggaagaaggccgacataaaggcatctccaggaaactggaatgtgcggtcggtcaacgtgcttcgcgacctcggcttcgtgaaagtgaccgtgtcccccataggcgaggccacaccgtgccatgactgaccggatcatagacctgtcgcgcgacccggcgcggctgtccgtccgcacgggcctgctggtgattgagcgcagggagcagccggagatcacggtgcccttcgacgacgtggcggtgctcatcggcacacaccggcagctcagtttcacgcagacggtcttttcggagctcatggaggcgggcggggtcttcgtggcctgcgaccatcggggcatgcccgccgggctcatgctgcccatggagggcaaccatgtgcaggccgagcacttcgccgcccaggccgccgcccccctccccacgcgcaagcgcctctggcagggcgtcgtgcgcgccaaggtcaccggccaggcccgcgccctgcgcgccctccacggcgacgacttcggcctcatgaccctcgcgcggcaggtcggctccggcgacccgcgcaatgtggagggccaggccgcccgccgctactggaccaaactcttcgccgacgagccgagattcgtccgcgaccgcgacaagcccggacgcaacaccctgctcaactacggctacgccgtcctgcgcggcatcgccgcgcgcgccgtctgcggcgccggactccacccctcctttggcatccaccaccacaaccgctacgacgcctttctcctcgccgacgacctcatggagcccttccgccccctggtggacctcgccgtggtcgccctcaccgcgccgcccctccaccagcgggaactcgaccccgaaaccaagcgcgccctcatcgccgccctcctggaacccgtggagtttcagggggagcagcgctccctcttcgacgccctcgcccgcatggccgcctccatcgcaaaagtctacctcggcctgcgcaaaggaatggacctgcccgaatggtcatgaacaccgccaacccccgggaaggctggcctttcttgggtccccccttcaggggggtggacgcgtctccgcggacgggggatgttcttaagtctttcttggatgccccgcacgaaccaaccatgaaggaacaaccgcgtggccgagtcgagactggccctgtcggagtacaaaggcgtgtggctcttcgtcctctttgatctccccgtgctcacgccggaggacaagcggaactacgtccacttccgcaaccacctcctccgcgacggcttcaacatgctccagttcagcgtctatgcccgctactgccccagcgaggacgccagcgacgtccaccgaaagcgcgcacgaaccgccatccccccagggggacaagtccgcatcgtcggaatcaccgacaaacagttcgccaaaatggagaactacctcggcagaaaacgcgcccgaaccgaggaaccgcccgaccagctcctccttttgtagcgaccgatttcgccctaaccccgccgctaacagcggcttctatcagagatagtatacctgagcggggattctcggccaaccacagcaatccccggcattccgtcaagggccagcatagtatacctgagcggggattctcggccaaccacagcca

SEQ ID NO: 4473 - DNA, 14532 bp, synthetic construct
  source 1..14532: mol_type = other DNA
  misc_feature 1..14532: note = Synthetic
cggcgcaacaggccccggcaatgacgaagatcacgattccgtttcgcatggattcatcctcccgcgcccgcgcgcggcgtcacccgttcaacccaggacaaagccctctccggcggcctgcaccgcggagagggctgaacgtgccggaaaccccgaatcaccgcgggactatttgatgatcacttccttgccggcggccgcggaacgatacaccccgtccagcatcttctgcacggccaggcccgcctcgcccggcgcttccaggggcgtgttcttcgtgcagccgtccacccagttccgcagcttgagcgagaagaggtggtcaaacgacgtgtccgtgccgacgaagtagggcgaagcgttcatcatcgtgtcgtggtgatccgcgaagatcatcggcggatcccactgcccgccgcccttcgtgcccatgaaactgaagttccagatgtccttctcgatgtgggccacgaagctcgcctcgatctgaaggagggcgccgttctcaaagcgaatctgcccgatcgcgagatcttccactgtataagtcttgtgatcccagttcggccacgggctcacagttttcgacgctttgttgccaagataagtccacgtgttgcccgaggcggccaccggcttcggcgaacccatgaagtagtgggccatctcgatgatgtgcaccccgatgtcgatcatcggcccgccgccctggagtttcttttggccgaatacgccccagttggggatgccccggcgccgcagggcctggcacttcatgaacatgatgtcgccgaattcgccgttgtcgcgcgcccgccggaggaactgcgaattggggtgatagcggtactggaagccgaccgtgagtttctttttcgccttcctggcggcggcgatcatcttctcgcactcggcgggattcattgccatcggcttctcgcagaggacgtggcaacccgcgttggccgcgtcgatcgtgggcgccgcatgcacgccgttcggcgtgcagacgagcacgccttccggctgcacttccttcagcatcttcttccagtccttgtacagccgcgagacgccccagcgctcctcgaaggtcttcaggcgctcgggaaggatatccaccccggcgacgacttccacgtccggcatctgccgcaacgcggccatatgggtctggcagatcccgccgcagccgataaaggccacccggaacttcttgcccttgtattccttcgccacagtcatcgccaatgaatccgtgctcacgcccttgtctgccatgctgctcaatccttcgttgtttgccgtccgcccggcgcgcggcccgcgcatcgcctgcggagtatcatccttccacccgtcacccgaccagtgaaatcgcagcgcataatctagcgggtttcgcaggggctttgccacttctcgcgcgagtgcctgccgggggaggcgtctttccagacagttcagatagagatttccatgacattgttctcgaattggtgttactatgcagacggaacacacaaaaggagtgaatgcatgcgaattcgggtgctgccgtcgtttgtgttggccgcggttgtgctggctgcggcgtccggggccgcacatgcccagccgcgcaccctgacgattgcgtatggcggcacggcatccggctcgaccacgcccgccgcgggagtgcacctgtacccggatggatacaacgtgatcgtgacggcgaatacggaggagggcagtttcttcggcggatgggagggagacgcatacggttcagagctgaatctggaactgaacatgaatgcgaacaaatccatcaccgcgctgttctatccggaaggccatcgcctgacagttcactcgacagggttgggcaacacgaatcccttgtccggctcgacctactatctggcggagggcgtttatggagtcgtgcatacttatgccacggatccgacctggcgcttcgatcactgggaaggcgactacggcgacatgaatccggcctacgccaccctgatcgttcccatggatcaggaccgcgatgtcaccgcggtgttcatcgagaagcccctgtacacgctgaccatggcgcttgagggcaatggcgcgacgacgcccgccccgggggtctatcaatatcgagaatacgatttcctgtcggtttcggcggttcccgacgcgggatggcgattctcgcattgggaaggcgattacggcgacaacctgcccacctcgccgcaactgtccctctcgatgagccagaatcgcgcgctcacggcgcatttcgtggaacggccggagcggaccctgacgataaacaccgtcgggaacggaacgacggatcctgcggccggtgtgcacacttatcttgatttggaggtggttgtgctgacggccaccccggacctcggttggcgtttcgatcactgggaaggcgatatcgttacgcttcaccccgagaacccgtcgctcagcctcaccctggatgccgacaagaccgtgacggcggtctttgcggaatacgaccatgtgctgaccgtggaagcgacgggcgacggaaccaccacgcccgccccgggagcgtacgggcaggccgagggcgcctccgtctggatctacgcctggcccgggccgggacaggcttttgaccactgggaaggcgacatcggcgccgcgaatcccctcgaaccttccctcaacgtcgtgatgacctcggaccggctcgttcgcgccgttttcgcgcccggcgactggagtttgacgctgcagcatgttggcttgggcacgggacggaccgctccgtacgatccgggggtgtattggttcctcgacggacgctccgtgcacctggacgccttgccggatgcgggcagtttcttcggcgggtgggaggacgatgttgcagactatctcccgtcgatagacttcgtcatcaactccgacatgctcgtcagcacccgctttgaatcagcggggttcgcgctgactctcagcgtctcggggcagggcggcaccgaacccaccgcagggactttcccctatgccagcggcatcaccctgaacctctccgcccgggatctgtatcccggctgggccttcgaccactggaccggcgacatcggcgccgccgaccccgcgagccgcgatatcgcggtcctgatggatcggaatcgcgcggttcaggccgtctttgtcgaacgccccgtgcgcaccctgacgctcggagtcaccgggaacggcagcaccaacctgcccccgggcacctacgaatacaccgacgggcaattggtgttcctgtcggccaccgccgatgccggttcccaattcgaccactgggaaggcgatgtcggcaccggcgaccccaacctgccttcgctgcaagtgacgatggatcaagaccgcgcgatcacggcggtcttccgtctggaaggctaccacaccctcaccctggccatcgtgggctcgggaacggccaatctggccgaaggcccccacgattacctcgaaggaacctgggtgacgctccaggccacggccagcaccggctgggtctttgaccgctgggagggcgacctgggcggggccagcccgaacacgatcgtaatctcggtgcagatggaccaggaccgaagcatcaccctgtatttccgcaccatctcgatgtacacgctgaccctgagcgtcgtcggcaacggggtgacgcaaccggccgcgggaccgcattcgtatcccgtgggccgcgtgatgaccgtgttggctttgccgcgcccggggtggagcttcgaccactgggaaggcgattttgccgcggcggatccctcgagcgccagcatcgtgatcacgatggatcaggaccggctgctcacggcgtacttcaccgagattgtcgtgccgcaacatgcggccgacacgaaccgggacgacgccattgatctgtccgaactcctgcgcgtgatccagttcttcaattcaaatgggctccattgcgcggcgggaaccgaggatggatatgacccggggcccggcgatgcaacctgcacgccgcacagcagcgactacaatccgcaggactggcacatagacctctccgaattgctgcgcgtgatccaattcttcaacagcgccggctatcatgtctgcgccgaaggcgaggacgggttctgtccggggcccgcgtaggcggttcgcatcgttaccggcggccgcacaagagcggcgcgcgtgtgctatactctgcccatccatttccagaggaagagtacaggtcattatgagacagcttggcgacatcaatgtagcctcttatacgcccctggtcaccccgcgcgagctgaaagcgagattgctcatcaccgccgcgggcgaggaaaccgtggcccacggccgccaggtggtcaaggacattcttgaaaagcgggagcgccgcctgctcgtgatcgtgggcccctgctcgatccatgatgtgtcagccgcggaagactacgcgcggcgcctgcaagccctgagccgcgaactcgaggaccgcctcttcatcctgatgcgaacctacttcgagaagccgcgcaccaccgtgggctggaaagggctgttgagcgacccgtatctcgacggcagcaacgacgtgagcgcgggacttcacaaggcgcgcgaactcctgctcgggctcgccgacctcggcctgccggccgccacggaattgctcgatcccatcgtcccgcaatatatcgacgacctcgtgagctgggcctccatcggcgcccgaacctccgaatcgcagacccaccgcgagatggccagcggcctctcgatgcccatcggtttcaagaacagcacggacgggaatctccaggtggcggtggacgccatggtttccgcccgccacgcccatcacttcctcggaattgacgccgaaggccggtccggcgtggtggccacgcgcggcaacaaggcggcccatctgattttgcgcggcggccgcggccggcccaactacgatccggtgacggtcctggagaccgaggaccgcatgcggaaggccggactcgatcccatgatcatggtcgattgcagccatgccaattgcgggaaacggcacgagttgcaggcgcacgtcctgcgcgacgtgatcgaacagcgcgtgcgcggcgccgaatccctgatcggcgtcatgatcgagagcaacctcaagccgggcaaccagaagatgccggacgacccaaaggaactcgaatacggggtgagcatcacggacccgtgcgtgggttgggagacgaccgaggccatgctgcgcgaagcccatcagcgtcttggaaccggcgctgtctgaggcgtgcggcctcgtcggagcggatagccgcgggaggaggaatcatggattgtgtgccccaggacggcgtgcatgcgttgatgccgcgggaccagatgtgcgccgccgcgcgcaaactccgggacgcctatgcgatcacccccggcgcgccgctggttcaccgcgaattcggctactactgcgtggagcgctggaatgaacaggggctctctccccgggcggattttgacgaggtcttcggctacgacccgccgggcaatcattcgctgaaccagttggggtggtgcgaggctgcccttgtcccctccttcgaggtgaagatcatcgaggaccgcggcgatcatgaggtcgagcaggactacgcaggcaggcacgtgctctacttcaaagggcgccgcgacggcttcatgccggagtacatcgatcaccccgtcaaggactggaagacgtgggaggaggatgtgaaatggcgcatgaaccccgagacttcagatcgctactcagacctcgactggcgcatgcgtgccgcggcggcccaggcggcaagcggcatgatgatcgtgcagaatctcattggcggatacatgtatctgcgcagcctgatcggccccgcggacctgctctacatgctgtgcgaagcgcccgccctcatccacgattgcatgaagacctggttcgagctggcggatgccgtcatcgcccggcatcagcaatacgtgacgattgacgagatctacttcgccgaggacatctgctacaaacacggcgccttgatctcgccggacatgatgcgcgaattcctgttgccctactacgcgcagatcatcgccaacctgaaatcgcgccagctcgaccggtcgcgccatctctacatccagatcgacacggacggattcgcggaccccgtgattcccctctatcgcgagataggcatggacgtcatgagtccgttcgaggtggccgcgggctgcgatgtgcttcgcaccgggcaggaatacccggacctggcgatcttcggaggcatcgacaagcgcgtgctcgcggcgggcaccgcggaaatcgaccgcatggttgatcgcattctgcccgccatgcgtgcgcgcggcggctacattccgacctgcgatcatggcgttcccgaagaggtcagcctggaaaactacctccattaccgaaagcgctgcctcgaattgggcggctgacgagggaaagtctaatctgctcctcgcagaatcctaatgaaacgggagcagaatcgggggatgagcgagatgggcaagaaacacgtgctcgtggtcgaggacgaggaggacatcctcgaactcgtggggtacaacctggccaaagaaggctatcaggtgacgaaggcagcgtcgggggaggaggccctgcgtctcgcgcaggccagagtcccgaacctgatcgtgctcgacttgatgctgccgggaatggacgggctcgaagtgtgccgccgcctgaaacgcgagagccgcacccagcatatcccggtggtgatcctcaccgccaaaggcgaggagccggatatcgtggccgggctcgaactgggcgcggatgactacgtgacgaagccgttcagcccgcgcgtgctgctggcgcgcatcggcgcggtcctgcgccggccggaacaggcggatacgggacccgagaagatcctcacgttcgagaacctggccattcatcccggccgccgcgaagtccgcgtggacggcgaactcgtggacctcacgtacacggagttcggcgtcctccatctgctggcccggcgcccgggctgggtctttacccgttatcagatcgtcgacgccattcgcggcgagcactacgcggtcacggaacgggccgtggacgtgcagattgtcgggttgcgcaagaagctgggcgaggcgggcgcgcgcatcaagactgtccgcggcgtcggctacaaattccaggagtaggccatgcggccgcgtcctctcatctggcacatcttctcttcgtatctcctcgtcatcgccgtggcggtcgtggcggtcaccggctacaccgcgcgctcgattcgccagtcctatcacgcgcaaatgaccgcggacgccgccattcgcgcgcgcgtcgcgggggaccggctcctcgaaccgctgcgccgcggggcgcgggccgaagccaacgacctctgccgcgcgatgggcccggaactgaatgcgcggctcaccgccatactcgcttccggcgaggtcgtgggcgactcggaagaggaccccatgaagatggacaaccacgccgatcgtcccgaagtgaaggcggcgctcgaaaccggcttgggctccagcatccgctacagccgtacgctgcgcaaagacatgatctacgtcgcactgcccctcacggatgcgggacgcaaactcggcgccgtccgcgtcgccattccgctcacccgcctgaacgacgcgctctgggcgctttacgcgaagacggccaccgccgcggtcttcgccgcgctgctggcggccggcgtcagttgggtcgggtcgcggcgcctgctgcgctcgctgaacgaaatgaaacacggcgccgagcgcttcgcgcgcggggacttcagcgagccggtcgcgcggcgcggcgcgcaggaaatcgcgcatctagccgacgtgctcaaccagatggcacggcagctcgatgaccgcatccgggccgtgctgaatcagcgcaatcagcaggaagcggtgctctccagcatgatcgagggcgtgattgccgtcgacaacaccggccgcatcctcagcctgaaccaggcggcggccgaactgctcggcgtgcgtgctgatgaggcgcagggccgcagcctccgcgaggccgcgaacaatgagcccatcagcgaattcgccgcctgcgccctcgaaagcgccgcgcccgtcgaaggcgagtttgtgatcccgggccaggatccgcgcacgctccaggcgcagggcgcggtcctgcgcgacgcgcggggcgaggcgatgggcgcggttgtggtcttgaacgacgtcacccgcctgcgccgcctcgaacaggtccgccgtgatttcgtcgcaaacgtctcgcacgaactgcgcacgccgatcacctcgatcaagggctttgtcgaaaccctgctcgatggcgcgctcgacagccccgacgatgcgcggcgcttccttcagatcgtggcgaagcaggcggaccgcctgaatgcgattctcggcgatttgctcacactctcccgcattgaagaggaagagaagaaggagagcatctgcctcgaacccagcccgctgcgggaaacgctcgcggcggccgtgcagctttgcggaagccaggcggccgaaaaaaacgtccggatcgaactcgaatgcgcccccgagctctgcgtccgcatgaacgcccccctgatcgagcaggccgtggcgaacctcgtggacaacgccgtcaagtacagtgatccgggcggaaccgtgcgcgtcaccggagagcgcggcggggaggagacgatcctgcgcgtgcaggaccagggctgcggcatcccgcccgaacatctgccgcgcctcttcgagcgcttctaccgcgtggacaagggccgaagccgcagccagggaggaaccggcctgggactctccatcgtcaagcacatcgccaaagtgcacggcgggcacgtcgccgtcgagagcgccgtcgggcagggcagcaccttcacgatccgtctgcccggcccctgaacgcctactggaagaacgaacccagtaccagccccgcgtagtccgtgaagacgccccagagcgtctgccagtcgttcaggacggaattcggcgcaaagagccccgtccgcagcgaaagcgcggtggcgccctgcgtgtattccagcatccacgtgcccggcgccatcgaataccccttcgcaacgccccgctccagcaccgccatgtcgcccggcacatacaccgtcttctccgtctggccctccgtgtacgtccacatctcccccgcaaacatgcagtcgtagacatccatcgccgggtagcggcccgagaagccttcactgccgatgggcgtgccgaagatcagcacatattcgttcagcgacgcgtacagaatcgccatctgccccagcgtgccccccgcgtagttgaaatgccacttcaattccttccggaactgcccgggataccgctcatgaagcttctccatgatcgcgtcgatcgcatcgtccgccggcagccccgacacctcctgcgcgatcccgtggatcgtctccgcgctgaacttcggcgaacagcccgccagaaccgccgcacccaacacaaggaccgtcagcactgccacccgactgatgttgttcatggcgatttcccctccctgtttccgctgcgtttcggagccccggaatgcgcgaccctttcccgcatcattcacccagccgccaccccctgtcaagccccggaaatccaggcccctcccagttcaaaaagtaaaagcctccaaacccttccgggcaggaggcgttaggggcgctgcaagcagcggtgcccctcgtgatgattgccgtaaggcaatatccttactataatgagaatgcaatcaccgctcaggtatactaagtggattatagcggacccaaaggccgttgtcaacacacttcaggggaggtagctgtgtatgggaacccagaaaacgatgcaggtgctgggattggacctcggagcgaattccgtaggctgggcgctgctcgaggtgcaaggggacgagccctgcgggcttctggacgcaggcgtccgggtatttgaggcgggcaccaccggcgatatcgaaggagggcgcgacgaaccccgcggcgtggaacggcgtcaggcgcggcaagcgcggcgtcaggcggagcggcggtcgcggcgcatggccaatatcgcggccatgctgcgccggcatgggatgtttccagaatgtacgacccacaagggtgccgcacgagacaaggccattgcgcaactggacaaagaattgcaggcggagtatcgtgcgcgatgcgccggggacccggaggccttgcggagactcgaacaactgccttacttcttgcgggcgcgcgccctggacgaagcagtgagcccggcagccttcggacgggcgctctatcatctcgcgcagcggcgcggatttctcagcaaccgcaagacaaagcgggacgcaaaagaggaaggcgatgtgaagacgtccatcaggacgctgctgacaagaatgcaggaaaccggggcgcgcacgcttggcgagtacctttcccggatcgatcccgccgaggaggaacgcttgcggcggcgctggacggcgcgcggcatgtatgaggccgaatttgaggcgctatggaacgcgcagaagggccatcatccgggtcttctcagtgaggaactgaaacgccgggtctacgacgccttcttcagccaacgtccgctcaaaagccagaaaggtctgatcgggttctgtgaattggaacccgggaggcggcgtgcgccccgcgccttgctgaccgcacagcgattcaggctgctgcagaaggttaatgaccttcgcgtgcacatgcccgatggacaaatcgttgatctgacggccgaacagaagcgcgccgtggcggacaagcttcagggtgtggagaagcaaacgtttgatcagttgcgaaagttgctcaaactttccggggtcgaattcaatttcgagcgcggaggagaaaagggcattcctggaaatgtgacagcggcggcgttgcgcaaagtcttcaagaagaagtgggagaccctgagcgaagcgcaacaaatggcggtggtgggggaggtcatgggcatcacgtgcgatgaaacgctgctgcgccgggggcgggaggtctggggtctggatgaagaaggggcggaagccctgacgcatgtgcacttggaggaggggtacgcggcgctgtcgcgtgaggccttgaagaggattttgcccttgatggaacagggcattccctttgccacggcgaaactgcaggcatatgacgagaaatgggccaagaacgtattggatggactgcccgcggttgagctggccgctctgcccatacgcaatccggtggtcatgcgaacattgaccgagacgcgcaaagtcgtcaacgcaattatccgcaaacatggcaagccggccgtggttcgtatcgaactcgcgcgggaactcaagaagacccgcgacgcccgcaaacggatcacgaaggagaatcacgaacgccgggccaaccgcgcaagtcttgtggagacccatttcagggagagccgcagcgcgacccgtgcggacatcgagaaactgctcctttgggaagagtgcaaccgacaatgtccgtacacgggaaagcccatcagtttcgaggccttgttcggggatgcgccgcagtttgatgtcgagcatatcatccccttcagccgctgccttgatgattccttcatgaacaagaccttgtgccatcacgagttcaaccggaacgtgaaaggcaatcggaccccttacgaggctgcagggcacaacgaggacgcgtggaatcagatgagcttgcgtgtccgtcagtttcggggcgatggagcaaagggtaagatcgagcgctttctggcgcaagacctcaaagcctttgatgagatcgtgtcccagaagctgaatgacacgcgttacgcctcccgaatcgcggcgcagtatctggcgtggctctatggcgatgaggcacgcagtcgaattcaggtgagcactgggcaggtgacggcctacttgcgggacgcctggcgcttgaactccatactgggcgacggcggcgaaaaggaacgcggggatcaccgacatcatgccgtcgatgcggtcgcaatcgcgctcacgtcgcgttcgattgtgaagcggatgagcgattccgcacagcgccgcatggaggagcgcggacgcagccgggggtggtggaacgacctgcccatgccgtgggactcatttctcgaagacgtgaaggagaaggtcggcagaatcgtcgtgtcacatcgagtctcgcggcgagtgcgcggtcaactacatgacgacacagtctacagcgcgccgcgcaaggacaaggaaggcaaagagtacgttgcgttccgcaaacccttgaccgaagcattcaaagcggaggcggtggaaaagatcgtggatccccgggtccgcgaggcggttcgggaatggctggaaaagcacggaaacgatccgaagaaggcctttggcgatccggcgaatcatccccgcttgatgatcaagcatgggccgcacgccggaagaaccgttccgatccacagtgtccgactcatggaaaatcggggtgtcgagtccattggacaagccccgcacgaccgctacgtctgggcacgcagcaacagccacatcgagatcttcggagtactggacggagacggcgagattacgaagtggaaagggcgggtcgtcagccgccttgaggcctatcgccgattgaagggcaagaagcctattgtggaccgcgatggcgggccaatgacgaagttcctcttctcgttgacacaaggagacacaatagaggtcgatatggagagtccagaacgtgacgttctccgccttgtatatgtcgtgagaggcgtttgggaggagggcggcaaagcacgcattgaaagcgtgcacgtaacagacgcgagaaagaagcaggacattccgcgaagccggagtgagaaggagtgggccagatttcgatggacgccgttcgctgaaagactgcgtaagtccgactgcaagaagatatcgctgacgcccttgggcgaagtcgtcactgcgaatgattgagcgcttgatcgacatttcggacgcgggggggcgggttagcgtcaaacacgatcaactgactatcgcgcgggaggagtcgccgccgtactcggcaccgttggacgaggtggccgtagtggtcatctcgcatcccgcggtgacgctgacacagtccgtgttgtcgggtttgatggcgcacggggcagtgttcgtggtctgtgacgagcggaagctcccgtccggcatgatgctgccgctcgaaggacatcatctccagggggaacggctggaatatcagatgaatgcgtctcaacccgtgcgaaaacgggcctggcagcagatagtgcaggccaagatcctggcccagggccgattgctgagcgaactgcgcggtacggacgccggattgctcgctttggccaataatgtgcgctcaggcgacccggacaacctcgaaggccaagcggcgcggcgctattggccattgatcttcggcgaggtgtcctttcggcgcgataacgatctggcggggctcaattcagtcttgaattacggctacagcgtgcttcgcgccatcgtcgcgcgggcgattgtggctgccggactccatccgtcgatcggggtgcatcatcacaaccgatacgacgcgtaccgcctcgcggatgacctcatggaaccgtttcgtccgctcgtggatcgtgtggcagccgccttggcggcgcagtatggttttgacctggacttggataaggacacgaaacgggcgttgttgtccgcgttcatgggccgctacgtggtggatggcgaagatcgctcgctcttcgaagtggcctcgcgcgccgcggtctcgctcgtcctcgtgtttcagggaagacgtaaagaactgttgctgcccgaaatctgacgaatggggcggcggcgcggaggaagagcaggcagtgggctccagatggctgcggacaacctcataggatcggggtataagggcgtgtggctggttgccatgttcgatttgccggtgacggacgtcgtagcgcgccgtcgctacacgcagttccgcaatcttctgctgaagtttggattcgagatgctccagttctcggtctatgcgcgctactatccaagcgaagaggcaagcgaaacgcaccgaaagaacatcggcaagggtttgcccccctcgggacaagtccgtctgctcctcatcaccgacaagcaattcggcaagatgcaggtcttctgcggaaaaaaagcccagcccgccgaagaagcgccggagcaaatactccttttctgatcctcgcgtcgcccctaaacccccggcttttccagggttattcgggacagagtatacctgagcggggattgccttctca

SEQ ID NO: 4474 - DNA, 13765 bp, synthetic construct
  source 1..13765: mol_type = other DNA
  misc_feature 1..13765: note = Synthetic
ccggttccccgaaaaccggagataccccggcctgccaccttcaagatatcgcgtcatactccatccgccgtcctgtccgtcacaccgcgcaggcattatgcgcaatttgacatggaaaatcatagcagtagtccggtttttccaaaaccggagcaaggggttggcccaaatccggtttttgaaaaaccggactaccaagtcgtcacgcgcggatgcaattccgggggctgttgaaaaaggcccccaaaccgcccatcacgtcattctggatcccccacaccgtcattttgagcgcccagaccgtcattctgagcccccccaccgtcattctgagcgcagcgaagaatctgcctacgttatcgcgctccaggaacttgaaaagaaaaacccccaaaccttccggcagggggcgcagggtcgccgcaagcggcggagccctccgtgatgattccccgtaaggaatctccttactatgatttgacgggaatcaccgctcaggtatactatctgtattcagtatacacatgggcttgctgtttgtcaagactattttcgcccgtttcgggcgagagaaagggggggcttatggcttccgtcggagagcagttggttttgggactggaccttggctccaactcggtggggtgggccctattgcgcgaaagtgaggatgggcctacggccctggtggatgccggcgtgcgcgtttttgaggcgggaactgagggggacgtcgaatccggcaaagacgaaccgcggggcatgcaacgccggatggcccgtcagcggcgacgccaggcggaacggcgttcgcggcgcatggagaatcttgcctgcatcctgcgccggagtggcctgctgccggatgatgtggtgcgacacggcgctaagcgcgatgccgcgttccgcggactggatcaaggaatctacgtgcgccaccgtgccgttttgggcgaagactcgcctgaattgggcgcgttgcgccaactgccgtactttcttcggtcccgcgcattggatgcgccgctcgaacggcacgaactgggtcgcgccctctatcacctcgcgcaacggcgcggttatctgagcaaccgcaaagcccggaagaaagatgacgacagcggcgaggtcgaaccggccattcacgcactgcaggcggagatggatgccgcgggcgcgcgcacgctcggcgaatacctttcccgaatcgatccggtgcaggaacagcgcattcgcaggcgctggaccgcgcgccgcatgtaccaggaggagttcaacgctatttgggaagcccaacgcccccaccacaaaaaggtgctgacggacgcgctgaaggaacaggcttacgagtgcatattcgatcagcgcccgctgaagagccagaagggtcttgtgggcgagtgcgaccttgtccgcgggaaacgccgtgcccccatggcgttgctcaatgcgcaacgtttccgcctgttgcagaaggtcaatgacctcgaagtgtgtttcgctgacggcacgcaaggcccgctcactccggaacaacggcagaaagtgctcgacgggcttgaaaccgtggagcacattaagttccccggcttgcggaagctgttgaagctcaagggcgcggagttcaacttcgagcgcggcggggaagacaggcttcccggcaacaagacggccaaacgattgcgggatgtcttcgccgaacggtgggacgcgttgtcacgcgccgagcaggaggccatcatcggcgaggcgatggggattcagaaaccagaaaccttggtccggcgcgggcgcgaagtctggggactggacgccgaagccgccgagagattcggcaaagtgcaactcgaatccggctactgctcgctctctcgggaagccttgaaggtgatactccccctgatggagcaaagcaagcggttcgccacggcgcgtgatgaagcgttcggcggccaatggtcgcgggtcgtcaacagtgagcttgcgccggttgttgatgcctgctccagcatccgcaatccggtcgtcacgcgcacgcttaccgaaacccggcgcgtcgtcaacgccatcatccggaagtatggaaagcccggcgtaatccggatcgagttggcgcgggaactcaagaagacacgcgagcaacgaaaggagatcacgaggaatatcaacaagcgcagggatcagcgcggagaatttgccgaggtggttgagaacgaaaccggaaacaagaatccttcccggcgtgacgttgagcgcatccaactctggacagaatgcggggggaaatgcccctacacgggcaacagcatttcgcgcgggcagttgttgagtgctgagtcgccgtgggatgtggagcacatcatcccgttcagccgatgtctggatgattcgttcttgaataagacgctctgctatcacgaggaaaaccgcaatgtgaaaaagaaccagacgccgtgggaagcgtatggcggaacaccggcctgggacgacatcatcatgcgcgtcagccaattccacggcgatgccgcgaaagagaagttgagacgtttccagttgcgcgacttggacgacttcgacaccttcacgcagcggcaattgaacgatacgcggtacgcctcgcggctggccgcgcaatatctttcgtggctatacggtgatgaggcgcggtcgcgcattcaggtcagcacgggacaggtgacggcctgtctgcgcaacgcctggaatctcaacaagattctcggcgatggcggccagaaggaacgctcggaccatcgccaccacgcggtggacgccgttgccatcgccctgaccgaacggcggtatgtgaaagcgcttagcgaggccgcagcgcgccagttcgcgcaaaaggggcgctcgcgcggattccagaagctggtcgagcagccctgggatgatttcctacgggatgtgcaggacgtaattggccgtattgtcgtgtcccaccggccccagcgcaaggtggcaggggggttgcacgacgactccatctacagtcccccgcgcacggatgaaaacgggaaaccttacgtggtcatgcgaaaaccgctcgacaaggattttaaggcgagccacttggaggacgttgtcgatccggaaatccggcgcattttgcaggactggctcgaacggcacgacaacgatttcaagcgcgctttcggcgatcccaagaatcacccctcgattgtcatcaagcacggacctcaggccggacaaaccatccccatccacaaagtgcgcatgaagttccatcgcgaagtcacgcccatcggcgaaggcgaacgcctgcgccacgtctggacgcgcggcaacagccacatcgaaatcttcgccttcaaagacgccaacggcaacgttgccaaatgggaaggccgcgtggtcacccgcctcgacgcctaccgccgcgtcaaacacaaacgacccgtcgtcaatcgcacctggacagagaaccatgagttcctcttttcgctcacgcaaggagatgttgtcgagttggatgtggagcctgaagcggacaggactgtcagggagccgtatctcgtgcgtggaatatcgtttcagggtggcggcattttcgaactgacgcatattcgtgatgcccggaaaaaaggagacattccgccgaaagtcaccgaagaggaaacaaccttcgttcgtcgacggccatatgtcgatggattgcgcaagttgaactgtcaaaaggtgtcgattaaccccataggcgaaatctgtccggccaatgactgagcgcatcttggatattgcggaggtgccggcgcggttgtcggtgcggcatgagcagttggtgattgcgcatgacgatcaggagaccacgacgccgttggaggaggtggcggcgttgattgtctcgaatccgggcgtgacgtatacgcaggcggtcatcgtgaagctgatggaggcggggggggtgttcatcgtgtgcgacggtcggcacttgcctgcggggatgatgttaccgctggaaggccatcacgtccagacggcgcggttgcgccagcagatcgaggcgtccgagccgacgcggaaacaggcttggaagcaattggtgcaggccaaggtcgaagcacaggggcggttgctcgaacgcgtgcatggacaagaccatggccttgtcgccatggccgggcgggtgcgctcgggcgatgcggacaatgtcgaggcgcaggccgcacggaagtatttcccggcgttgttcgggcaggagtttcagcggaaccgcgatatgaccggtacgaacgcgctgctcaactacgggtacaccgtgttgcgcgcgatcattgcccgtgcgctggtgggcgcggggctccatcccagcatcgggttgcatcaccataaccggtacgacccgtattgtcttgccgcggacgtgatggaaccgttccgggtgctcgtggatgaggcggtgctcgagtatctgcgccaaaacaaggacgccgtcgagttgaatccgtcggcgaaacggcatttgattaccgcgcttatgcggcggtacgccatcgaggacgaggaccggtcgctgttcgacattgccgcgcgcacggcagtctccctcgtgcgggttttcgaaggcacgggccgttctttggcattgccggacttcccgtgggggggtgattcgtaccacgaagccgcaaaggcacaagaggacgaagaaaggcagtcatctgtgtgaatcggcgctcatcggtggacaagtcttgatcatccaccgattcacaccgatggacaccgatgaagtccccgagtcacaagggaacctctccttcttgactctgcttcgtgtctttgtggtttccgaacaagggcactcgagatgttcgttctatgagcgatacgggactgaacttgtcggagtacaaaggcgtgtggatattcgccatgttcgatctgcccaccgaaagcaaggaagaccggctccgctacacgcagtttcgcacgctcttgctcaaacacggctacgagatgctccaatactcggtttatgcgcgttactaccccagcgaagaagccgcccaagcccaccggaaacacatcaagcagggtctgccccccgccggacaggtccggttgctcatggtgaccgacaaacagttcgggaagatggaaacctacctcggaaaaaagaagcaatccaccgaagaagcccccgaacagatgatgtttttctgacggccttcacgctgtaacccccggttttccgggggttatagcatgaagagtatacctgagcggggattcccgtccaaccacagcaagtgcgcgcgcgcctggaaaataaggcgaagtatacctgagcggggattcccgtccaaccacagcagtgggcagttgacaggattaacaagattgacaggatgagagagattcagttgccggcggccccctcccgtagcgagtccgggtaacgaagttaccgggccgcttaggcgaaaggcggacgtttttttaggtcgcttttcgcctaagcggcccgaaaatgcctattttgcgcgctccggcaactcgtggtagaagtcgttgcctgcgtgcttctgaacgcttgtgaaaaatgtggcatgggcgtcccgctcatgtttcatgggcaagatgcccatgctacgctgagggaactgccgaattcgggttcgctggcagattcttcacttcgttcagaatgacggaagggttaggctgggggcgcgggaagaccaggctcggccccgtgagataccggtggcgcggctgaggcgcagtcggctgcgcggaggacaggggcctgcgccatgaacgacacgccgatgatgtacaggctgagcacgagcaacatgcaggattgcgcgaaggagagggtgaggccgatgtcccagaacgcgttgaagaggtaggcgaagatggatagggcgaacaggagggcggcgccgcgcgcgcgtgcgggctgctcgagtttgggcaggaacaggaacagcgccgtgacgagcatgacctgatagtagaatgacgacgcggtgaggaaataggcgagggcgtagccgtaggggatggtctcgtagtcttcgaggtttcgcaccgcgaacagcgacaccaccagcaccgtcgcctggatgcaccaccagagtccctggtactcgcggaactgggccacctttgccgcctcgtatgcggcccacgtgcccggtttgcaggcgtaggcgagcaggaacgcgtagcggaacccgacgcgggagggcgccatgtcggcgtcgtgcagccggattttggtccaaaaggcgcgccacggttccacgccgccgtcaagaacagaaagcccgaccagcgctgccgtaaccaccgcgaaggtgagaaaaaactctacgtagcgccgctcgactttgcgcgttgcgatgaggttccacgcggccttggcggccagcccgaagacgaagataaacgggaagatgcgcgcgagccccgcataagccgccatggcgcccgccgtcttataccggttggccttgagcatgcaacagctcatgacgagcaggcagacccagtctagccgcagaaacgccccccggatgtgtccgtaggccaacatgaacaccgtgccgacgaacgtcaccgcgaacaggctcgtgcgccaaccgaacacccgccataccatggcgaacgtggccgcgaggagcgccacgtcgagcaggacgagcagcgcgatgccccacacgctttccgcggacacgtggttcgtgatgagaccggccgccagggtccagaccggcgtcgcgttgtatcccttgtcgatcaaggcgcgccgccacgccttggtgtctcccaggagggccttgaaacgggccacgtcctctttgaacgcgtcccaccgctcccgcgaaaacaacgcgcggtacgtgtcggcctttcgcgtaatggcgccggctttgacgaactggtaggagtccatgtttcggatgcggacaatatccgagcggcgtccgttgttttcccaatcggccacggccgcacaggggtataggttgaggtagcccacctctttggcgtacttcgagcccatatagtaatggaacacgtcgtgcacgttgatgaagaagccaggcgtggggtagaaggcgaagtcgaagtacagcgccgtcgccgccacggcagccaaaaccaggatgcggtcggctttcgtgcggcgcgcgccgagtccgcgccggtataggcgcgcgtaccaccagacgagggccagcgctgtgccggtgacggcgatgcggacggttcccgccaacaacagtattgcggtgttcacgatatgcgaaccgtccccttctctcggtcaaccgagttgcgctacagccccaaccggaagaatgcgtttgcgttgccgaacagccacagccgggccacttccttcgcctcgtcgaggtccaggtactcgatgtcaaccatgtccgcaagcgcgatggcgatgttgtcgcgggcgatggaggcgtgagcccacgcccggtctaccgagccgccgtagtcggaaccgtacccgtggattttcccgtgcgggaccgccgacaacgcctgtttgaacaggttctgacagtaaaccggatcgatgatattggcccaacagaaatccagagtgacgttcgggaagttcttgcccaggtagatcagctcgtcgtggtacggccagttggcgtggaaaaggtcaaagcggacctcgcggtgcagctcgagcacgcgcgtcagccccacggcgtttgttttcgcgatgtcattgcggatacctgccatatgacccgtgtggacttgcaccggcaggtccatgtcgcgcgccatgcgcatgaattcatggaacagataatcgtccaagggcgccacgccgtccggataggacgcggaccggcgcgggtcttccatgaaccagttgaacaccgcttccgcctcggcccgcgtcggattgccgtaggccagcgtgcggttatacgcgctctggtccttgaacgccacggccccaaaccgtttgtgcgcatcgaatacctcgcggcaccctgcgaggtactcgtccagcgaagtgacggtgcgcttcaggggcgccatgaggtcgtccacgttctgcttcttgcatactgcgtggtaaccgggcaacgagatcgccaatcgtccgcgcggggtcattttcagtgagccgtcgataacctggttcacattgggccagacgtcctcgatgcgcgcggcgatattcgcttcctcgagaatcccctcgaaaaccgtctcgtcctccagattcagcagcttgtccttgatgcgcaggagcgcatcgagagttaagtactcctcgccgtagaactttttcagcacgcggcgcgtgaccatggcgtaccctgtgtggcaggtgcgcttccacgccctctccaatatcggccaacgttcttccacggaccgctttgtgtccaatatgaaagccaggtcctcgtctgatgacgcgctttggatgtcgcttgggaaatagccgttgatgactgcttgaatggcatccgtgtattttgggccacacacgccgctgtgatcatggcaatccactaaagcgacttgttcagaataggcccgcaattcgtcaaaacacgccgctttgcttcgcatgaagagactcccttcttgctcgagcacgattctttcggcggaagcttaccaggattggcgggcggagtaaaagcgtccggacttgcggacagccttgcgcattggtatggtggtacatccacaacgggccaggtcgggtattcgccggcccttcacttgaggagatgttccatgggtattacgcgacgtgagtttcttgtccgcgcgacggccggcggtgtggcaggggtcatgatggtccctgcgtggcgagcggtgggggagacggacgtgggcattcgcctgagcgcgtgcgattggtcgctcgatgccggcgggccctccgggctcgaaattgcgcggcgtgtgcgtctcgatggtttggaggtgtcagcgggcggcccggcggacaccctgaaaatcgcggacccggagtaccgcaagcagtacaaggacgcggttgcccaaacgggcgtcgttgtgtcgtccgtggcgatggggttgttgaacgacgcgccgttggccacggacccgcgcggcccggtttggcttgagcagaccatcgaggccgccgaagacctcggcgcgaaggtgatcctgcttgcctttttcggcaagggcgatttgcttaaagaccgcgagttgaagaacgccgatatcgacgtggtggtaacgcgactcaaggaggcggccccaaaggccggtcaggcaggcattatcctcggcatcgagaacaccctcagcgcggacgacaatgtgcgcattctcgaccgcatccaacacgacgccgtccgcgtgtactacgacgccggcaattccaccgacaacggctatgacgtggcggcggaaatccggcgactcggggaccgcatttgccagttccatttcaaagacggcaggcactatttgggcgagggtcgcgtgaaaatggaacccgttgcggaggccatccgcgccatcggatacaggggatggatcgtgctggaaacgagttgtccgtccaagaaccgggacgccgatttccagagaaacgcagactacgtccggaagctgctggcgaccgcgtgagccagaggagatgagaccgttgcgcacccggcgggggtggaatgcgttgcgcgggcattctacgtggcaagcgcgaccagttcctcgatggcggtctcggattcaaggaaccgcgctgtgtcccccgcgaagtcttcttgcgtcacgcccgccgtgtgccacacttcatccgtcacttccgtcaccacatcggccacagcaagaaagccgcccttgacgcgccggtgttcgcgtgttagcctgtctgcggacaaagttacgcacgaaaggttcgctacctggagggagttgacgatggcatcacaacaacgcgaagacgtgcaacgaagggatttcctgaaagtggcggcattgaccgcggcagggctgacggttgcgcccataacggcggttcgcggagcagaggccaacaccacgcttcgcttggggcttatcggttgcggcggtcgaggatgttggataggggggctgtttgaaaagaacgcaaaggccaaagtcgtggcggtgcacgactacttccgagatcgggtcaacgaagcgggcgacaaattcaccgtggaaccgtcacggagatacgcgggccttgacgggtacaaggaactgctcgcgagtaacgtggacgccgtggccatcgtaagccccccctgtttccatccccaacaagccgtcgccgctatcgaggccggaaagcatgtctacctcgcgaaacccgtcgccgtggacgtgcccggatgcacagcggtcctgaaggcagccgaaaaggccggcgggaagctcacgatgctcgtcgatttccaaacgcggaacaacgagttctttcgcggcgcggcccagcgcgttcacgaaggcatgattgggcagcccgtctgtggccagatgttctaccacacggggcgtttggagacgaaaacgccccccggctccgaggtggcgcgcttaaggaactgggtgttcgacatctcgctttccggcgacattattgttgagcagaacgtccacgtgctcgacgtgtcgaactggtatctacagtcccatcccatcaaggcctacgggaccggaggtcgcaaggtgcgcaccgatgtgggggactgctgggaccattttgttgtcaccttctggtatccgaacgacgtgctcatcgatttcagctcaagccagttcctcgaaggatttcacgacatgtgcatgagactctacggggccgaaggcacggtggactcccattacggcggtgacgtcgtcatccggggcaagaaagcaggctggcgcggcggcaacacgagcgacatctacctgcaaggcgcggttaacaacatcaaagacttctgcggcagcatcgcggaaggaaagtacctcaacaacacccgggacggcgtagaaagcacgctgacaagtatccttggccgcaccgcggcttacgagaaccgggtcgttacgtgggacgagatgctccaggccaacgtggcgctggatcccaagctcaagcttcccgaagacggccccgacaccaccgcgtaagcgccttcggccgcgtcccggcgcttcacggtgggtcttagggcacttttacgccgcgatgcccgcctgacagggcatcgccttgaccgcccctcggcggctattccgtgcctacacgttccccgcgtcgcgcacgccaccgtcatctcgtgagcggtcttagggagaacgaaaagccctggaaaaccgcttgtttccagggcgcaccatcaacaatggtgcccggggcgagatttgaactcgcgcgcccagttatgggcacaaggtccttagccttgcgtgtctgccaattccaccacccgggcatcaacgcccccaatgatacctgagtttgccgctgggattcaatacagacggcgcactcaatccgcgagcaaagggctgtgtggtagacgcggcgtcctcgacgcctgcctgttgacatttggctctttgccacgtatcatcacttccgtcacaggccaggcggacgggaaaacaatctgatatttcttgtgcgtcccaggtgttttctctgcagtgttttgaaccccatctttctcgggaggaaagaggtctcatgaaactcgccgtgataggcggggccagttcctacacccctgagttggttgatgggctgtttgggtgcctggatgccattcccgtcaccgaactctggctgatggaccccaaccaggaacgcctggctatcgttgccgaattggcccgtcgtatgtccaagaagcacgggaccccattcaccgtgcatcctacgggggagctgcgcgaggcgcttcggaatgcgcgctacgtcgtcacgcaactgcgcgtcggccagattcaagcgcgaatcgccgacgaaaaactgggactccggcaccacatcatcggccaggaaaccacgggcgtaggcggttttgcctgtgcgttgcgcacaattccccgggtattggacattgcccacgccatggaggacgtggcccccgacggcgtgctcgtcaacttcacgaatccgagcggcatcgtcaccgaggccctcctcaagtacagcaccgtcaagagcgtcgggctctgcaacgtccccatcggcatcattatggacatcgtcaaacacttcggctgcgcgaaagaggaggtgggactggactatgtcggactgaaccaccttgcctgggtgcgccgcatcgtggtggctggtgaggatgtcaccgagaaggttctcgcagcttttatcgagcgcgcggacgaggagtgggaggtccctgccgtccgggagaacatgaagctggccatgggcagtctgcgcatggtctgcaacggctatcttcagtactactacgccaccgacgccgtgctgaaccatctgaagaacaagctcaagacccgcggcgaggagatcattcctattgagcacgctcttttcgcaaagtatgcgcggaaggacctggacgagaagccggaagaactgtccaagcggggcggcgcgcactattccaccgcggcattcaacctgatcggggccatcgaaaaggacgcccgcaaccgacagatcgtctgctgtcgaaacaacggcgccatcccgactttcgacgacgaggtcgccgtggaggcgccggcaatcatcggcaaggacggggccacggccatacctcagcccgcgcccgacccggccatccgcggactgatgcaggcggtcaaggcttatgaaacgctcaccgtcgaggccgctgttacgggtagccgggaacgcgcgttccaggccatgctggcccatcccctgatgccgggggccgtgggatgcaagacgttgctcgatgagttgatcgagatcaacaaacctttcttgcagggaaccttcttctgagggtgtgctagaatagctgggaggtcggcatggcgaatactgccctttgtgaaacccatctacccaatcgggagccgatggtgcgcggcaaagtccgcgacatctatgaccttggcgacaaactcgtgattgtcgccaccgaccgcctttccgccttcgactgggtcaattcggtcggtattcccgataaggggaagatccttacgcaactgtccctgttctggttcgaccagatcaaggacttggtgcgcacccatttgatctccgccgacctggccgatctccccggggacttccagacccatgccgcccagttcgaggggcgttccatgctcgtcgagaagtgccggatgttcttggtcgagttcgtgattcgcggctaccttgccggaagcgggtggaaggaatacaaggagaaaggcgccgtgtgcggccacagactcccgccgggccttgtcgagtccggcaaactcgaggagccgctcctcacgccggccaccaaggctgacgacggccatgacatcaacataagcccggaacaagccgccgagattatcggcacgaagtggctggaggccgcctgtgccgccgccaagaaggtgttcctgcgcggcagggaaatcgccgaatccaggggtgtcatcctgtgtgacaccaagttcgagttcggcctccgagacggcgccctggtcctggccgacgaagtcatgacgccggattcctcccggt

SEQ ID NO: 4475 - DNA, 5883 bp, synthetic construct
  misc_feature 1..5883: note = Synthetic
  source 1..5883: mol_type = other DNA
gcccatcagcgaattcgccgcctgcgccctcgaaagcgccgcgcccgtcgaaggcgagtttgtgatcccgggccaggatccgcgcacgctccaggcgcagggcgcggtcctgcgcgacgcgcggggcgaggcgatgggcgcggttgtggtcttgaacgacgtcacccgcctgcgccgcctcgaacaggtccgccgtgatttcgtcgcaaacgtctcgcacgaactgcgcacgccgatcacctcgatcaagggctttgtcgaaaccctgctcgatggcgcgctcgacagccccgacgatgcgcggcgcttccttcagatcgtggcgaagcaggcggaccgcctgaatgcgattctcggcgatttgctcacactctcccgcattgaagaggaagagaagaaggagagcatctgcctcgaacccagcccgctgcgggaaacgctcgcggcggccgtgcagctttgcggaagccaggcggccgaaaaaaacgtccggatcgaactcgaatgcgcccccgagctctgcgtccgcatgaacgcccccctgatcgagcaggccgtggcgaacctcgtggacaacgccgtcaagtacagtgatccgggcggaaccgtgcgcgtcaccggagagcgcggcggggaggagacgatcctgcgcgtgcaggaccagggctgcggcatcccgcccgaacatctgccgcgcctcttcgagcgcttctaccgcgtggacaagggccgaagccgcagccagggaggaaccggcctgggactctccatcgtcaagcacatcgccaaagtgcacggcgggcacgtcgccgtcgagagcgccgtcgggcagggcagcaccttcacgatccgtctgcccggcccctgaacgcctactggaagaacgaacccagtaccagccccgcgtagtccgtgaagacgccccagagcgtctgccagtcgttcaggacggaattcggcgcaaagagccccgtccgcagcgaaagcgcggtggcgccctgcgtgtattccagcatccacgtgcccggcgccatcgaataccccttcgcaacgccccgctccagcaccgccatgtcgcccggcacatacaccgtcttctccgtctggccctccgtgtacgtccacatctcccccgcaaacatgcagtcgtagacatccatcgccgggtagcggcccgagaagccttcactgccgatgggcgtgccgaagatcagcacatattcgttcagcgacgcgtacagaatcgccatctgccccagcgtgccccccgcgtagttgaaatgccacttcaattccttccggaactgcccgggataccgctcatgaagcttctccatgatcgcgtcgatcgcatcgtccgccggcagccccgacacctcctgcgcgatcccgtggatcgtctccgcgctgaacttcggcgaacagcccgccagaaccgccgcacccaacacaaggaccgtcagcactgccacccgactgatgttgttcatggcgatttcccctccctgtttccgctgcgtttcggagccccggaatgcgcgaccctttcccgcatcattcacccagccgccaccccctgtcaagccccggaaatccaggcccctcccagttcaaaaagtaaaagcctccaaacccttccgggcaggaggcgttaggggcgctgcaagcagcggtgcccctcgtgatgattgccgtaaggcaatatccttactataatgagaatgcaatcaccgctcaggtatactaagtggattatagcggacccaaaggccgttgtcaacacacttcaggggaggtagctgtgtatgggaacccagaaaacgatgcaggtgctgggattggacctcggagcgaattccgtaggctgggcgctgctcgaggtgcaaggggacgagccctgcgggcttctggacgcaggcgtccgggtatttgaggcgggcaccaccggcgatatcgaaggagggcgcgacgaaccccgcggcgtggaacggcgtcaggcgcggcaagcgcggcgtcaggcggagcggcggtcgcggcgcatggccaatatcgcggccatgctgcgccggcatgggatgtttccagaatgtacgacccacaagggtgccgcacgagacaaggccattgcgcaactggacaaagaattgcaggcggagtatcgtgcgcgatgcgccggggacccggaggccttgcggagactcgaacaactgccttacttcttgcgggcgcgcgccctggacgaagcagtgagcccggcagccttcggacgggcgctctatcatctcgcgcagcggcgcggatttctcagcaaccgcaagacaaagcgggacgcaaaagaggaaggcgatgtgaagacgtccatcaggacgctgctgacaagaatgcaggaaaccggggcgcgcacgcttggcgagtacctttcccggatcgatcccgccgaggaggaacgcttgcggcggcgctggacggcgcgcggcatgtatgaggccgaatttgaggcgctatggaacgcgcagaagggccatcatccgggtcttctcagtgaggaactgaaacgccgggtctacgacgccttcttcagccaacgtccgctcaaaagccagaaaggtctgatcgggttctgtgaattggaacccgggaggcggcgtgcgccccgcgccttgctgaccgcacagcgattcaggctgctgcagaaggttaatgaccttcgcgtgcacatgcccgatggacaaatcgttgatctgacggccgaacagaagcgcgccgtggcggacaagcttcagggtgtggagaagcaaacgtttgatcagttgcgaaagttgctcaaactttccggggtcgaattcaatttcgagcgcggaggagaaaagggcattcctggaaatgtgacagcggcggcgttgcgcaaagtcttcaagaagaagtgggagaccctgagcgaagcgcaacaaatggcggtggtgggggaggtcatgggcatcacgtgcgatgaaacgctgctgcgccgggggcgggaggtctggggtctggatgaagaaggggcggaagccctgacgcatgtgcacttggaggaggggtacgcggcgctgtcgcgtgaggccttgaagaggattttgcccttgatggaacagggcattccctttgccacggcgaaactgcaggcatatgacgagaaatgggccaagaacgtattggatggactgcccgcggttgagctggccgctctgcccatacgcaatccggtggtcatgcgaacattgaccgagacgcgcaaagtcgtcaacgcaattatccgcaaacatggcaagccggccgtggttcgtatcgaactcgcgcgggaactcaagaagacccgcgacgcccgcaaacggatcacgaaggagaatcacgaacgccgggccaaccgcgcaagtcttgtggagacccatttcagggagagccgcagcgcgacccgtgcggacatcgagaaactgctcctttgggaagagtgcaaccgacaatgtccgtacacgggaaagcccatcagtttcgaggccttgttcggggatgcgccgcagtttgatgtcgagcatatcatccccttcagccgctgccttgatgattccttcatgaacaagaccttgtgccatcacgagttcaaccggaacgtgaaaggcaatcggaccccttacgaggctgcagggcacaacgaggacgcgtggaatcagatgagcttgcgtgtccgtcagtttcggggcgatggagcaaagggtaagatcgagcgctttctggcgcaagacctcaaagcctttgatgagatcgtgtcccagaagctgaatgacacgcgttacgcctcccgaatcgcggcgcagtatctggcgtggctctatggcgatgaggcacgcagtcgaattcaggtgagcactgggcaggtgacggcctacttgcgggacgcctgacgcttgaactccatactgggcgacggcggcgaaaaggaacgcggggatcaccgacatcatgccgtcgatgcggtcgcaatcgcgctcacgtcgcgttcgattgtgaagcggatgagcgattccgcacagcgccgcatggaggagcgcggacgcagccgggggtggtggaacgacctgcccatgccgtgggactcatttctcgaagacgtgaaggagaaggtcggcagaatcgtcgtgtcacatcgagtctcgcggcgagtgcgcggtcaactacatgacgacacagtctacagcgcgccgcgcaaggacaaggaaggcaaagagtacgttgcgttccgcaaacccttgaccgaagcattcaaagcggaggcggtggaaaagatcgtggatccccgggtccgcgaggcggttcgggaatggctggaaaagcacggaaacgatccgaagaaggcctttggcgatccggcgaatcatccccgcttgatgatcaagcatgggccgcacgccggaagaaccgttccgatccacagtgtccgactcatggaaaatcggggtgtcgagtccattggacaagccccgcacgaccgctacgtctgggcacgcagcaacagccacatcgagatcttcggagtactggacggagacggcgagattacgaagtggaaagggcgggtcgtcagccgccttgaggcctatcgccgattgaagggcaagaagcctattgtggaccgcgatggcgggccaatgacgaagttcctcttctcgttgacacaaggagacacaatagaggtcgatatggagagtccagaacgtgacgttctccgccttgtatatgtcgtgagaggcgtttgggaggagggcggcaaagcacgcattgaaagcgtgcacgtaacagacgcgagaaagaagcaggacattccgcgaagccggagtgagaaggagtgggccagatttcgatggacgccgttcgctgaaagactgcgtaagtccgactgcaagaagatatcgctgacgcccttgggcgaagtcgtcactgcgaatgattgagcgcttgatcgacatttcggacgcgggggggcgggttagcgtcaaacacgatcaactgactatcgcgcgggaggagtcgccgccgtactcggcaccgttggacgaggtggccgtagtggtcatctcgcatcccgcggtgacgctgacacagtccgtgttgtcgggtttgatggcgcacggggcagtgttcgtggtctgtgacgagcggaagctcccgtccggcatgatgctgccgctcgaaggacatcatctccagggggaacggctggaatatcagatgaatgcgtctcaacccgtgcgaaaacgggcctggcagcagatagtgcaggccaagatcctggcccagggccgattgctgagcgaactgcgcggtacggacgccggattgctcgctttggccaataatgtgcgctcaggcgacccggacaacctcgaaggccaagcggcgcggcgctattggccattgatcttcggcgaggtgtcctttcggcgcgataacgatctggcggggctcaattcagtcttgaattacggctacagcgtgcttcgcgccatcgtcgcgcgggcgattgtggctgccggactccatccgtcgatcggggtgcatcatcacaaccgatacgacgcgtaccgcctcgcggatgacctcatggaaccgtttcgtccgctcgtggatcgtgtggcagccgccttggcggcgcagtatggttttgacctggacttggataaggacacgaaacgggcgttgttgtccgcgttcatgggccgctacgtggtggatggcgaagatcgctcgctcttcgaagtggcctcgcgcgccgcggtctcgctcgtcctcgtgtttcagggaagacgtaaagaactgttgctgcccgaaatctgacgaatggggcggcgg

SEQ ID NO: 4476 - DNA, 17481 bp, synthetic construct
  source 1..17481: mol_type = other DNA
  misc_feature 1..17481: note = Synthetic
gattaaatatattaatcatatgtacgagctcgaagctcatgcgtcctaacaatctttcatcgtacttaaccaaacaggttcaattataaccgctttagcagatttaatcaatacttttaccttagcatcatatgggacaattattttttcaaaccgacgggacgccttagtatcttttattcgcaaagtcaacccagccgccggcttcgataagcgcttgatcaaagtctgtaatcttgaagttgtagttcttagattttccggaggcgctaaactcggcggttttatcgttaatatttacttttacgacagtttctttgccgccaaagttgttgaaaatatcgtcgatatcctcttttgtcatttcggcggcgagcattccgcagtttgacatattttgcctgaaaatacgcgcgaagtttaccgcaaatactacgttgatatcgttgacttccaaagcccacggcgcatgttcgcgcgaagagccgcaaccgaagttttctctcgttacgaccgctctcttaccggatacgtcttttttcggatcaaagccggctagttttagatcttccagtagatacggcttcagcgccgctttagttatttccgtcaggtatttagccggaattatttcgtcggtatttatatcggatctatctaaaaataatacttttccgtcaaaattcttcatttttcgccccctttgtacaattttgaattggttatctcgcccgttatagccgaagccgccgcggtcgccggactcgcaagatggaccattccgcctttgcccattctgccattaaaattcctgttggtcgtcgatatgcacacttctccttcggccaatacgccgttactcataccgagacacgctccgcaagtcggattggttacgcagaaaccggcttccataaatatatcgattatcccctctttcatcgccgtcctgtaaataaggggcgtcgccggcgacagtatgcctcttaccgacggagatattttattccccttcaaaacttcggcggcaatcctcaagtcttctattctgccgttggtgcaagagccgatataaatctgatcgactttcgtccctttcatttcggctacggtctttacctgatccggtttatatccgaacgttacagacggctcgattttggatacgtcgatcttgacgattttctcatattcggcgtctttatccgatacccacttactatattctttaattgcagattctttatctttatagtcgttttttatgaaatcccagagataatcgaccgtttttgagtctggataacatattccgacggtgccgcccgcttcgatcgccatattgcaaagcgtcatgcgcgactccatagacatatcgcttataacgcttccggtaaattccataacgcaatcggttgcgccgtttacgccaatctcttttattatattcagaataacgtcctttgcgtaaacccccggtctcaaactacccgtcaactcaaattttatagttttgggatatttaaaagcgcataccccttttaatatgccaacttccagatcggtggtcccgactccggcggcaaacgccccgaacgcgccgtgcgtgcaggtatgcgagtcgcccataattatcgtataaccgggtcggacaaatcccttttccggaaatatagcgtggcatacgccgttatttccgatgtcgaagaagtctttaatattatgccttctagcccattcgcgcattattttaccctgctcggcggtttttgagtccttcgccggcgttacgtggtcgatgaccgctttgatcttatttggatcgaataccttatcgatccctctcgcctttagatcttctatcgctatcggcgtagttatctcgtgacaaaacacagcgtcgagtttcaaagcgtaagccccttcgaacggctcgtcgaccaaatgcgcgtcgaatattttttccgcaatagttttacccataataattccccctaaaattagattttatccataaaatttttcggcggagttaccgcccaaaaagctattaactccttatcgccaatatttttcaaaatatgcggtatgtccgaatcaaatgaaacgctatctcccttttctaaaatataagagtcggctccggtaacaaattcggctctcccttccataatataccccgtctctttaccgggatgcccgtattccgagcttccgcttttagagccggcttgaatcttaataacatatgtttcaaaagcgaatctctctttctcgtcggttgttctcgatatctgttcgtaaacgacgccgtcagccgcgacgatttttcttttgccttcgtttgagataacgacctttttagatttcttataatccgcaaaaagatactcgaggtcgatatcaagaacgtctgctatagacaaaagcgtatcgattgccggcgataccttatttctctctatttgcgaaataaggctatcgctcactcccgctttttcagctaaatatttcagcgtatactccttcctttttcgaacagctcttattttatcgccaaaataatacttcattatcccgcgcctttaactatacttaattcggtgaagtatagttaaagggttggaaaatgtcaagataaattttgtaaaaaagtatcccgtcagtttttggggaataaaaaatagttttatgtagagcagacgtatttgggataattttcgattacgagctcgtataatagtcgttttttgacggcgatactcaacagttgtgtcattttacccaaaaagtcatttttcaatttatcaatccttaatttcttaccaacaatctcaagaaatccttccaacccgtatttcataacgccgttataaaaaaacaagataatatctcgaaccgttgaagccataccgaattcgttatacaaggaatgccatctttttatttgaagatagtccgcttcgctgattctaaggtatttatccaaccttttatcgtcggtattgtctataacggcgtattcggagcgatgatttccgattactctcttcatttttgggatttttttgtcaataagccgaaacatagtttcaaacagtttgctgaacgtattaattttgaactcttttagtaaaaaatctatgacattcttattcatagattcggatactataaagtgaaatagatgttttttgtttttcataaagttttctcctttttctttgtatatatatataacacctaaaagtagaaaactctttacaaaaatttgcataaatttttagaaaatgataattaatttactaattaaaaaaaatgacacatatgcgtcaattttccctctactttccaaagcgctaagggtaatgaagttactttatccgaaaatatctgttccatatgtgtcaattttttatcgaggagcgccgcgcgacaattgtcgcgcgttatcgacgcgactcatatgtgtcaaattctcttttcaaaaaaccgacgggcgcaaaaacaatgaccgtttataaaaaaaactccgcctaagcggagacataggtcgaaacgaccttcggcatatagccttattgcgataagatctttgataaagagataataataaaaatatttataaaaatcaataaaatttaataaattattttttattcattatgttataatagtttatttgataattttgggggcgtttaatgggaaaagttttaggactcgatctcggaacaaattcgatcggctgggcgattgtcgaagaggagaggggtgaacataaactaatcgatagcggcgtatttattttttcagagggggtaaaaattgaaaagggagtcgaatcgtcaaaagcggcggaaagaacgtcctttagacttgctcgaagacaaaaattcagaagaagattgagaaagtatgaaactttaaaagtattaatagaaaacaaaatgtctcctttgactttagaagaacttgaaaaatgggcaaaatataaaaaaggttttaaaagagagtatcctaagagtaaagattttttggagtggctaaaaactgacgaagcgacaaacaaaaatccttattattttagagcgatgtctgcaaaaagtaaattaccgttatacgaagttggcagagcgttatatcatatagctcaaagaagaggatataaaagcaatcgattagaaacgacaaaagcaaatgaggacggaaaagtaaacagcggtataaacgaaataaataaaaatatcggaactcttactttaggcgaatatttttacgaattgtataaaaagggagacaagatacgaagcaaatacacgtcaagagaacaacattatttatcagaattcaaaaaaatatgcgaaattcaacaattttcaaaagaattatctataaagctggaaaaagcgattttttttcaacgaccgttaaaatcccaaaaaggattagttgggaaatgcgtttttgaaaaatcaaaaccaagatgtcctatttcccatccattatttgaagaattcagagctttacaatttataaactcgataaaagttataaatgaaaaaaggttcttaaacgacgaagaaaaattgatgataaaacctctgtttttgagaaagtcaaaaccaaattttgattttgaagaaattagaaaaaggataactaataaaaatagagatatgacgttaaattatacagattggactttagtatccgggtgtccgactatttctcagttgatagaaatatttggagacgattggataaatattaattttgaatacatcagagaaaaagataataaaaaatccataataaattatgaaactatttggcatgtactatttaatttcgacagcgttgaaaaaatcaaagaatttgggattaatcgactaaaactcgatgaagacaaagcgaataaactcagtaagataaaactaaaacagggatacggaagtctcagtttatgcgcaatcagaaaaatattaccatatcttaaagaagggcttttgtattcttactccgcgtattttgcgaatcttggcaaggcggttgatgagaaaaataaaaataagcttagcgaaataaaagaggatattaaatctctaatagacgtttttagaaattctaaaaaagtagaaaacataataaattcatatatttacaaatacagagaaaatcattttagtttaaaaatagaaaaagaagattttataaaaaagttagattctgagctgggcgaagattttatatctttgaatgaatcggaaagggtaacctttatcgatgaatatttttctttattggaaaaaatgattaaaaggaacgattttatcaagataaaacgacttgacgagaagataatcgagttattaaaggataaatacgatattcccgaacaaaatttaactaaattatttcatccatccgacttagatatatatccggacgctaaaccggctccggatggaaaaaaatatttggggtctcctcgtactcaatctgttagaaatcctatggcgatgaaaactctacatcaattaaaaaaactaataaatactttaattaaagaaaacaaaatatcgtctaacgatacaataaatattgaactgacgcgagaacttaacgatgcaaatatgcgagcggctataaaaagatatcaaaacgaactggaaaaaaacaaaaaagaatgcgctcaaaaaattaaagataccctcaaaattgaacctactgaaacagatatactaaaatatcaattatgggaggaacagcgccatatgtgtctatatacgggaaaaaagataaatatttcagatttcttatccgacaatcccatttatgatattgagcatactattcctcgaagtttatcttttgacgattcgcaagttaatctgacgttatgccataacgattttaataggaatattaagaaaaatatgattcctcaacaacttccaaatatagaggaaattttattgagaatagaacattggaaagaagaatatcaaaattttgaaaaacagattaataaggcaaaaaattcttcaaaaaactctagttctaaggaagataaggacaaagctatccaatggaaaaattatttgatattaaaaaaggattatctcaaacaaaaatacgacagatttttaataaaagatattccttcaggatttacaaatagacagttacgcgataccgccattataacaaaatatgcaagggcttatctaaaaaccgtatttgacgatgtaaactcaataaaagggagtatgaccgctcaatttaggaaaatatggggagtacagaacgaatatgatataaaatctagaaataaacatagtcatcataccgtcgacgctattgtattggcaagtattaccggaccgaaatacaatttgttatctaccttttataaagatgccgagcgaggtttaagaccgacattcaaaaagccatgggctacatttgtcgaagatataaaaaaaatcgaggatgaaatcatagtaaaacatcattttgaagataaaacgcttaaacaaagtaagaagaaattaagaattagaggtaaaataaagtatccggaaggtaacgacggcaagaataagccaatctatatgcagggagatacttttcgaggttcgttgcatcttgatactttctacggcgctattaaaagaaaagacgaaaataataacgaaaaattgcgttatgtcgtaagaaaacctgtaaatagtctgaaaaacgaaaaagagatagataatattgtcgacgaaggaattagaagaaaaattagggcggttattgagcgccgaacgactgacggtaaaagttttgccgaggcgatatcggaaactatctggatgaatgaagagaaaaaaatcccgataaataaagttagatatcaaatgacgaatattgcaaatccgataatcttaaagaatcatagagataaatctaaggatggacaggagtataaagaaaatatctatgtaacgaacgatagtaattatatgatggggatatacgaagggacaatcgccaataaaccgaaaaaagattttatacttgttagtaactttgaactcgcaaagtcaaaaaatacaaaactgcccgatgaaaaaaacgggcttcaattacgtcagaaattaaaaagaggaatgatggtattgttatatgaaaacagtaaaggagaaattgatagcatcaaagataatgtaaaagaactgtcaaaaagattgtataaaattatcggtttttcgtctatgaccgcgcaaaagaagtacgaatatggtagaatttctttgaggcatcatttagaatccagagcaagtatagaattaaaagaaataaatatctcttttaaaaataatgaggagtatattccgcaaagaatgttgttacattctcaattcaaggccttaatcgagaataaagatttcctgataactaacgacgggaagataaaatttattttttaacttttgtattccgattatgaaatttacggaataatcgggaaaaagttatgttaaagaagacgatttttttctccacgccttgttatcttcatatcaagaactcccagttggtatataaaccgcatactgacgaaaaaccggagacgacttttccggtagaggatatcggatttgtcgttatagacaataggcaaattagcgtatcgatgtcggttttggagttactgatagagaacaacgtcgccgtcgttttttgcgattcgactcataatccaaaaagtttgttgctaaatctcgacggcaaccatatacagagcgaaatattctcaaatcagatcaacgcatccgaaccgctaaagaaaaagttgtggaaacagactgtcgaagcaaaaatagacaatcagataagattactcaaaaaattgaataaagattatatcaaactttacgaatataaaaactcagttaaaagcggcgacgcggacaatcgcgaagcggtagcggctagagtttattggaaacggctattttcagatatcgagtttaaaagagatgtcggaggagagtttcctaactgcgctctaaattacggttacgccgtagtgagatcggcggtcgccagaagtttaacgggatcgggattattgccgacgcttgggatacatcattgtaatagatataacgccttttgtctagcggacgatattatggagccgtttaggccgtttgtggacgaggcggtttacaatatatctgtggaacgccccgacgctaccggattaacaagcgatatgaagaaaaaactgcttgaaattttgacagtagacgctgaatatcctaacgttaaaagaccttttatggtcggattgtcgcagactaccgcttcgttagcgagatgtttttcgggagaagataaaaagataatttatccgactttggagtaggaggatggcgcagaattgtttaaacgcttataaaattatgtggttatttgtgttttttgatttgcccgttgcaaataaaaaggatcagaaaaacgccgctaaattcagaaaaaatttattaaacgacggctttacaatgatgcaattttccgtttatatcaggcattgcgcaagtaaagaggcgatgaagactcacgttcagagaatagaggcgtttataccgccgaaaggctcggttagtatggtttcgataacggacaaacaatacggcgatataattaatttttgggggcaaaaagaggcgcctaaaccgcgtcaaccggttcaattagaacttttttagccgaatttgacatatttcaaaaaaagcgctatatttccgtattaatcggaattaatacaatgaaatatagcgaaaaacttgactgcgacatggtaaatctcacaaaaacttggcttttttttaaagcgaatcgcgctgcaattaacgataagatatatagttacaatacgactattataccatatcaaaatcaaagatcaaaccgcaaccccgatccttcacgcttgccgcctttcacgattataccatatcaaaatcaaagatcaaaccgcaacccaaaaatttataacaaaggcaataattttattataccatatcaaaatcaaagatcaaaccgcaacccagtctgagccgttgggaaggtgtcataaattataccatatcaaaatcaaagatcaaaccgcaactaataagccgcctcaaacgccgcccgatttattataccatatcaaaatcaaagatcaaaccgcaacttctcagcgcaggataaacgcctttctattattataccatatcaaaatcaaagatcaaaccgcaacaaagagatatagacgacaacactacatcggaattataccatatcaaaatcaaagatcaaaccgcaacagtgtcaaggcgaggagctgtatttcaagaattataccatatcaaaatcaaagatcaaaccgcaactccgcgtaactattcgcgagatagccaaaattataccatatcaaaatcaaagatcaaaccgcaactcggagcttaattatataccgctttttagtattataccatatcaaaatcaaagatcaaaccgcaactatttctaatattctttgcgatattttttaattataccatatcaaaatcaaagatcaaaccgcaactagcaatcttccgcatatatcattttcgctattataccatatcaaaatcaaagatcaaaccgcaacatattcatcaagatatagaaaatcagaacattataccatatcaaaatcaaagatcaaaccgcaacagatatagcggacttcgtcgcaaaaggtcaattataccatatcaaaatcaaagatcaaaccgcaacttactgtcgtatcgcttgtaatagtcgccgattataccatatcaaaatcaaagatcaaaccgcaactgcaagaaattaattaaaactgttgattttattataccatatcaaaatcaaagatcaaaccgcaacttcatttaatattttaatattattttttaaattataccatatcaaaatcaaagatcaaaccgcaaccacgctacaagacacctcataagttatgctattataccatatcaaaatcaaagatcaaaccgcaacttgaaaaatggacacttatccaatattttaattataccatatcaaaatcaaagatcaaaccgcaacccgccggcaaactttcaatctgaatatttcattataccatatcaaaatcaaagatcaaaccgcaacttcgattcttttcttctcttcttcctgttgattataccatatcaaaatcaaagatcaaaccgcaacttaggttctgttgttgctggtgtcggattaattataccatatcaaaatcaaagatcaaaccgcaacattgcgtgaatagcagagccctcttttagaattataccatatcaaaatcaaagatcaaaccgcaacctatatagaacaacagaaagaaattcttgaattataccatatcaaaatcaaagatcaaaccgcaacccagcgtcttttattccctccggcaaataaattataccatatcaaaatcaaagatcaaaccgcaactagattctatagctgctttgagtttctttattataccatatcaaaatcaaagatcaaaccgcaaccttccagtgtgacttccatttttaaaacctcattataccatatcaaaatcaaagatcaaaccgcaacctacgacaaagacaacaactattcagaattattataccatatcaaaatcaaagatcaaaccgcaactagattttttttgtccaaagttttgacctcattataccatatcaaaatcaaagatcaaaccgcaactactcgaagagagtattattttggaggcaaattataccatatcaaaatcaaagatcaaaccgcaacgatatacaactctctaacagatgcaatccattataccatatcaaaatcaaagatcaaaccgcaacacctcagaactcattcgctcgccattctcaattataccatatcaaaatcaaagatcaaaccgcaacaaagttttcataatttcgacagaaatattaattataccatatcaaaatcaaagatcaaaccgcaacagagcggtttccggtattttgctatttaagattataccatatcaaaatcaaagatcaaaccgcaacttcccaatataattagcagtttatcgccttattataccatatcaaaatcaaagatcaaaccgcaacttttagttgctttgttcttcctttatttagattataccatatcaaaatcaaagatcaaaccgcaactaagcgaagaagaaaaactcgcgaaattaattataccatatcaaaatcaaagatcaaaccgcaacttcacaaacgaattgagcttcacctcaagattataccatatcaaaatcaaagatcaaaccgcaactccattagtttagactctacctctgtcggcattataccatatcaaaatcaaagatcaaaccgcaacgcacttcaaaatcgtgtctagcgtaatcggattataccatatcaaaatcaaagatcaaaccgcaactcttcgctatacatcacaaaactcctttcgattataccatatcaaaatcaaagatcaaaccgtagcatgacttcgctattatctatggttacttcgattggcatggttttttccttttttttgtatcccgccagttttttggggcgagagaaaatatctgtttcatatgtgtcaatttattttcggtatcatatgtgtcatttccatcgatgagcggcgcggcgcatatgcgttaatttaccaatggtaataaaaacatctagaaaaatcaataaaatttaataaattatttttcatttattatgttataataattagattaagacgatacgtttctttataaagatgaaataaaaaaaaggggggagataggaaaatggattatcaaaaactattggatataagcgatgattggctaaaatatgcaatccgtctcaacctaggggatgaacctaaagacgatctcgttgaaatcagaaacgcggcgttggctgatagccgtataaaaagaaatcttgcggatattgcaaactttcatggaatcccggtaacgaatcataagaatcccgatttgccgatacaaaaactactgtttctgcttgacctcggatttgatgcgaaagttccggaaatcaaaacggctattaatgaaatacttcaacgccgggatgagcgcggcgtttatcaatccatgactaatattccaaagcattttggcggcgcgggcgaagacgtattcagctggtgtttgtgcgacgcgcctttgcttttgcttgctctgctaaaggcgggggcggattatcataaatacatcaaacccggcgttgattatctggcatccctatgccgcgataacggatttccttgcgccgtatcgcccgagctgggcaagtttcgcggaccggggaaaaaggacgactgctgtccatatgcgacgttgattatggccgatttaatgtcgcatattccggaatatagggattcccgggttgccgctttctctgtaaaagcgctgctaaatttatgggaaaatagccttgattggcatccgtatatgttctatatgggctctgattttcgtaagttgaaagcgccttcgctctggtatgatatcgtcggcgtagccggagttcttagtaaatacgaatttgcgcgagaagacccgcgttttcttgaaatgattaatcatataaaaagtaaacaagataagaatggttttttcacgcccgaatcggtatacctgaaattgaaagactgggattttggacagaagaaagcgccgtccccttatttaacatacctttgctatcaaatttttaaacgtttggaataacgggtatgattgacgtagctattttttgtattccgttagttttttggggcgagagaaaatacctgtttcatatgtgtcaatttattttcggtatcatatgtgtcattttatttcccatccccaaaaaccgcaactatcttgaaaactctttactcaacatcaacagaaaataaaaaagagtttgccgacggcgttaggcttcctcctgactaagaaaaaggatttattgaaagatattaaaaactatgatacaagtaaaagtatggaagaaaatttactctctccgataaaagcggctaaaacaattaaagaagcggagtctattgctaataaaatgggagtagacgtcgtttataacgacctaaaagtctcaaattatgtaaacgaggcgctagagttgataaagaacaaaaaagaagttttacccaaaaaggttgtttttgatgtaaatattttcaaaaaaggatttgggaaaaaatatataattttccctgcggcatttcacaaagaagataattttatttatattaatactgatgccgaattatttgaaaatttaaataataaaataataaaaatgaaaatagacaaaatgtggtctactcgcgagaaatcgcatttttttatacatgaatatagtcattataaatggtttaataaaaataaagatatttatttaaaattagaaaaggagaattttacagataaagaacaaaaactaattttagataatttgagtagttatgccgctgaaaataaaattgaatttattgctgaagtcgatactttaattttctttaattatattattgacaaaaagataaaagatttgtatattaatattataaaggatttttaaaaaaatgttgtcaacttatacttgttttgactgtgaatattataaccattataaattagaccgtacttgtaaggcgtttccaaaaggaattccttttgatatctcaatcggtaaagttgatcacaataatgttttaccaaatcaagaaggaaattatattttcaacaaactgtcaaacgatgtgattgaaagattagtcgagaaaattgataataaaaataaatatgacaaacgccggaaagcgtcgtctacaaaacagaaagaagaagatgttattgtaaaataatcgcctaattaaacgacttgaaattataccatatcaaaatcaaagatcaaaccgcaacatggcttcgctattatctatggttacttcgattggcatggctatttttcttttttttgtattccgtcagtttcttggggaataaaaaatatttgttccatatgtgtcaatttttttgagacaggctcgcgttatccatttccatatcccaaaaaactgacggattacccttttttttatttaatcgccttgacttttaataaaaaaagtcttatctttagtactggtagggaggatacatgagaaaactccagaccccaaaagccctcttgtagagggtttttttatttttacaaccattttaatatatcctcgcgggtatatcttagtattttattataattataccatatcaaaatcaaaaatcaagccgcaacgaacgcgcattgatttcgctattatctacggttatttcgattgacatggctatttttcttctttttgtatcccgtcggttttttggggcgagagaaaatacctgtttcatatgtgtcaatttattttcggtatcatatgtgtcattttatttctccatccccaaaaaccgacggaacgctaattttcagataatactcttgagttttcttaaaaaataaactataaattttatgaggagataattgtgaaagtaaaaaactcggacgacaacaatatttgtcaagagtgttattcaaagtataaaagaatcacccctttaataaacccggaaagttgtctacgaaatcatagacaatatatatgttcaacttgcggtagacatatttgcgcggatatagacggtaatggtagatttagagcgcttttccccttcaaaactctagaaatagctaagttgtatctacgttcggctgaagttatattagaaaaagcttgcggaatttatgaaattgaaaacgataaggggaggaagttttttaaaatattttcttcggacgaagatatgaacgcttacctttctaaaaacagaggaaaaaaatgtaaaacgcaaaaacctttattcaagacggaatattataaaaattatgaagataatcagttgcgtaagatttccgccaaggagaccgatatttatatggaagagaaaacgagggagtcgccggaatggagtaaaatataatacggccggcgttatttgagaggggagtttttggatttatatacgaagttaaaagatctgatatttcagtttaaggattatttgatatccgaaaagaagttgtcagataacactaattacgcttattacgaagacgtattacagttttacgaatatcttaaagaaaaaaaagcgggcgagatgttagattattttactttagaaagtatagacggttttttggtatggattttaaaaaaaggcttatcggcgcgttcgatagcccgtaaactttcgtcgctatctttgtttttgaaatttcttaaaattgagaaaatcatcgacgacaatccttcgggattaattaaccgccctaaatattctaagaaaaatccggtttacttatcgctggacgaggtggaaaaactgataaattattttgatttatcaaagcccgaaggggttagagatagaactattgttgaattgatttatagctgcggcttgcgagttagcgagctctcggatttggacgtcggatcggttcgatttaaagataatttacttcaagtattcggtaagggaggaagagagcgttacgttccaatcggcgaaagaggattgggggatcttaagatttatcttgaaaaatccagaccgttgttgttgaagaataagaaaaccgacgctttatttttaaattaccgcggcgaacggcttaccagaaaagggatatggaaaaatttgaaaattgccggcaaactagccggaatagataaggagttttgcgttcattcgcttagacacagctttgctacgcatctgatccaaaacggagcggacgttcgggcaattcagttgttattggggcataaaagtattaatactaccgagatatatacccatctcgatttttctaatctcaaagagtcttacaaaaaatatcatactcatagttgaggatgtatcccgtcagtttttggggtgggaaaattgacacatatgaaacaaatattttaatcagtgaattatttgtctcaatccgacgcatatgtgtcattttaaaggaactgtcccaaaagttgtcattcctccccaaaaaactgacgagttatgttgataactttatttttcgataatttttacttcgataaagcgttcgttatccggcacgtcgtttttgtagatacgcgcgcttgccatgatccttactctttttggcatcacgccgcgtttgataaggtagtttctaatatagttggctctgctttttgataattctatctctttgtcggggtccccttgatagtccgaatagcatgagatcgcgataccgatacgcgtttgccgtaaaatctcataaattatatcgatttgttcaaacgaattttctatcggcgttccggaattttgcttaaaagatattcttcgtataggaattgtatcgcctatttttgaattaataaatagcccgtaagtaacgtcaaacaagcttggttcgaatagagcggccatcgcgccgtcgtcgccggattcgtctatggaggcaataggaacgcttatatcttcggtcgcatctttttctgtaatcataaaggaggaatcgacgtcctctgaggattcgatattcaacggctcgttatgcgacaattctacatatcgtctgtttactacgccgtaatcgtcaataaatctcggaattttaagatttagagaaattccggatttccagctaaaaaataccgtattaagggtataataagagttgttttgataaaccagccccaaatctgaaaaaagattgataaaattgatgttaggattgatatttatacgtaaaaatgcgttataaattccagatatgcgagaattttctatgcaaatatccgcctcgttgttaatctgaaaatttatatatcgattgttaattttcagatataaattgaaagtagaagagatatcaagcgcgtatacgttactaaatctttttatttgagaatattcgagagattggttaaataaccctatacccgagccgaattcgatagaaatataaggatttatattgaatttaggtagaattctaaattttaagatattcattccgcaatttgataaaaagtgcctgtttgtataggaaaaataaatttcgtcgaatgaaaatcctaattcaaaaaaactatattgaaatccgggttgaactattccgttgaaagatattatataattttcgctaaatccttcataagtcataggaacggaactaaattccatatttaagataaaatttatctctttttcag

SEQ ID NO: 4477 - DNA, 15415 bp, synthetic construct
  misc_feature 1..15415: note = Synthetic
  source 1..15415: mol_type = other DNA
gggacatctactattactcttgcaagcgcatcacgaacgggatatcgttttgacggatggtggactggacttgaaggaggaacccaaatcacccaaatagatgagggcagtttcggcgacctaactgtatacgccaggtggtctatagactttagtgatgacgaaacagggattacagttggccaggggccaggcggcgaaattgtagttactgtcccaggagatcccggcacagttataactatcaaccccgacaataatcctgcggtcacaatagtccctccgaatggtgatatcatcgtcgatggaccaagccaggatggtgagataactataacaatcccaggcgattatgacgacgaagaaacgattataattgtccgcccaggcgaagatccacccgtaaccgtgatcccgccagcggtcaggttcaccgtaacatttgattctctcggtggaactcccgttaatttccaaagaatcatccagggcgagcaagcggttaagccaacctcaactcggactttgtacaggttgcttggttggtcacataacggcgaaatattcaactttgctacttcgattaccgaggcaaagacactttatgcagtgtgggagcgaatcaatattgatgatggtgacactggaatcgtcgttaaccctggtgacgacggcgagatagtaattacaatcccaggggagggcggcgaggaagatactataataataattcgcccagacccagataatgatgaggagcacaaagtaataataactccgcccagtggcgacattacggtcgaggatgatggggatggtaagataactataacaatcccaggggagggcgatgaggaggaagtaattattattgtccgcccagatgaagacccgcctgttattatctatcctcctgtcatcagatttactgttgtgtttgatccactaggcgggacagctgtgccttcgcagcgagttatcaaaggcgagcaagcaactcgctcaacatcaacccgaatgctataccgtcttcttggttggtctcatgatggagaggtgttcgattttgaaactcctataacccaggccaagacactttctgcaatctggcagcgaatcgacatagacacaggcgatacaggtataattatccagccaggtgacgaagacgataatgatctgccaggtgataacgacgacatcgtgattataatcccgggtgccccagacacgataatcatcgtcaggccagaggacagtgaccctgtaaatatatacccacctaacgatgatatcgttgtcgaggatgatgacgataaagagataactataacaattccaggcaattatgacgatgagtatgttataataactgttcgcccagatgaagacccaccagtcacaattcaagaatcaacaccgcacttcacgatatcgtttaacagcgagtgcgagattgaaatcccgtcacaaagagtggtaattaatatgcctgccgttatgccaacccctacgcgaacactccaccgcttggttgggtggtcgacccaagaaaatggcgagaatcgcgagatatttgacttcagcacaccaataacaagtgctcaagcattccatgcggtatgggagaggatactaatagatgacgggggaacagggataattgtaaagcccggtgactccgaagacggtgaaaacccagggcaagacgatgacatcgtcataattatacctgacgatgatgaagccatagttataataattcgcccagacccagaaaacgatggtgaatataaagttgtaatcagtccacctaacgccgacatcgaggtagagggtggggaagacggtgaaatcatcataactgtaccaggtgaagatgacgggggctgtacggtaataattgtccgtccaggcgaagatcctccagtagtaattattccgcctaataccgacacgaatcagggtggcgatgacaatgggaacttcttcacgaacaactggccttggtttgtcgcgggcttctgtataatatcgttacttattttgattggatggattattcacaaatcaaggcgtaagaataattctaacttataaaaatgcttgacaggagggttattatctagtatggtgattataccatatcaaatcttgaaggttgctaagataaggtcttagaccgtagagctctacaaccccgcaaggggttgtatctttttgtagaatgatgtatgatttatcatgaaatatagaatcggattggatataggagttgcatcggttggctgggctgttctagaaaatgacgaacatgatgaggcgagcaaaattgtagcaagaggtgttagggttttcgatattccgcagaatcaaaaggacggaggctcgcttatggctgagcggcgagggtttaggagcatgcgccgaactctgcgccgtcgaaaggtgcgcgtaggacttgtaaagcatttgtgcgagagtacttttaatatagctttcaaaggaattttggaacagcagaatctgccttgtatatattctatcaggcttgacgctctttcgaggaaactcgaaattgaggaattcgcaaggttgatgcttcactttatccatcggcgtggatttttatcgaatagaaaaaatatcgaaaaaggcagcgatgatgggaaagttcttgtagggataaaagataacgagaaagtgttgaaggaaaagggttacaaaacaataggtgaatattatgtcaaagaatttatttcaaaaggattaacggtccggaacaagtctgggtcatataattgtaccttcaacagaaagtcaatcgaggatgaaataaagttgatattcagaatccagcgtgaacttggatttgatgcaaatctaatcggtgagaactttgaaataagatttctagagctattcaacaagcaaatcccctatgatatcggacctggtcacccaagcccatatgcgattaacagttatttagatgcagtaggggtttgtgaatttgatgggaatccccgggcataccaggcaactaatgcagcggagagatttcgattatggtcaaatttaaacaacctggttcttgtaacacgcaccgagaagacaatcaaggacagagagttaaccttgccagagaaagaaagtatcgcagaatattgcttgcacaaaggcgggaaagtcacatatggcatgctgaggaaaaaacttgggctcggggaagatgtacgattcaagcacctaacttatgttaaaagagtaaagacagaaggcagattccaagtccaagaaagcgagcctgtcgaagtcgagaagaaagtatttgtcgatttgcgtggaagaagtgcagtaaaaaaagtattcaaggacaagttcggagaactgacggacatggaaattgatacgataattacggtcttacatgcgtatcacagcgaagacaggctaaggatggcaattgcaggggagttggagaacggcagatttacccttgacccagagtacacagactatgttttaaatatccaactgccccaatcaaagcctacacatttatcgacggagataatttataaaatcttgcctcatttggaggctgggcataaatattataaggcgatggagcttgcggggtttaatcatactactgctagtgaagtcgaaaaaaagataaagttgagtctgaaagacattgaaaaggaaattcgtaatcctgtggtattgcgttcggtgtcccaaacaataaaagttgtaaatgcaatcattgacaagtacggttcgccccaacaagttattgtcgaagtagcaagagatttagcacgtgatttcagagagcgccaaaaaataacacgggaaaatgaagagaatcaggcaaggaacgagcgtatcaagaagcaaattatggagcttgggattttggtgccaggcggcgaggatattgtaaagtataaacttgctcaagaacaaaattgggaagacccctatgacggggggcgtaaaatcgacgcggaaaagttgttcgaaccaaattatgttcaagtcgaccacataattccatacagcaaaagttttgacgacagttatgcaaacaaagttcttgttcatgcggcaagtaatcaaaacaagggaagtcgtacgccattacaatttctaacgggagatagagcacagatgtttattaattgggtaaggagtgcaaaaatttcaccgcggaaacggactaatttcttaactgtagagccaaaggaagacgagatgaaagagcgcaacctaaaggatacccaatatataactaagtttatcaaaaactttcttgaaaaacatctgtatcttgcggacagcaagcatggcgtacctatcaaagcgatcaagggtggaatgaccgctcacttccgaaagcgtttgggtcttaataaatttcgtgacacggacgagcaccatgcaacggatgccattgtcgttgcatgcttcacagataaacttgtcaggcaaataactgaattttctaagagatacgaaacaatttacgagaagctgaaatttccagagccctgggacgggtttcgggacgagctacaggcattggctcctgtatcggtttcacgaatgccgaacaggaaaataacaggacccggacacaaggaaacggtgcggggccttgtaaaagaattagatgtcaaaggcagagaaatttattatacaattacgcgtgttccacttgcgaagttaaagctaaagaacggagaaatagagggatattacaacaaggaatctgacataggcttgtataataaaataaaagatgttttgttgacgaatccagaaaaagacttggaagctgcattttctgggtttcgcaaaccaaaagctgatggcactgatgggccagttgtacacaaggttaaaattaaagcaaagaccaccaattttgtgactcttgatagagttggtggcgtcgcggacaacggttctatggtccgcatagacatttttgccaaaggggacaagttttactttgttccaatttacacggcggatttttacaaaccacaacttccaaacaaggcatctgtttctgggaaaccctatgttgaatggctcgaaatggatgaagggcttggtttcgagttcaagttcagcctgtattccaatgacatatttcatgtcgccgagtatggatttttgtactatcgaggtgctgatatcagtagtgcaagaatatcggctgcttaccaggatggaagagtcgaggatggaaagcgaatccagataaggatgggtatacaaaaattacaagaatttagaaaaatggaggtcagtgttttgggcgaaatcaaggatgcaccattccagccgcgtgatgtcaggacactgttgggcccaagatccaagaaaaaggagaaatagatgggcttcttaaatataactcttggcgatactgtgaagcatttctccattaagaataaccaattgcaagttcaaactgtggacagcgagcgtcaaattcctcttagagatattaacagtttaataattgaaagcagcaaaataaactgttcggtctatgccctgcaggcccttgttcgggaaagggtagcggtatatatgtgtgaccatttgcatttacccaatgcgatgatattgccatttaatgatcattacagtcagttaagagtgtttaatatgcaacaagacgccccccgcccattggaaaaacagctctggcaggcaatagtcaggcaaaaaatattaaaccaagctaggtgcctagctttgttgggcaaggaagggcatgatgaacttgtcgaaattgcaaattctgtgaacagcggtgataccaacaataaagaggcacatgcggctaatttttattggcgcaaatattttgatggcaaatatgggcggaatacggattgttttgctaatgatttgctgaattatggatattcacttgttcgtggacaaatcgctcgcgatattgtcgctcatgggttacagcccttcatgggtattcatcacaaaaatcaacttaatgcattcaatctggcggacgatctgttcgaaccttttcgcccttttgttgatgcatttgtgtctgaaaattttgatttttcggacaagcgtgtactgcctgaacataaaagaatactcatgcgactgttgaatttggctgtgactataaatggagaagtacacagtttgccaaacgcaacgcatgtgatggtcgagtcatttgttgcaagccttagggataaagccgtgaaaataattttgccgatattggcggaattaaaaagttttaagtatgagtagatttatgagagtatttgtgatgtttgatttgccgactggtacaaaaaaagagcgtggcgaagccacaagattcagaaatgcgttaataaaacacggtttttatatgttacaatattctgtgtatgtacgattgtgtgccaatgttgatgcggcaaaggcttcggctaatactgtacacaagctcatacccatgaaaggggctgtacgcattatgatagtgaccgaacgacaatacagcagcatgtatgttttgctggggccaaagcatcaccaagagagtttcctggacgatgacggcaatttatttttataaaaaaacttgtaaaggagggaaattatgagaatttgtatcttttttgaaaaatcgaaaatcggtaccggcctatatgttgtattacccaatttgcaatgccaacaaaaaacaccatatttggtgttttctgcgtctcagtcacctagtcgattgtaccataccaaatcttgaaagggaactaaaacgaagtgctttttctggtgactagccattacattgtaccataccaaatcttgaaagggaactaaaacattgaacgccgtcgggcttgctatacgggcattgtaccataccaaatcttgaaagggaactaaaaccacagcatgacaacacaggcacacacagacattgtaccataccaaatcttgaaagggaactaaaacccatcaaggtcgtacggcgataacacactaattgtaccataccaaatcttgaaagggaactaaaacggataaaaacataataatatataacacaatattgtaccataccaaatcttgaaagggaactaaaacccagttatcccaaacgctttcccatgggacaattgtaccataccaaatcttgaaagggaactaaaactgattctgccgctctcgacatcaggctccaattgtaccattaaaacacccacctctgtgaaaacgcaagaaaaaagagtgactgacgcaggattcgatcctatatcgggtcacttcactcttgaccctattatacgccaaacaccagataaaagtcaacttaacgatcccatcgttctcgctcatcatcaaagtcaatgtccctgttggtataatcaacaccatcatcctgatgaggatggattatatctcggttcaaccagtagggttttctcagcgtcgtaagacctttttgtccgtgatcgaacttcttgttttcatagtctgatatttccaaatgcaagcggtctttctcccttcgctcgcgatttctatcaactaggtggcttgttatagcacgatgtatttgttgtccaagggagcgcaggttcaagccattggtcaagtattccctagcttcgtctgcaagtccctctagttcgctttcaaattcaatttctgctaattgcattttaatatcgctgaagaagtcatgtgttgattcggctaaatcaagttgtccccgcctgaccaaagtatcataggtgtcggttgcaattgcatcaataaccatgaatccagtataagccacttgacgagttttgtcaagatgtgtataattctgtcatgtttaaaaaaagaagtaagcagttcaagatagcatactggtcgattgtagcagttttggttgtcctgtttttcacggctggaacaataagttacgcgatatttggtgatgttgccttcacaagggcattgcagggcagtacccttgatatcactaacataggaaacttcttcagtaacaatatggagagggttatctcggtcctgtcgaccttgtttattgtctttctggttataaagtttttccacatcgttattcgtcttatgtctcttaaggcctctaatcgcagaaaaacaatcctagcattggtttacagctttatcaagtatacaggaattatcatcatgttctttgccctattggcattggtgatggaagatgttggaacgcttctggctggtgctggtgtccttgttattattattggtttcggcatgcaaagcatgcttgctgacatcattgcgggactgtttatcattttcgagaacacattcgaggtcggcgatatcgtaacatttgataatttcaggggcgaggtcgtctacatcggaattcgaacaacaaaattcaaggggattgatggcaacatccatgttgtgaataactcggaaatgcgtcgtcttgttaatatgacacaggacaattccgttgcaatctgcgatgttacaattgaatacagcgaaaatcttgaaaagattgaaaagctaattgagaaccacctgccgaccctgcctgcgaaactagagcaaatagtcgaacaacctgcatacatcggccctgccgagttcaacgaccgcggaataactctgcgaataatagccaagtgtcacgaatcaaatcgaatgatgttaacgcgtgcacttaaccgcgagatgaagatactctttgacaagcataaaatcactttcgccgttccacacattaaaattgatggcaaggtaaaatgagaacattacctaactatatccgttcttgtatttgctcggtttcggcgatttgcctgatacttatattttcgtgcaggacattccctaaggtaatattgttcccatcccttgcacggaagagattcgcttctttgtccagcatcaggtacatcctctggaaatcctcgatttctcgtggctcgatgtttaaattaggaaatgcctctattacttcttttacggcttgtctgtattcatcggtagaaatgtcaaattgttcaatgttttttgcacctgcaccttggacagggaaaaattgacgcagcgaccatttatcaattttaagtccaaaattattttccagatgagtaagatattcgcccatcttgaccaggttgttcatactatgaatttgattccaaatgttttgtttatggacacaggtgtttattacgcaccccacgccggcattggtgacagtttgtatctcgtcgaatatgtttgctccattttcttggctgcctctgattttacgctctgactctcgtgtgccaccttcaaagggaattgatacttgtgacaagtaggggagaatcttctgatataatccaaacctatgaaaaataccagtatgtcttaggccactgcctgtgttaaggcgaatatttttaatgccgccatcatgcagatatttaatcaactcgggcagatgttccaacatcattggttccccacctgcgatagcgacttcgtcaacttgatccgcgattattttatcagcaattttaaagtggtcttctttggtcagggtgtctttccccaagccaccaaaacaatagccgcacctttccgggcattgaccagtaatattccacgacaaagtaacggatttagtttccattcagaaacattgtaccgcaatcggttgacaaaagctagacctttgtcgtatactggccccatgagctttgtcgcaaagacccaaaaagtgggagcaagtatgtattattatctgtcgttacaataagcgcagattattttcaaaatttgaattttgtcaaggaactgcgtctaatcgcagtttttctttgcaacaaagttcaaatctaaattcaggagacagaaatggaatttccattagaaatgcataaggccagcataattaaaaaactggaactcaaaccaatagacgagaggctaagggccatcaaagtggcgggcaacaatacattcatgttgtccagtcgtgatgtattcttggacatgttaacagacagcggcacaaatgccaccagcaatcgccagcttgccgcgatgttaaccgcagacgaagcctacagcggcagcgagagtttcttccgccttgaagccgttttgcagaaggtatttcgcaagaagtttttcttgcccgcacatcagggcagggcgtgtgaacatatcctatcacgagtactaatcaagcctggtgacatagttccaacaaattaccacttcacaacaacgcgggcacatatcaggttgcaaggcggggattttctagagttgttcattgacgaggcaatgaaaataaattctaatcatcccttcaaaggaaatatagatattgacaaactaaagcaggcattcaaggaccacaagggcaaaatcccctttgtgcgcttggaggcgggaacaaatctgataggcggtcaacccctgtcacttgagaatatccggcaaaccgccgaactctgtcgcgggcacggtgtgcccctaatgatggatgccagtttattgcaagacaatttgtactttattaaaactagggaagaggcctacaaggacaaatctatcctggaaatttgcaacgaaatcgcggacatgattgatattatttatttttccgcacgaaagttcggtgcggctcggggtgggggaatttgcctaagtgatgaaaggctcgcggggcagatacgcgaacttattccattgttcgaggggtttataacctacggaggcatgagttcaatggagctcgaggcaatcgccgtcggagcagaggaaactatggactttgataatatctcgcaaggcccccgatttatcaagtttatggtagatgaattggtaaaagcgggtgttcctgttgtgacgcctgcgggtggcctaggtgttcacttggacgcacggtcgttcttaccgcatgtaaggccccaggagtttcaggcggccagcctcgcatctgcactatacataatctcaggtatacggggtatggaacgcggtacaatggccgaggatcgtaatcccgacggagcagaacacattgcgaatctagaacttgttcgccttgcaatgcctaggcgggttttcaccatcagtcacctaaaattcgccatcgacagaattatatggttatggcagaacaaggagcttatcggagggctaaaatggcacagcgaaccaaagatgttacgattcttcttcggcgaattagatactgtctcagattggcaggaaagattagttgaaaaatttgaaaaggaggggtacaatacactatgaactttacgaaaattttgtttgatcgctttaatgcgaactggaaagatatagatataaaaagccttctacgggtcaaggccaggactgtcctaccatccatgggggacatcgacctgaaaaagcctcagagggtcaaactgggcatcgacccaacgggctccgaaattcatatcggacatttggctccgttgttcatccttgatatttttgcccgtgcggggcaccatgtcgactttgttattggggatttcacatgcaagatcggtgatccaagcggcagggtatcggagagggagattttaaccgacgcccagatcgcaaaaaacctacagacatacatcgaccaggttaatcgttactttgatgtatcccgttgggcaacaccacgcaacagtgaatggctggcaaaaatcactatggcagagttgattggtattacccagaatctaaacctggcaacgatcttgcagcgggatgactttcgcaagcgactggaaacgggtggaataacaatggccgagttaatgtatggaattatgcaaggtatggacagcgtcgctctgaaaacaacaatcgaattgggcggcaacgaccagttattaaatctgcaacaaggccgtgaattgcaacgaatccacggtcaaccaccgcaagcaattattgtaacgcctctgatcgaggggctatgtggcacgggcaagaagatgagcaaatccctgaacaactacattgctgtgactgcaacgctggaggacaagttcggcaagatgatgagcctgcctgacaacctattagagcaatactggacgacattcggttattttttggaatccgagttaccatctctgcgtgaatttatcaaaacccaacccctcgaggcaaaaaaacaattggcaacatatttcatcgcaatcgaggcgaaatctattcaagagggtgaaaaacagcgcaccgccttcgaaaaaaaattctcgaagaaagaactgaccgacaacgatttcatccagataactgctaaacatggcgaccgcctaattgatgttttgatgtccagcggcaaatttaaatccaagggagacttaaaaagattgtttatttctaaggcgattcgaaatctaggtgcccaggccgcagaaatgtcagagctagcacttgaaatgcaagtagttgatggaatggaggtcggggtaggaaggctgaatttcttccgtatcaaagttgtgtagcatcaccgatggtatagcccttctcgataacttgtggaatcagaatctccaacatcttactcatcccactatttgatatgtggaataggcagatgcatcctggatgaattcgaccaagaatcttatcggcacttttaaccgcgtcaattggtgtcttttgccaatccataatcgcatttgaccacataactgttttcaatccctgttcattagcttctttcaatactgcctcgttaaaacgaccttttcctggacggaaatgctttatctcattgcctggaaatttctcgttaaacaactctgtgaattgggcgatatctgcactcatagccgcgtatgataaggtcggcaaatccttatgatgattcgtatgatttccgataatgtggccctcgctaatcatgcgttttacaagatccgtttctttcagataattcccgcacaggaaaaatattgccttggcgttgtgtgtcttcaggacatctaatacatctgccgtataccctgcctcgtatcccaagtcaaatgtcaggaagacttcctttttactctcgtccccgacaaagattccattatgctgtgtcaacatttcggtgctgcctgtgggtggggttggcgttgttccattgcccttgtgggacaatccccaattcacgactgcggggctgaacccctgcccaattaacaaaaggcaaatcatcaggcccgcaactgcgatataagcgattaatttaaaattggctaattgagttttcatagtacctccgttccagtttgtgcaaattactctcgcctattcttgcggtattcagtaagcacataaagttacataaattccatcggaccgcaaataatatatcgtgaaaaaactcattctcattcctgttcttgtattaatcttgtgtttgcaggggtttacaccctcgttcccaaagtggatagactttaatgtctcggcacgaattctggacaaggcatcaattgctcatagagaactaatcgagagcggagtcaccgacatcggaacggcggagttgctggcataccttgcaatgaaaaatggcaatagatttaaaataggtcaagacgctgtagttctccatagattggtgactgggttaaagaagggggagagaaactcaatcgacaagtacaccgagaacaaatattttatctattatgtaaaggtttttcacgcagttctggatggtgttattgaccgcaatacgggcgaagtaatcggtcaccacccgattgcaaagggattctggcatagtggttttgatgattttggaatgggccgcagttacggattcaagcgtaagcacctcgggcacgatctgtatggcggcacagggacgcctatcatagcgatggagggcggaacaattaccgagttgggttggaaccaatttggcggctggcgagtagggatccgcagcgacgatacaaaaagatactattattacgcccacctgcgaaaagacaaacccttccccctggatacttttgttggggacagggtcgaggcagggcaggtaatcggtttcctgggaaacacagggtattcgcgcaaaaagaaccgtaatatgcaaacgggcaagccgcacctgcactttggtatgcaaataatctttgatcctcggcaagaggacgatggcggagaataccacgaaatttggatagatgtctatcaaatctgtaaatttttagaaaagcacaagtcatctgtcgaaaagaacaaatggaatgaatgggaagcgataggattgacaaattgacgcaaatataatataatcaagacatgacatatgcggcagagcttgacccaagattggacgaaggctttgagggcacaggatttaatattgtcaaagccaagttgcgagccattaaattatttccaagtcttgccagcgtgattaaaagattcagattcaaaaacgacagttccgcccacggaggaattgcccacacagacgccgagagctatgtcgccataaacgcatcacgctttgatcgaaacgatgataacggacaggcggcgattgtcgcacacgaagcaatgcacaccgaggaaaaaatcttcggcaaattgggaaaccttgcaacagatgctgtcattaacgccaagatagttctgtccggcttgatgagttctttgtctggcttcgtggacatcccaggtgccatatcaatggggtcatataaaatccataagatcttgtgcgaggcatggcactacctgcaaaatccacagatagttccgcaacaagggttgtatgacgacccagggggcagcttcatagacaaaagcgaaagagacctcacggaggaagagtgctacctggcatgctttgggaattatgacctatgggacaggatggtggcctggataggacgacgcaaagaaaaagaacatcaagagatgctgcagcacgaaagcacacaagtttataacatagatgattaccgcagggaaaattaccatgacatggcaatcgcttagtaagcccgtccccatacaacttcatgtttgcctgccttgccacatacaacacatttgccttttgattccccaacgatacagcgactacccatacctgtttttttcttgtgattggtttcgcattcctctgaaccacaccacggggcataaataaagctcttgctgctatccaggcggttctttgccgcagcatacatcgcctcgtgaatctcgtcgaggagtgctggtacagcagcaggcaggtcatcgatttttatcttacgcttttctccgctgtaacggatagagacgattgcatcgccagcttccaagtcgcgtgggcctattt

SEQ ID NO: 4478 - DNA, 3944 bp, synthetic construct
  source 1..3944: mol_type = other DNA
  misc_feature 1..3944: note = Synthetic
atgctgaaccgcttgacccgctcgggcgcctagatttatacgtaaccgcaccccgccccgtaaagcccgcagtggcaccgcgcaagaccgccggccggcgagcaccgcggtgaaggaaaagcagttgggcgccgccccccggccccgggcagggagaacgccgttcctgcatctccacccaaaagaagcgcccccgggaagtatttccgcgagggcgccaggtcgtcccgcaggacgaacacctccggcagccaaaagccccttgttgtgagaagctgggactggccgctctgttacacctgtaatataatcaccgcggagggcacccatgtcaacatcaatccagcagcgcgaggttcaatcatgagcacaaccagagtcctcggcctcgacatcgggaccagttccgtgggttgggcgctcattgaaggccgcgaccctgaccatgtacgtatcatcgccgccggcgtccgagtcttccccatgggcgtggacgaggccacgctcgagtcacgaaacatccaaaggcggcaagcccggctccgccgccggcaaatcgagcgacgcgccagacgcaagaccaaggcacgccacatcctgcagtcccacggattcctccccccgggagatccgagccatgcggatcccgcctgggcgagcgtgctggcactggatccctacaaggtccgcgccgaaggactccaccgccgcctgcagccgtatgaattcggacgcgccatctaccacatctgccagcgccggggcttcaagtcgaaccgcaagaggcccttgaccaagaaggaaaagggagcagtgcacgaggacatcgcggggctcaagcgggaaatggatgccgcccacgccgagaccctgggcgaatacctgaaccggctggacccccgccagcagcggcgccgcggcaggcataccaaccgcgaatggtatcgtgaagaattccgtcaactgtgcgagcggcagcgcgacttcggtctcccgctttcccctgcgctgcagaaagaactggaagagaccattttttcccagaggaaggtctggtggaaaaggggctccatcggccgctgctcgctggagcccggcaagcaacgggccgccagagcgctgccggtgtgccagcgcttccgcatgctccagcgcgtcaacgacctgcagatcatcttgcccgacggcaccacccggcaactcagcgacgaagagcgcgaaaaattgctcgcccggctcgactgggaggaaaacctctctttcaagagcatccgcaaactgcttcggcttcccgccgaggcccgcttcaatctcgaggaaggcggcgaaaccaaactccccgggaattccaccgcttaccgtatcagccgggccatagggaaaagagagtgggagcgctgcagcccagagagcaaggcccaaatcctggaagcactgatgagcatcgaagacgaggacctcttcaagcgggtggccctccgcaagcaatggggcctcaatgaagagcaggccgaaaggctgagcgaggtcgctctggaagagggcagactggacttgtccaccaaggcgatccgcaagctgctgccgctgatggagaagcagcggctgagctatgccgaggcggcctggcgggtatacggcgaccgcggacccgcgcaggcgtatgaaagcgtgccgccggtcgaggacctgcgcaacccgacggtccaaaggtcgctggccgagacgcggaggatcgtcaatgccgttatccggcgctatggcaaaccggaccgtatccacatcgagttggcccgcgatctcaaggcgcccaagcagatccgccttaggcgcagcaggcagatgcggcggaacgaagcagaacggaaaagtgcgcggaaggagctgatcgagcaaggattacccgagcccaccggccgggacatagaaaagtatcgcctctggaaggagtgcgggaaaaggtgcccctacacaggcaagatgatatccttcagcgatctcttcggtccccatcccaagttcgacatcgagcacatcatcccgtggcacaggtgcctgctcgattccttcgccaacaagacactgtgcgaagtacaggaaaaccgttcgcgcaagggcaaccgcaccccgtacgaagcctactccggcgatcccgaccgctacgaggaaatcaagcagagggtcagggaattcacgggccccttcgggaaggccaaactgcgaaggttccgctgtgaagacatccagaagctgccggagtccttgccgttatacggcggagaacagttgaacgcgaccgcctacgccgcaaggtatgccgcccgccacctggccctgctctacccccaggaagagagaaggaagcgggtacaggtcagcgccgggcgtacgacggcctatctccggcgcgcctggaacctcaaccgccttatcgggctggccgatgagaagaaccgcgccgactaccggcaccacgccgtggacgcggtggtgatcgcgctcaccaccccgaaactgaccggcgagctcagcaaggcggccgcgagatcggtccggccgggaacctttcaggggctgacgccgccgcccggactcacccggcaactggaggagatcctggaccagatggtggtgtcccaccgggtggaccgccgtgtgaacggccagcttcacgaggagactttctacggccggatcgacaatgactcggtcactgtcgtgcgcaagccgctggccgatctgacggaccgcgacgtcgcccatatcgtggacaagaaggtacagcggctggtgagggaaaaactgagcgggggagccccgcccagcaaggtgttcgccaaccctgcgaacctgcccgcattcgtctccccttcgggcagaaccatgcggatccgccatgtgcgtgtcagggtggacgcctcgcccgtccgcatcggaagcggggcgaaaacgcggctggtacttaccggcggcaatcaccacctggaagtcttccgggtagtggaagacggccgggagaaatggcgggggcgcatcgtcacccgcctggaggccatgcagcgcaagaagaacggcctgcccatcgtctcccggaccgacgaagacgggcatcccctgctcttctccctggcgattggagataccgtgcgcctgcaatggaagggaaaagataccattgcggtggtgcagaaactgtccgcgaactactacgtgttcagggaacataccgacgggcggcgggccaaagaccggccttacgctgagcaaattgtcatttgtgccgacacgactctccagcgaagtgcatgccggaaattgtgcgtggatccgctggggaattgcacggtggcccatgactgaccgggtgctggacatcgccgagggacccgcccgtctcagggtcaggaacaaccagctcgtgctcgaaagggaccgcgcggtcctggcgagtattccactcgaagaagtggcggtggtgctggtctccacgccggcggcttcctattcccatgcggtcctttgcggactgggagcccacaacggcgtactggtggtctgcgatgatcattgcatgccggttgccatgtgcatgccccttgcagggcacagtctgcacgcggaacgactgcgcctgcaggtgagcagcagcctgcccctgcgcaagcgcgtgtggcagcagatcgtcaaggccaagatccgaatgcaatcccgggtgctgcatgcggcgaccggcagtgatgcgggactggaggccctggggcggcgggtcaagtcaggggaccccaataacctggaggggcaagcctcccggcgttactggccacgccttttcggccagggcacgttccgccgtgatcccggctcgtcggagcccccgaacaacctcttgaactacagctatgccgtggtgcgcgcggtggtggcgcgggccgtcgtgggcgccg

SEQ ID NO: 4479 - DNA, 4591 bp, synthetic construct
  misc_feature 1..4591: note = Synthetic
  source 1..4591: mol_type = other DNA
taatcctcttgagcttgctcaatgaaactaagtcttttgcgcatcgaaagatgcgttttttttacaaatgtagtaaaaatttactaagtaatctgaaagagaaagtaaatttataatactatagatatctcttaaattttattattttctaaatacttatttgtggttaatgatttaatactaagtatttctgaaagagttgcagtttgaatgatttaaaagatcgtgccggtttgaataaaatatacattctttccggtacatcttttactttattagtcaacgatttggaaagttataaattttttatcatttttaatacgatataaaaaaatctattatgaaagtactgggaattgaccttggaacagatagtttagggtgggctattagaaacaaagatattgaaactggtaaccaaattgaagatgctggagtgattatcttttctaaaggtgtgggagaagaaaagaacaacgaattttcgttggctgcgtatcgaaccgacaaaagacatagccgccggaaatattaccgtcgcaaaatgcgtaagggaagattgttacgaattttgattcaacagaatatgtgtccactttcaatagaagctttagataaatggacaaagcacgttaaaggcgaggcaaaaatttatcttacagaaaaagcctttattgattggttaaaaataaacccgtatgaagcaagaagagaagctacgaaagaaaaagttgatgcttttgttgcgggcagggctttgtatcatattgttcaacggcgcggttttaaaagcaatagaaaagaccaaagcgatgaaaaagaattgggtattgtaaaaactgctattgctgaattggaagaatatatgcatcaagattttttgggaactcattttcataaagttttaaagaaagaaagaaaaattgataaagatgagcaacccatagcacctaaggtaagaggaaattacactgcaagaacaatgtaccttggtgaatttgaagcgatagctcaacagcaacaattttcagtagcgcttaccaatacattgcataatgaaatttttattcaccgccctttaaaatcgcaaaagcatacggttggtaaatgtacttttgaaataaagaaacatagggcaccaattagctctttagcttttgaagaatttcggatgctgcaatttattaataacattaaatataaaaatttagataatgaaacaccggattggataactttaagtgatgaacaaaaggctgaaattaagcctctattttttagagtgagtaaagcaagttttaattttgctgaaatagcagataagctaactccaaaggataaaaaagggcggtggcgatttaattacaaattaaagcaaaatgttgcgggttgtatttgtacggcacgcctaaagaatttttttgataaacatgttagtaaagatcgttggaaggctttgtcaaatgtagaaagcaaagatcaaatttctaaacacgatgtttggcatgccatcttttcttttaatgatagtgaaaacttaaaacagtttggcattaagcatttacaactgaatgaagtagatgctgaaaaatttagcaaaattacctttccacaaggctatgcgaacttgagtgaaaaagcgattaacaaaatactgccttttttaagagcaggttttatttatagccacgctgtttttctggctaaaatacctgatataattggccagaaaatgtgggagcgcaagcacgaaaccattataaaaacggttagaaatctgattgacaatgagcagaaaaataatatgattaatcgcattgtaaatgattcgattcattatttttttgaaagcggttttaatgcaggtgatgtttacgttttggatgaggatgacaagcataccatcttacaaaaagtaaaagattattttggggcaaatgcctggatagaaaaaaaggaaaacgataaacaagccatcttacaagaaatatatgacaaactaactaaacaattacgcttaaatgtgcccaaagtaagtcaccgatatttgaaaataccacgaaaagatgaacgtattaaagattacttgaaacaaaattacgctgcaagtgatgaacaattaaagttattgtatcatccatcggatattgaccaatttgcaaaagccaagaaaaataaaaatggtgattttcaattgggcagcccggttacaccttcggtaaaaaacccaatggctatgcgtgctttacatcaactaaaaaaattaataaattatttaataagggaaggtaaaattaatgaacgggataaggtgattttagaaacttcgaggcatttaagtagtgctaatgaacgggctgctattgatacttaccaaagaaatagagaaaaagaaaatcaggaatacaaaaagcgaataattgaagattgtaataagccagacccaaaagatgaagatattttaaaataccggttatggaaagaacaaaatgagatttgtatttataccggtgaaagtatttcagtttgcgatttatttaccgacaacccaaaatatgatattgaacatactttaccacgcagcaaaagctatgatgattcgcaggctaacaaaaccttgtgtgagaaaacctacaaccaacagataaaaaagcaaaaactacctgttgagttagataattatgaagacattttgcaaagagttgagccgtggaaaaagaaatatgaagctttagatattcaagttaaaaaactaagtaaagttggtggtagttatgaagagcccgaacaaaagaaaagcagaatacaaaaaaagaaccgcttaataattgaaagaaattattggcggaacaaatatcaacgctttactttagaggaaataactaatggttttaaaaacagccagttggttgatattggtattattacaaaatacagccgggcttatttaaaaagtttgtttagtagagtttacaccgtaaaaggcactacaactgcagatgtaagaaaaatgtggggtttacaagaaggtaatgatcctaaaaacaggactaaacatattcatcataccgaagatgcttgcgtgattacttttttagaacctgacctttatcaacaacttgccgaattttatcatcaatatgaaaaatttgaagataacgaagtgaagaagccaactttcgaaaaaccaaaaaattgggatagctttgttcaagacatcaaaagtttacaaaacgatgttttagtttatcatcataaacaaaaccatttaggtaaaaacacttataaaaaatggcgggtaaatggtaaaattcaaaaacggtttgaatggaaaaaagatgaaaatggtaagccttacaaacgctatctaaatttaaaggatgaaaaagcaaacaccatttacaccaaaggtgatacggccagagtgcccttacatatggaatcgttttacggtaacattatgtataataatgaagccgataccgataaagaaaaatggcaaaaacttagccaagaagggaaaggcatttatgttaaacgcaagcctttagagtttggcgatttaggttttaaaaccgaagcacagttgcaaaatattgtagataaagtggtgcgtgaaaaagttttcaatcatattaatcaatacaaaaatgaaaaaggcaaaattgatttaaaggaagctttatcaaaaccaatatggatgaatgaagcaaaacaaatacctattaaaaaagtgcgttgctttgctggtgatgttaaaaacccaataaaagtaaaaaagcaaagagatcagcacagtaaaattagaaagccttataaagaatttttctatgctaaaaatgaaggcaatgttttgattgctatttataaaggattggttaaaaacaaagaaaaaagtggttttgaattggtcaacaattttgatgcttctgcctattataaagaaagcaattatgcataccgcaaccaataccctattgtgcccgaaagtaaagatggtttacaattagcacaaacgctttacaaaggcaatatggttttattgtatgaaagtacacctgatgaaattaattgggaagataaaaaggagttgagtagaagaatgtataaagttattggctttgcaacattaagagttcaggacaaatatgattttgggcgaatttatttgaaacatcacatgtgtgccaaaaaaatatctgatgttaaatgtgaacaaggtgtatttaatttgaatgatgaaattataaaagaacatagaatgcttttacatactcaaataaactgcttaatcgccaatatagatttttactttgatattgatggcagtatagaaaggattagataaaatagtgtattccgaataatgaagaattcgaaaataaaagatactgatgaattaacttaatactaaatgaaacctgttgccttattgttacattgtatttttgatttgcaagtgaacaggttcacttggaggtagtaacaaaaacacccaacaacaaattatgaacattattttttaacataaaacaaaacgcttatgcttaaaagaaccatattttttgacaatgcggcgtatttgagtacc

SEQ ID NO: 4480 - DNA, 24305 bp, synthetic construct
  variation 13330..13331: note = note, n is a, c, g, or t
  misc_feature 1..24305: note = Synthetic
  source 1..24305: mol_type = other DNA
ggcgggtacgggtgcagacgatgacgcgcatgccgagcgccgcgccgatctccgccaccctttttccgatgctgccgtagccgaaaatgcccagcgtttttcccttcacctcgaccatggggtagtcgtaataggaaaatcccgaacagcgctgccaatccccgcgctccaccgagcagacgtaatcgacgagactgcccgcccccgcgagcagcagcgccacggcgtgctgtgccacggcgtccgtcgaataatcgggggtgttggagacgacgattccccgctttttgcaggcggcaagatcgacgttgttatatcccgtcgaatacagtccgatgtattttaagcggggcagggaagcgatgaccttttcggaaaggtcggttttattgacgagaaggacgtccgcgtccgaacagcgggcaatcgtctcttccgcagtcagggatggataaaggcgaaggtcgccgtatttttccagagaggaaaaatcgacgtcgcccgaaaaggagatcgtattcgtcccgatcagacagatgaccataaaaaatacctctttttacgcccgggggcggcttgtgaaatcttataagatattgtagcatatccgtttttttctgtcaaccggcggcggcaaccgataaaaaattccgccaaccgataaaaaatgccgataccacgacaaatgtcttgacacctgtaaagatatggtgtatagtaatagccgcacgacgataaaagagaaaagtgcaaggttggatatgagcaataccgaaaaatacgacgtaatcgtggcgggcgcgggggcggcgggtctgaatgccgcgctctttctgccgcgggacaaaaaaattctgctcgtctgcaagggcggcgtgaagcaggcggattcctatctggcgcagggcggcatctgcacgttgcgctgggacggggacaaagacgcctggtttgaggacacgatgcgggcggggcattacgaaaacgacccggagactgtgaactgcatgatcggcggcgcccgggagacgatcgccgatctgatgctggctggcgtgcgcttcgcgcgggacggagcggggaatctgctctacacgcgggagggcgggcattcggcaaaccgcattttataccacgccgacacgacgggaaaggagatcgcctcccgcctgttttcgcgggtgcggaagctgaaaaacgtgcacatacgcccgtatacctctctcgtggacatcctgacggacggaaaggagtgcgcgggcggcgtcctccgcgacgagcggacgggggagatcgcgtgcgcctatgccgattacgtcattctcgccacgggcggcgtcggggggctgtatgcctcctccaccaatttcccccagctgacgggggacggcgtggcgatctgcctgaaacacggcatcgccgtccgcgatctcgattacgtgcagatccaccccacgacgctgtacaccaaaaggcggggacggcggtttctcatctccgaatcggtgcgcggcgaagggggcgtgcttctcgacggagcgggcaggcggtttacggacgagctcaaaccccgcgacgtcgtgacggcggcgatccgcgggcagatgcaaaaagagggcagcgaatgcgtctggctggacatgcggacgatcccgcccgaagagctgcgcgtccatttccccgccatcgtgaagaggtgtctcgaagaggggtacgaccccttttcccgtcccgtgcccgtggtgcccgcccagcattattttatgggcggcatcggaagcgatccggagggcagaacggagatgccccgcctgttcgccgtcggcgagacctgctgcaacggcgtacacggcaaaaaccgcctggcgtccaactccctgctcgaaagcctgctctttgcccggcgcgccgcgctccggatcgggaatacctatgccgcggtttcggaagaagcgcaaaaacgggcgggacagggatttgacgagcgcaaatataaggacaaaaaggcgctcgccgcggaatatgcggaactcgtgaaagcgggcatggaaagatcggcgcgggagcgcgcgaaaagggcgggaaaagccggggcggagaagccggaagacgcgggcagggccggcgccgcgcgttccgccgcgagataaacgggataaaaccgcgtaagcgacaaaagaaaaacagaacgagaacgataaaggacaaggagaagaaaaaatgaatccgatcacgatgaaattgcaggcggacaaactcatccgcatggcgctcgaagaggacatcacgagcgaggacgtctccaccaacgcggtgatgccggcgtatcagaagggcagggtgcagctgatcgccaagcaggaaggggtcatctgcgggctggacgtctttctgcggacgtttgagattctcgaccccgcgacgacggcggaattttacgcgcgggacggggaggagatccaaaagggacagctgctcgccgagctgacgggggacatccgcgtactgctttcgggagagcgggtcgcgctcaactttttgcagcggatgagcggcgtcgcgacgtacacccgcgcgacggcgaaattgctggaagggacaaagaccagacttctggatacccgcaagaccacccccaacatgcgcgttttcgaaaaatacgccgtgcgggtggggggcggaaacaatcaccgctataacctctcggacggggtgctgctcaaagacaaccatatcggcgcggcgggcggggtcgcggcggcggtgaaggcggcgaaggcatacgcgcctttcgtccgaaagatcgagatcgaagtggagacgctggcgcagcttcaggaggcgctggacgcgggcgcggacatcgtcatgctcgacaatatgccccccgcggacatggaaaaggcggtggcgatgtgccggggcagggcggagacggaatgctcgggcaacgtcacgaaggagaacatcgcccggctcgtctcgctcggcgtcgattatatttccagcggcgcgctcacccattcggcggggattctcgatctttcgatgaaaaatctcaaagcgatctgacgggggcagggttgcggcgacggcaaaaagtatccgaaaaaaggggaaggaaaagaagatgaaaaattctgttgcaaaaacggaaaaggcggacggcgaagcgcggcgggcgggcattctggcggcgctgcgcccgggtgcggaaccgcagagcgcgggggcgctcggggaaaaattcggcgtgtcccggcaggtgatcgtgcaggacatcgccctgttgcgggcgtcgggcgcgtctgtgatctccaccaaccgcggctatgtcctctcttcgccgccgcgggcggaacgggtgttcaaggtgcggcatacggaggcggaggtcggggaggaactcgaactcatcgtccggctgggcgggacggtgaaggacgtttcggtcagccatcgggtgtatggaaatatccgcgccgatctcggcgtacagacgcctttgcaggtctccgaattcgtgcgcagcatccgcagcggcgccagccgtcccctcatgctcgtgacggacggctatcactatcacaccgtcaccgcccccgacgaaaaaacgctggacgagatagaaaagggactgaaagaacgcggctttctcgtcaccgtctgaaattcacctctgaccgaaagtttatctgtccggaatttttatctttccgaaatatctgtgccgttgcgaaaacctgtccgcactgtcgggcgggttttttataaatggaaaaccgaacggacaatccctcaggcggctttgccgccagctccctttgcacaagggagccatgggtggggcgctgctcttccgacaagcctctttgcacaagtgagccttaggtggggcgggtgcggcgtcgcacccgccaaagtgccatttgaagttttttatcatgatgctattacaaaagtgcatccaaaaatctgttcttttattggcataatatcttgatattttccgaaaaatatgctataatgtctaagaaatacataaaatcagttgcataggagtaacagatatggctcaaccaattacatctgccgatattttaaaggggttgaatattaaacgttcgactttttactatttgctgaaaaacaaccttatctctattccaacgactgacactggaagatatgtttggaatgacgaagttgttgaacaattgaaaattgttttatctgaaccacaggcaaccgaaaaagaaatgcccgaagttaaaactacaaaaatcaataatagaagatatctcggaaataaatacaaactactcgattttattacttctactgttgcgcgtgaatgtgtaggtgttaatactgtcgcagatatttttgccggaacaggttcggtggcatctgctttttcgaacaaaaaattaataaccaacgatatactttactttaattacatctgtcatattgcttggttcggttctgaaaaatatgacgagttaaagataaaggaactgatttgttattataatgccattgcccccaaacaagacaattatatgtcactgcattttgcaaatacattcttctctcttgaagattgcagaaagataggatttataagggaagatatagaagataattacgcctgcgggaaaataaacggaagagaaagggctttgcttattacttctcttttgtatgcgatggataaaatagccaacacttgtgggcattatgatgcttatataaaaggagcatcgttcgataggcatcttgaactttctttaccgcttgcaagtaatgaaaacaacgaaaataatcaatgttacaatgaagatgcaaataatctcgttaaaagaatagatgcagacttggtgtatattgatccaccatacaattcaagacagtattgcgatgcataccatttacttgaaaatgtagcaagatgggaaaaacccgaagtgaagggcgttgccttaaaaatggatagaagccgtctgaaaagtaattattgcacatctaatgccgcaaaatcttttgaagatttaattgcaaatatcagggctaaatacattatattgtcttacaacaatatggcggaaaaaggaaatgaccgctctaatgccaaaataagcgatgccgacattatgcgaattctttcgagaaaaggaaaggttaaagtgttctcagaaagttataaggcatttagtgcgggaaaatcatctattgagaataatgaagaaagacttttcttatgcgaatgctacgattataagaaaaaagagattatacaatcacctttaaattatactgggggcaagtataaacttttaccacagcttctaccgcatttccccgatgatattgactgttttatagatctattctgcggcggcggtaatgttggtataaatgttccgtgtaataaagttttattcaacgacagtaatagtctgttgcgttttatgttcgggacatttaaaaatcttgataaagaatccacttttgagatgattgatagaattattgaagattatggattgtctaataccgataaatatggatatgaacactatggttgcaatagtgccgatggattgtcgtcttataattccgagaaatttttgaaactacgaaatgatttcaaccatagaaaaaatcttgaatataactattatgttatgttatacgtcttgattgtttatgcgtttaacaatcaaatcaggtttaataaaaaaggtgaatttaatcttcccgtaggcaaaagagatttcaataaaaaaatgcgagagaaactatctgtatttattgataggttaaaaagcggagattataaatttgaaagtttggattttcgcgaattaaataccgatgattggaatgaaaaaacttttgtttatgcagatcccccttacctgattacttgtgcaacttacaatgaacaagacggttggaacgaggatttagaaaaagaattgctatcgtatttagataagcttaacgatcgaaaaatacgctttgctttatctaatgttctacattcaaaaggtaaagaaaacaccattcttatggattggattagtcgcaatataggcaaatatcatgttatatatcttgattatgactattctaattcaaattatcaaactaaaaaccgaacatctgaaacagatgaagttctaattataaactactaagggggcaactatggacttattgtggagtgcatcaactacaatgcgcaatcccgaaaggacttactcttttctgaaaacaataaaagaggtcgaagggatgccgtggaatgacgaaacgcaaatgcgtttacaaagtttacttataaaaaatagattttacaaaccaaccaaagaaaatctttcgcagcatcaaattgatattttggaagatttgaattatcaaatgtcctatactgaagcgagagatatttttgatagtaaaaaatataccgatgcccctatgcgcgggagaactacatttgatccgattgagaaattagggcttgcctcactcgaaattgacagcaaaactcatgaagttagagtcagaacaactgaacttggacaattatttcttgataatagaatagcattagaagatgtcgtcttttccaatctgttaaagttccaatacccaaatccattaagctcggattgcagggattataatacaaaaccctttataaatactttacgcctaataaagaaagtgaatgaactttgtaacgaaagaggtttaaaggcaaaaggcgtgtcaaaggatgagttcgggatctttgttttgtcaataaaatcctatgatgaaatcgaggaaaaagccgaatcgcttttaacctatcgaaaacgaatgagcgaattatcgacagacgaagaaaaacaaaattatcgaacgattttcgttgaacattatttatcaaacttcaaggagcctgtcaaaaatacaaaagaatatgccgataatattattcgatatgttcgtttaacaaagtatatctacataagaggtggtggctattacattgatttagaaccacggagaatgattgagatagagtctctgttggaaatggataatggctcggcaaaaagctttagtctcgaggagtataaagcgtttataggtgattattattcctacactttgccttttgagacgatcgaaaaattaactaaaattgcagaagatattgtcgcggaaatcaatgcacttgaacgcaaactttcgttaagtacttcagctgtggtaattgcaaacaatattactgatttgaaaacgcaaattgagtctttgcgcgagcgccgaataagtttgcaaaatctaatattaaaagcaaactatcaacaaatagatcagattgattccgctatcaatgctcttaagaatattcgaaaactcaatatgaagccatcggttgcgttagaaaaatggacaaatattgctcttaacatcatcaatgatgcattgttaattaagccaaactctcctttgggtgatgataacgaaccaatttttacagcgcctgcaggtgtgcccgatattgaatgcttttatgacgggtttggcgcaatttgtgaagtgactatgctcactggtagagatcagtggtttaacgagggacaacctgtaatgcgtcatttgcgtgactttgaaaatcaaaatagatccatgcaaaattattgtctttttgttgcaccatcactacatcaagatacaatgaacactttttggaatgcggtcaaatatgaatatcaaggtagcaagcaaaaaattgttccaataaccattgcacaactcatagatatcttacaaggaattaaaaacgcaaaagtcaatcatcgaaaggtaacaaaagatgatatgaaaactttgtatgaatcttgtactcaacttaattccatttccgattccacccaatggagttcttttgtgacgaaacaaattgtttcttggaaagaaagagtaacggcataaaaaataaggagcttttacaaatggcgagtaaaaacaaactatctatttatttgattaaagagggtatttcagagaaagatgatatttttgaaaaaccagatgaagtgcaaattcttaataccttatcggataattccccagtatactatgccccatcttatgtccatgaaccctcttgggtgcaatctttcttcttgcatggtgatgcacgattagcacaagcgaattctcgcgtagtattgttaaaaaatttgaatatagatggcaatgaacacatttttgctttaacgtttggatatgctcgtttcttgtttaagccgaatgtcctcgaagagcaatttggattaaaaatagttttgaatagtataaaacaaaaccaaataaggaaaatatcaaaagccagcgtaggaactaatcaaaaacaaagcaacgaacaattgccaaaaaatagcaatatctctgaatttggttttgatattaatagggacttaatgaaaaatgtaagcggtaaatctgaagatgaatattttgaaaagagcatgcttacaggtggagatatttttagtctaacagttagtcgtgacatttcaaatattgacgattttctaatctattgttatcataaatataaagaggacacatacaaaaatcgttttgcttggattgataacattaaatatgtaaaaaacaaagatacaataggtcgtctgaatgcacaggtaatatcacaaataaacgcacgcaattattcctgtgtgtggatggcggttcccgaagttgttgattggatagacatcaaatgtttcaagatatctggagataggtcaactacagaatacgatgatatttatattgataaggttattgcttcattaaggaatgaattgacggatacctcccagttgacaactaaaactattcgggcaatctcaagtagagatgattctttatcgttatatgaatggactgcatataattgtcttattgcagaaatctctttagatggtaacgaatactgcttaaataacggaaaatggtacaaaatatattctgattttgcaagagatattaataatcaatacgaaaatcttgacctgtgtcaggatacatttataagttttaatcatacacaatatgctgatgaagatgcatataatgaagctttgagaaacacattgcaagactcaattatgcttcataaatataagattccaatcgggggtggacaaggcaacaatattgagccttgtgatattctttggaataacaagatgattcatataaagagaaatggcgggtcaagtttattgagccatttgtttaatcaagcatacgtttcatgtcaaatgtggatggataataaaagtcgaaagaaattaaaggaaaaattggaagaagagggcttgcataacatcgtccctgatgtttttatcccctcaaattatgaaattattatcgcaataataaacaaatttcaagatgctcgtccaaagatacctttttttagtaaagtgactatatgttataccgccacagcaattgaaacattagggtataaggtgaaaataaagaatattgatataacttgaaattcgatttacgttactaacgctccgccaatattacatatcttctcaattatcgggaggagaatgattattattacgtagacagcggggaatacggggagccgatccgatatattccaccccgaccggaacgggagggctattcttttgagggctggtacaccgaagcggaatgtatccatgagtggaattttacagtttctgcattgcccgtgttgggggaaggagaagaatttcgggaaacacaattatttgcaaagtggtcgacataatccgcaaagaggcctaaaaagaggattaagaggaaaacggaaagccgcctgttcgtcgcggcctcgcgttttgtaaaaactttttgcggcgagcaggaaattataaatttgggcttgacaaaagggcggggatatgatatactgtacatagtaactttataccataccaagatacaaaaggttactgaaataagggatttttcccgtaaagctctgtccccgcggaaattttccacggggatatctttttggcgggaggaaaaagcggaaggcgaaaccggaatgtccggggaaataaagtacgaaggaggaaaaaggatgaaataccggatcggattggatatcggtgtggcgtcggtgggcggctgtgcgatggagtgcgacgaaaacggggaacccgtgcgcattctcgatctgtgcgtgcgtacttttgacgcggcggagggcgaaaagggagcgccgcccgctcagccgcggcgggaagcccggggactcaggcgccggctccgcaggcgcgcccatcggctggaacgggtgcgcgcgctgtgtgcggaagcgttcggggaggacgtgctcggccgtgcggagcagaacggggaagatcttttccgcctgcgctgcgcggggctggacgaaaaactcagagacgaagaactcgtccgggtgctcgtgcatctggcggggcatcgaggcttccgttccaaccgcaaaagcgaaagcaaggacaaggagacgggggaactgctcaaagcgattgcggaaaacggcgaatatatgcaggcgcacggatatcgtaccgtgggcgaaatgttttaccgcgacccgaaatattttgaagaaagagcggggcggcgggtatatacgacccgcaaccgggacggggagtattcccgcgccttttcgcgcgcggacatcgaaaaggaagcgcgggcgattctctcccggcaagaggcgtgcgggctggtggacggggcgttttcggaaaaatatatcgaaatactcctttcccagcgctctttcgacgaaggacccgccgcgcccagtccctatcgcacggagggatacgacgtgggggattgtccctttgaaaaaggggaaaagcgggcgtccaaagccggatttaccgcggaatatctcgccgcgttgcaaaagatcaatcacctgaaaatttttctcccttccggggaggaacgattcctctctgccgccgagcgggaaaagctgtacgccgccgcgcgggagaaaaaggaaatgaacttcgcgcaggtgaaaaaatcgctcggtttgccggaggagacctctttcaatctcgtcaattattccgcaagggcgaacgtctctccttcggacacggagaaaaagacaaagctgttccgcatggagcggagttatgagctccgcgcggcgctcgacgaaaaaaatcggaaaaacatcccgctgctcgacgaagcggcaaacgtcctctccctctataagagcgacgaccgccgcatgaaggcgttttcggagagcgggatatgcgctgcgctttccgaagaggaaaaatccaggctgctcggtctggacttttccggatttgtccgcctttcctataaagccatgaacaagctgctgccccgcctcgaagaggggctgaaatacaacgaagcgtgtgaggcggcgggctacgatttccgcgcgcacgacgcgccgggggacggaaaactcagccgtctgcgcggagaggaggtgcggggatatatcgaagacatcggcgtccccgtcgttcgccgcgcgctggcgcagagcgtcaaggtgctcaatgcgctgctggacaaatacgggcagccgtgcggcgtcaatatcgaactcgcgcgcgagctgtccaaaaattccgaagagcgcggcaggatcgcccgcgacaatcagaagcgggaggaggaattccgcgcggcgctggaaaaactgcgcacggaatttcacctgacggcgcccaagggcacggacgttttgaaataccgcctgtacgaagaacagggcggcaagtgcgcctattcgcagaaggcgatagacagcgcccggctgtttgagagcaattatgtgcagatcgaccacgttctgccgtacagccgttctttcgatgacgggtataacaataaggtgctggtgctgtcggcggagaaccagcacaagaaagaccgcacccccttcgaatatttcggcgcggacgaagggcgttggggcgcgtttgaggcgtttgttcagacgacttataaaaacaaccgcaaaaagcgggaaaatctgctccgccgcaacttttcggaggaaagcgccaaggattggaaggaccgttccctcaacgatacccgctatatctgccgcgcgatgtacaatctcatcgccgattatctccgcatggaccccgtcgcgggcaagaaaaagcaggtgcgggcggtaaacggcaggatcaccgcctatctgcgcaatttctgggggctgaaaaagatccgcggcgcgggggacaagcaccacgcgcaggacgccgccgtcatcgcctgcgtcaccgacggcacgatcgcgcgggtgacgaagtacaataaactcaaagaaaaacgagccgtctgggaccaggacgcgcacaagtatctctatgcggattcggacggcgtgctgctcgacgcggacgagtacgacagccgctccggattgatcaaagagccgtaccggggatttaccgacgaactcagactccgcctttccgaagcccccaaagcctatctgcccgcaaagctgctctttttggacgggctgggatatacggaccaagagatcgacgggctttcccccgtattcgtctcccgcatgccctgccgcaaggcgaagggacagatccacgaagagaccatccgctcctgccgctcgaaagaggaaggggtcgtctccgccaaaacgccgctcgtcaggctgaaattggacaaggacggggagatcgcggggtacaaccgcagggcgcggcaggacgaccgactgctgtacgaggcgctgcgcgcccgtttgcaggcattcggcggcaacggcgaaaaggcgtttgctgagcccttttataaaccgacttcggacggaaaacccggcgccgtcgtcaaaaaggtgtggacggacaccgtgttcaatacgggcgttactctcgacaggggcgccgccgacaacggcggcatggtccgcatcgacgtgtttgaaaaggaggggaaatactattgcgtgcccgtctatatcaaagatatttatgcaaagcatcttcccgacagggcgatttcagccggaaaaagatttgatgattgggttaaaatcgacgatagtttccgctttctctttgcgctcttccgcaacgacctcatttatgtaaaggcgaaaaagccgttcaatctgtcgccgaacgataaagaggaaaaacagtcggtttccgtttccgaaggatttttctattatcggggnnacattgttaaaaatagaaaagtatgcggtggatattttggggaacaaatatcccgtaaagagggaaaagaggttgaatacggaatgggattcataaacatctttatcggcagcgaggaaaacgtgcgcgtgaaagaggggaaactcgtcgtgcgggaggggcgggaaggctttccggtagaggacataggctgcgtgatggtggacaacctgcgcacgaacgtatccgtctacgccctcaacgagctggcaaaagcgggggcggcggtgattttctgcgacgaaaagcataccccctatacctgtctgctgccgcacagcggctactatcggaggctggcggttctggaattgcagtcggcgctctccaaaccccgcaaaaaacggctgtggcagatgatcgtccgccgcaagctggagggacaggcggcgtgtctgcgcttttacgggaagggagaggaggcgaaaaagctggaagcgctttccgcgcaggtgaacagcaacgatccggacaaccgcgaggcggagggcgcccgtctgtattttccagctctgttcggagaggggtttacgcgcggggaggacaacggcgtcaacgggatgctcaattacggctatgcgatcgtccgttccctcatcgcccgccacctgtgcgcccgcggcttcgaatgcgcttatggaatctttcataagaatcagctgaacgcctttaatctggcggacgacatgatagagcctttccgccccgtcgtggattgctttgcggcaagcctgccgcccggagagacaaatccttcccgaaagcgggagctgttccgcgtcgtcaacctctcggtggacagcggcgggcagatgcacagcctgtccaacgccgtcgagcggatggcggaaagcctgctttcctattataaaggggagagagacgatctcgtcatgcccgcgctcgcggggctgaaagagcatctctatgagtaggcatatgcggctgatggtctttttcgatcttcccgtgcgcaccaaggagcagcggaagacggcgacggcgttccggaattggctgctgaaagacgggtattacatgctgcaatattccgtatacgtccgcctgtgcaacggctcggacgcggcggaaaagcatacgcagcggcttttggtgaacgcgccgtatacgggttccgtccgcgttttggcagtcaccgaaaaacagtacgccaccattaaaatcatcgccggaaaaaagcgtcccgaagaaaaaagcgccaaagattttcagatttctttctttgtcgattgattttttcaaaaaacaaagcgcgaaaaaagccttgttctgccccgaaaaaagggcaaaaacaaggcttttttctgcgaaacgatactgcttttttctgcgaaacgatactttttcggcggtttttacgccgcctgccgttcccctctattataccataccaagaaacaaaagggaactaaaacaactgacggagaggaacgccaacagaacggattataccataccaagaaacaaaagggaactaaaacttttgatggtgaccccaacgggactcgaacattataccataccaagaaacaaaagggaactaaaacctgccgtttgatgtcgcggatgattgggcaattataccataccaagaaacaaaagggaactaaaacggacgtggaggaatcgttaaaacgcgtgatattataccataccaagaaacaaaagggaactaaaaccgttctttgcgtatcagctgtatgccattaattataccataccaagaaacaaaagggaactaaaactcccgcccggatgttgtcaaggctgctttgattataccataccaagaaacaaaagggaactaaaacttatattttatgtgcttggttttcgtcttaattataccataccaagaaacaaaagggaactaaaacagtccttttataaggcgttcgtttctcaatattataccataccaagaaacaaaagggaactaaaactgagttaaaaaggattgcaggcgtttccgtattataccataccaagaaacaaaagggaactaaaacttcgtccatatatcgcagagccgtcgacttattataccataccaagaaacaaaagggaactaaaacaagaaaacaaaaagagaattgggtagttttattataccataccaagaaacaaaagggaactaaaactcgaaaatggcggagaaagacaaaaagctgattataccataccaagaaacaaaagggaactaaaacatatagcggacttgataggagtacaaatgcattataccataccaagaaacaaaagggaactaaaacacccggacgagatgatccgctacgggtgggattataccataccaagaaacaaaagggaactaaaaccttgacaattataccataccaagaaacaaaagggaacttggataattctattttaccatgttctgcgggaaaagtcaagcgggcggcggcaggggcgcaaaagtggtttactttttccgcaaaagggtgtataatgataggcgtataagccatgccagccatgccttatcaatttcaatcagtcacactttccggaggagagctatggacggcgaaaaaaagacctattacatcacgacggcgatcgcctatacttcgggcaagccgcacatcggaaacacctacgaagcggtgcttgcggacgcgatcgcgcggttcaagcgcaaagagggctatgacgtgcgctttcagacgggcacggacgagcacggccagaagatagaggaaaaggcgaaaaaagcgggcgtcagccccaaggaatatgtggacaaagtcgcgggcgagatcagggagatatgggatctcatgggcacgtcctacgacaaattcatccgcaccaccgatcccggacacgagcggacggtggcgaaaatcttcaagaagttctacgaccagggggacatttacaaagggtattacgaagggatgtactgcactccctgcgaatccttctggacggagagccagcttatagacggcaaatgccccgactgcggcagggaggtgaagcccgcccgcgaggaggcgtatttcttccgcatgggcaagtacgccgatcggctcatcgggcacatcaacgcccaccccgaattcatccagcccgtctcccgcaagaacgagatgatgaacaatttccttctgaagggattgcaggacctgtgcgtttcccgcacctctttcaagtgggggatccctgtgcccttcgacgaaaagcatgtcgtctatgtctggctggacgccctgaccaactacatcacggggctcggctacgatccggacggggagagcggggaactgtaccaaaagtattggcccgccgatctgcacctcatcggcaaggacatcatccgtttccacaccatttactggcccatcttcctgatggcgctggggctgccgctgcccaagcaggtattcggtcacccgtggcttttacagggggacggcaagatgtccaagtccaagggcaacgtcatctacgccgacgatctcgtccgcctgttcggcgtggacgcggtgcgctttttcgtgctgcacgaaatgcccttcgacaacgacggcgtcatttcctgggagctggtcgccgagcggtataactccgaactcgccaacgttttaggcaatctcgtttcccgcacgatcgccatgatcaacaagtatttcggcgggagcgtgacccgcgccgcgggcgaagaggggacggacggggaattcaaggcgttcgtttcgggcgccgccgcgcgcgtgaaagagaagatggacgccctgcgcgtcgccgacgccctgaccgagatcttcgctctcttccgccgcgccaacaagtatatagacgaaaccatgccctgggcgctcgccaaagaggaggacaaaaaggcccgcctcaacgacgtcctctataacctctccgaagcgatcgtcacgggcgcgtccctcctggacagcttcatgcccgaaaccgctcggaaaatcctctccgccttcggcgccgagccccgttctttggaggactgcggcgtattcggcgggctggaaaaggcggtcgtcactcccctgcccccgctgtttgcccgcatcgacttcaaggcgctggaaccgcagatcgaagagatccgcgcccggcagcgcgccgaagcggaggcggaagccgcgcgggaagcgcaatttgaaaagtccgctccttccctttcttccgacgcccccgcgtccgaaaaggcgggcgtaaaaggggtgcggctggcgacggctgcccccgcgggagcggtgcagtctgcccccgaaagcaaagaaaataaagccgcggaaggcggggaaggcgtggaagaaagcggcagaaagccggaaatttccatcgaagattttgacaaaatacagctgcgcgtggggaaaatcgtcgcctgcgaaaaggtgaagaagtcctccaagctgctgcacgaaacggtgcagttcggaaacgagacccgctcgatcgtctccgggctggcgaaacattacacgcccgaagagatggtgggcaaaaaagtggtgttcgtgaccaacctgaagccggtgaccctgtgcggcgtcctgtccgaagggatgattctggcggcggaggacgagagcggaaatctctctctcgtcgtgcccgaaaaagacgtcgcggacggggcggaaatcggctgaaaggagggggcagggatttgtttatcgacgttcactgccacctgacgggcggggaatacgacggcgtcggcgggacggaagccgtccttagccgggcgcgggaggcgggcgtgaaggcgttcgtcgtttcgggattcgacctgccctcatcccttgccgcggcggaacttgcggcgaggcatagggacgtgtatttctgcgcgggctatcagcccgaagagctgaaaaagtaccgcgaaggggatctggacgagatcgccgcgctcgcgcgggaggagaagtgcgtcgccgtgggggagatcggcctcgaccgccatttccccgacaatccgcccgttgaattgcagagggagctgttcgtgcggcagatcgcgctcgcggacgacgcggggctgccgatcgtcgtgcacagccgggacggggcggcggagacgctggacattctgcgcgcgaacgccgcgaagctgaaaaggggcgggctgatgcactgctattcctattcggcggagatgacgggggcgtttgcggcgctggggatgtatttttccttcggcgggacgtccactttcaaaaacgcgaaaaaggtacacgagagcgcgcgggcggtgccggcggacaggatcctgtccgagacggacagcccctatctcacccccgtgccctgtcgggggcaattccccaacgagccgaaaaacgtggggctcgtcgtcagaaatctcgcagaactgcgaaaggaaaaggaggaggcgctggaagagcagattttcgccaacgcgaagaggctgtttttccggctgaaagatctatgagcgaaccgaacaggaacgaacaaaacaacgaaagacccgccgccgagcgggagaaaaaccgcgatcggggcgaacagaacgcccggaacgcccagaacccgcaaaatgcgcaaaacgcgcaaaacgcgcagaacgcccggcaggggcagaacgcgcagggcgggaaccggaaaaatcagaaaaaccgcgaccgcgagcgcagccgggagaaccgcgagaaggacagggagcgggatcgggaacggcgggaaaaggagaaccgcaaaaagcagccgcccaagctgcagccccatccgaacgcggggaacgcgaacaaaaagaaggcgcagaagggcaatcgggcggacgacgggcgcaaggacacctatgtctatgtcctggacgggaacgtgtatatcaatctgacgaacaagtgctccaacgcctgccatttctgcgtgcgcaacgaacgggcgagctatttcggcaattatctctggctgcggaacggcgatccgactcccgaaaaggtgatcgcggcgctgaacgcgctcgatctgtccgcctaccgcgaagtggtgttctgcggcttcggcgagccgacctatcggatggcggagatgtcggcggtggcggattacgtccacgaacgggggctttccacccgcctcaacaccaacgggcaggggagccttatcaataagcgggacatcgtgcccgagctcaagggcaaaatcgacaagatcaacatttccctgaacgccgccagcgcggagaaataccagcccatctgccgctcgcagttcggcgaagcggggtacacggggatgctggatttcgcgcgcgaatgccgtcgggcggaaatcgagtgctggttttcggtggtggacgtgatcggcgaagacgaagtggcggcgtgcagacgggtggcggagatgatcggcatccccctgcgcgtgcgggcgtatatttcggaatcgtaaggcggcggccccataccctggcttccttgtgcaaagaggcttggcggcggagcggcactccccaactatggctcccttgtgcaaagaggcttggcggcggagcggcgcctccaacccatggctcccttgtgcaaagggagctgtcatgcgtagcatgactgagggattgtccgtttgggcttcgatttgtcgtatgattttgccttgcggcaatgggacgcaaacctgcggtttgcttgcggaatcggtccggcgctttgcgcggaggagaaacaggtcatggaaaatttgcgcggcgtccttgaaaaatacggattccggttcaaaaaacagctcgggcagaattttctctccgacgccaatctcctgcgctccgtcgccgacggggcggggacggacgggaagaccgtcgtcgaaatcggctgcggcgcagggacgctcacccgcgctttggcggaacgcgcgaaaaaggtgtatgccttcgacgtggataccgatctcaaacccgtcctcgccgaaactctttccggcttggagaacgtggaagtcatcttccgagactttctcaaaatcgacctgaaagcctttgaaaaagaggtcggcgcttacctggtggtcgcaaatctgccctattacatcaccaccccgctggtgggaaggctgctggacgaaagcgaaagctgtacgggattttccgtcatggtgcaggaggaggtggcggagcggttctgcgcgaaggcgggtacgcccgaatacggcgccatcacggcggcgatcgccctccgcggggaagcgcatatcgtcaggcgggtgccgcgcaccatgttccatccccgcccgaacgtcgattccgcggtcgtcagggtggattttcagccggggcggctgggcgaaaagagtgcggagatgtaccggaagacggtgcggtgcgcctttgcggggcggcgcaagacgctggaaaacaatctcgtgaacggctttgccctctcccgcgaacgggcaaaggaaattttgcgcaaagccggcgtggaggaaaaggcgcgcggcgaaaccctttcccccgaacgcttcgcccggctgtcggatgtcttatacgacgaaatcggcggagaaactctataactcggcgggaaaatctcatagagagccgcccggaagcattcgcttccgggcggcatatatattttcggaaattatcttccgagcagataaaatccgttttcgggtacggaagaaagccatatcgtcaggcgttcaaaatcgggaagtccttcccgttccgccctctccgcgatctcccgcgcctgcgctttcgtgtagtaattgatcccgtgcagatcgaggctgcgggacccgtccgggtgcaatccgccgccgaaacagggatggtacgatcggaagttctcgtcggaaatacggacgaacagggagtccgggcggtcgaagcggatgtcggcggcgttgaaaatctttctcggcgagtccttttgaggggagaggtattgcaattcgataaaatccgaaaaatcctttcggcggcgggcgtcgatttcccgtttccccaaaaacagcctgccgactttcgggaggggcggggcggccgttttgaggcgcttgcggcggattttttcggcgtcctttttgcaggcgtcggtatattcttcaagcgccctgtcgtattcttcgcgggggaagaaaaatgtctgcggggcggtttcgtcgtaagcgtattgcgttatgcgctttcggacggcgagctgccaatcgacggcgcccatccaaagacctccgcggaggatgtatttccccccggcggacaggcggaacctgtctcccttccgattccggaagatgagcccgccgctcaaaagccggtttacggaagcgatccattcttcgtatgcggggacggaacggtcgagataatcggcgctcgcgatccaattttttatgttttgtttcccggcgatcacgcacaggaccaatccgtccgcgtccgtgtaatgtttcatctttgccctccgatcttgctttgttttccgaaccgctccgttcccgacaggcggaaacgcttctgccattcatgtccattatatatcgtcgcaggcggatttgtcaaccgtttgcgaggagggaggccttgccgcgccgttcctccgggtgttatgttccgattatgccattaccgcatagcggaaatatcccgactcggcataatttatgaaaccggaagaggggattttgcaaagaaaaaaaattttttccggggggcagggttgcggcgacggaaaatcgagggaggataaaagagtaaaaaagacgggcgcgctcaaaaggcgcgtccgttcggtccggaagatatttttgtcgtccttcgcctccgataaagggcggaaatacacaaaatcaaaggggcaggggagggatgaagtacaattcagtcgaattgattggcgagaatgtccgccgtgaggcgggcgagattgaggctgttgttgtccatgcgcgctccctcttctctggataacagcgccaccgcgcccagacagtctccgcccgagacgatggggacgatgatctgcgccgtcactccctcttcccgggaggaggtgagggggaggatgtctccgccctccgccgcgttggcgagatagctgcggcgctctttgaggatgcggtccatgtcttcggacagattctttttgtccagatcccgtttcccgtcgccgtaggcgtataaaacttcgtccgtgtcgcagatgacggcgagctgcccgctcagatcgttcagggactttgccgtcgcttcgctgaaacgttcgagcgtggcgatgggagagtattttttgagcatgagttcgtcgcggtcggtgaagatctcgaggggatcgccctccttgatgcggagggtgcggcggatctctttggggatgaccactctgcccaactcgtcgattctccgcacgatgccggttgctttcataaatagatgacctccttgtcataaaagcgaaaggcggcggatgaaagcgcaaacgcgcccgccttccggtccttccgctgtttacgcttattgtgtgtatgtatatggaagaatatgcgcacaatttttccgcctttttccgattttgtctgccctttccgttttgtcttgcgcgcagggaaacggcggaggcggaaaaggggaaggagcagaaggggacgaagggggcagaaggaagacgcgttcacatgcggtcgtggcggaactggcagacgcgcaagactaaggatcttgtggttaaccccatgcaggttcaattcctgtcgaccgcaccataccagaataatacgaaccaagacaccaagtcaaggttcgtattattttttgcccgcgatttcttcggcatgatagtccgctttgaatgaaaacttctttcagtcctctaaatttgtgctttttcggtcggctatggtagcatagttcctcgcggacgtcaacggtcgcaaaatcgtcgctgaaaacacccatataaacgaattggagcccgagtaaggattgcatccttgctcggctctttttctgtctatggggcatttcccgacctgtacgcaacgattttggctttgtcccgttgacttccacagacttgctattcagggcaccaacattcaccgtcctatgcaccttcgcctgttgcccgaaaaaggcaaatacaaattcagaggtgttaaaatggaaatgttagtcacaaagttctcaaacggaaagtattgtaacgaaggcgaattgttcgctgaacctatctcaaatgagaacgtcaaactcatgggcgagatgatcgctttacaagcgcttcgcaccgtcaaaaagttcgatatgaaagttgcagataggctgtatatcggccttatcaaagatctgcatcacatgaacgagatagactataccgtatcagacggctacgatgtggcgcaaacagcaatctgctttctgtatcaattcgtcgggcatacagccaatgagatttacggtaaagaccgcaaagggaaagacatctctatcaaactcgcgtgttatcgcgaagtggatcatttcatcaaccttcttcgtaacagaccggacaggcgcgggactgtcgttgaatccatagattttacggattataaggctttgccgatggatccggtaaactgctttgagaaagaacagaccgattacaccaaagcagacgaacttgtaggcgcattacagctctccgcattggaacttgccatactgaactgctacatgaacggcatggtgcaatctgaagtctgtgccgaactcggaataggccgcggaacaataaaccaccgaaaagcaagcatacgacagagatattatagcctttacggcgcgttctagtatgacattaaatttcataacaaacaacaggcgttcatagtaagtatgagcgcctgttgtatgatatttccgtaaagcaccgatgacacgatacc

SEQ ID NO: 4481 - DNA, 13992 bp, synthetic construct
  misc_feature 1..13992: note = Synthetic
  source 1..13992: mol_type = other DNA
ggaagaagtaaaagaggtgcggttggaaagtttttatgtgagcagcgcaaacggatttacgtcgagatggtatgtatttgacgacggcgaagagcggtttcagaaaaacggaatcgtgcataagaactcgcatattacgctgaactattccaagcgggcaaaaagagcggtggaaacattttggaagggagaagtggtcgagaaaatttatacagaagaataagcaagtataaaaagggaccttaaaagcgttttgtatccatgagtggaattttacagtttctgcattgcccgtgttgggggaaggagaagaattccgggaaacacaattatttgcaaagtggtcgacataatccgcagagaggcctgaaaagaggattaagaggaaaacggaaagccgcctgttcgtcgcggcctcgcgttttgtaaaaactttttgcggcgagcaggaaattataaatttgggcttgacaaaagggcggggatatgatatactgtacatagtaactttataccataccaagatacaaaaggttactgaaataagggatttttcccgtaaagctctgtccccgcggaaattttccacggggatatctttttggcgggaggaaaggacggaaggcgaaaccggaatgtccggggaaataaagtacgaaggaggaaaaaggatgaaataccggatcggattggatatcggtgtggcgtcggtgggcggctgtgcgatggagtgcgacgaaaacggggaacccgtgcgcattctcgatctgtgcgtgcgtactttcgacgcggcggagggcgaaaagggagcgccgcccgctcagccgcggcgggaagcccggggactcaggcgccggctccgcaggcgcgcccatcggctggaacgggtgcgcgcgctgtgtgcggaagcgttcggggaggacgtgctcggccgtgcggagcagaacggggaagatcttttccgcctgcgctgcgcggggctggacgaaaaactcagagacgaagaactcgtccgggtgctcgtgcatctggcggggcatcgaggcttccgttccaaccgcaaaagcgaaagcaaggacaaggagacgggggaactgctcaaagcgattgcggaaaacggcgaatatatgcaggcgcacggatatcgtaccgtgggcgaaatgttttaccgcgacccgaaatattttgaagaaagagcggggcggcgggtatatacgacccgcaaccgggacggggagtattcccgcgccttttcgcgcgcggacatcgaaaaggaagcgcgggcgattctctcccggcaagaggcgtgcgggctggtggacggggcgttttcggaaaaatatatcgaaatactcctttcccagcgctctttcgacgaaggacccgccgcgcccagtccctatcgcacggagggatacgacgtgggggattgtccctttgaaaaaggggaaaagcgggcgtccaaagccggatttaccgcggaatatctcgccgcgttgcaaaagatcaatcacctgaaaatttttctcccttccggggaggaacgattcctctctgccgccgagcgggaaaagctgtacgccgccgcgcgggagaaaaaggaaatgaacttcgcgcaggtgaaaaaatcgctcggtttgccggaggagacctctttcaatctcgtcaattattccgcaagggcgaacgtctctccttcggacacggagaaaaagacaaagctgttccgcatggagcggagttatgagctccgcgcggcgctcgacgaaaaaaatcggaaaaacatcccgctgctcgacgaagcggcaaacgtcctctccctctataagagcgacgaccgccgcatgaaggcgttttcggagagcgggatatgcgctgcgctttccgaagaggaaaaatccaggctgctcggtctggacttttccggatttgtccgcctttcctataaagccatgaacaagctgctgccccgcctcgaagaggggctgaaatacaacgaagcgtgtgaggcggcgggctacgatttccgcgcgcacgacgcgccgggggacggaaaactcagccgtctgcgcggagaggaggtgcggggatatatcgaagacatcggcgtccccgtcgttcgccgcgcgctggcgcagagcgtcaaggtgctcaatgcgctgctggacaaatacgggcagccgtgcggcgtcaatatcgaactcgcgcgcgagctgtccaaaaattccgaagagcgcggcaggatcgcccgcgacaatcagaagcgggaggaggaattccgcgcggcgctggaaaaactgcgcacggaatttcacctgacggcgcccaagggcacggacgttttgaaataccgcctgtacgaagaacagggcggcaagtgcgcctattcgcagaaggcgatagacagcgcccggctgtttgagagcaattatgtgcagatcgaccacgttctgccgtacagccgttctttcgatgacgggtataacaataaggtgctggtgctgtcggcggagaaccagcacaagaaagaccgcacccccttcgaatatttcggcgcggacgaagggcgttggggcgcgtttgaggcgtttgttcagacgacttataaaaacaaccgcaaaaagcgggaaaatctgctccgccgcaacttttcggaggaaagcgccaaggattggaaggaccgttccctcaacgatacccgctatatctgccgcgcgatgtacaagctcatcgccgattatcttcgcatggaccccgtcgcgggcaagaaaaagcaggtgcgggcggtaaacggcaggatcaccgcctatctgcgcaatttctgggggctgaaaaagatccgcggcgcgggggacaagcaccacgcgcaggacgccgccgtcatcgcctgcgtcaccgacggcacgatcgcgcgggtgacgaagtacaataaactcaaagaaaaacgagccgtctgggaccaggacgcgcacaagtatctctatgcggattcggacggcgtgctgctcgacgcggacgagtacgacagccgctccggattgatcaaagagccgtaccggggatttaccgacgaactcagactccgcctttccgaagcccccaaagcctatctgcccgcaaagctgctctttttggacgggctgggatatacggaccaagagatcgacgggctttcccccgtattcgtctcccgcatgccctgccgcaaggcgaagggacagatccacgaagagaccatccgctcctgccgctcgaaagaggaaggggtcgtctccgccaaaacgccgctcgtcaggctgaaattggacaaggacggggagatcgcggggtacaaccgcagggcgcggcaggacgaccgactgctgtacgaggcgctgcgcgcccgtttgcaggcattcggcggcaacggcgaaaaggcgtttgccgagcccttttataaaccgacttcggacggaaaacccggcgccgtcgtcaaaaaggtgtggacggacaccgtgttcaatacgggcgttactctcgacaggggcgccgccgacaacggcggcatggtccgcatcgacgtgtttgaaaaggaggggaaatactattgcgtgcccgtctatatcaaagatatttatgcaaagcatcttcccgacagggcgattttggcgcacaaaagatatgaagattggacaaaaatagacgatagtttccgatttctctttgcgcttttccgcaacgacctcatttatgtaaaggcgaaaaagccgttcaatctgtcgccgaacgataaagaggaaaaacagtcggtttccgtttccgaaggatttttctattatcgggggatcaatatttctacgggagcggcgcttatcataacgcacgataacagttattctacggaattggggctgaaaacattgttaaaaatagaaaagtatgcggtggatattttggggaacaaatatcccgtaaagagggaaaagaggttgaatacggaatgggattcataaacatctttatcgattgattttttcaaaaatcaaagcgcgaaaaaagccttgttctgccccgaaaaaagggcaaaaacaaggcttttttctgcgaaacgatactttttcggcggtttttacgccgcctgccgttcccctctattataccataccaagaaacaaaagggaactaaaacaacatgtccgctgtacaatttacgccgaagattataccataccaagaaacaaaagggaactaaaacacactcgcgatctcttcttccgtacacatgattataccataccaagaaacaaaagggaactaaaacgagaaaatcccatgtgtttctgctccttctattataccataccaagaaacaaaagggaactaaaacacatcgagcgggattgccgtgtgcagatttattataccataccaagaaacaaaagggaactaaaacaattgctcaagcggtttttgaaggagaaagattataccataccaagaaacaaaagggaactaaaacagtccccgcgataagaaattcgccacgtccattataccataccaagaaacaaaagggaactaaaacccaaaaaggaatcaccttgcaagagctttcattataccataccaagaaacaaaagggaactaaaactggagctccacgcagattggaaggaatacgattataccataccaagaaacaaaagggaacttggataattctattttaccatgttctgcgggaaaagtcaagcgggcggcggcaggggcgcaaaagtggtttactttttccgcaaaagggtgtataatgataggcgtataagccatgccagccatgccttatcaatttcaatcagtcacactttccggaggagagctatggacggcgaaaaaaagacctattacatcacgacggcgatcgcctatacttcgggcaagccgcacatcggaaacacctacgaagcggtgcttgcggacgcgatcgcgcggttcaagcgcaaagagggctatgacgtgcgctttcagacgggcacggacgagcacggccagaagatagaggaaaaggcgaaaaaagcgggcgtcagccccaaggaatacgtggacaacgtcgcgggcgagatcagggagatatgggatctcatgggcacgtcctacgacaaattcatccgcaccaccgatcccggacacgagcggacggtggcgaaaatcttcaagaagttctacgaccggggggacatctacaaggggtattacgaagggatgtactgcactccctgcgaatccttctggacggagagccagcttatagacggcaaatgccccgactgcggcagggaggtgaagcccgcccgcgaggaggcgtatttcttccgcatgggcaagtacgccgatcggctcatcgggcacatcaacgcccaccccgaatttatccagcccgtctcccgcaagaacgagatgatgaacaatttccttttgaagggattgcaggacctgtgcgtttcccgcacctctttcaagtgggggatccccgtgcccttcgacgaaaagcacgtcgtctatgtctggctggacgccctgaccaactacatcacggggctcggctacgatccggacggggagagcggggaactgtaccaaaagtattggcccgccgatctgcacctcatcggcaaggacatcatccgtttccacaccatttactggcccatcttcctgatggcgctggggctgccgctgcccaagcaggtattcggtcacccgtggcttttgcagggggacggcaagatgtccaagtccaagggcaacgtcatctacgccgacgatctcgtccgcctgttcggcgtggacgcggtgcgctttttcgtgctgcacgaaatgcccttcgacaacgacggcgtcatttcctgggagctggtcgccgagcggtataactccgaactcgccaacgttttaggcaatctcgtctcccgcacgatcgccatgatcaacaagtatttcggcgggagcgtgacccgcgccgcgggcgaagaggggacggacggggaattcaaggcgttcgtttcgggcgccgccgcgcgcgtgaaagagaagatggacgccctgcgcgtcgccgacgccctgaccgagatcttcgccctcttccgccgcgccaacaagtatatagacgaaaccatgccctgggcgctcgccaaagaggaggacaaaaaggcccgcctcaacgacgtcctctataacctctccgaagcgatcgtcacgggcgcgtctctcctggacagcttcatgcccgaaacgtcggcaaaaatcctcttcgccttcggcgccgagccccgttctttggaggactgcggcgtattcggcgggctggaaaaggcggtcgtcactcccctgcccccgctgtttgcccgcatcgacttcaaggcgctggaaccgcagatcgaagagatccgcgcccggcagcgcgccgaagcggaggcggaagccgcgcgggaagcgcaatttgaaaagtccgttccttccctttcttccggctcccccgcgcccgaaaaggcgggcgtaaaaggggtgcggctggcgacggctgcccccgcgggagcggtgcagtctgcccccgaaagcaaagaaaataaagccgcggaaggcggggaaggcgtggaagaaagcggcagaaagccggaaatttccatcgaagattttgacaaaatacagctgcgcgtggggaaaatcgtcgcctgcgaaaaggtgaagaagtcctccaagctgctgcacgaaacggtgcagttcggaaacgagacccgctcgatcgtctccgggctggcgaaacattacacgcccgaagagatggtgggcaaaaaagtggtgttcgtgaccaacttgaaaccggtgaccctgtgcggcgtcctgtccgaagggatgattctggcggcggaggacgagagcggaaatctctctctcgtcgtgcccgaaaaagacgtcgcggacggggcggaaatcggctgaaaggagggggcaggggtttgtttatcgacgttcactgccacctgacgggcggggaatacgacggcgtcggcgggacggaagccgtccttagccgggcgcgggaggcgggcgtgaaggcgttcgtcgtttcgggattcgacctgccctcatcccttgccgcggcggaacttgcggcgaggcatagggacgtgtatttctgcgcgggctatcagcccgaagagctgaaaaagtaccgcgaaggggatctggacgagatcgccgcgctcgcgcgggaggagaagtgcgtcgccgtgggggagatcggcatcgaccgccatttccccgacaatccgcccgttgaattgcagagggagctgttcgtgcggcagatcgcgctcgcggacgacgcggggctgccgatcgtcgtgcacagccgggacggggcggcggagacgctggacattctgcgcgcgaacgccgcgaagctgaaaaggggcgggctgatgcactgctattcctattcggcggagatgacgggggcgtttgcggcgctggggatgtatttttccttcggcgggacgtccactttcaaaaacgcgaaaaaggtacacgagagcgcgcgggcggtgccggcggacaggatcctgtccgagacggacagcccctatctcacccccgtaccctgtcgggggcaattccccaacgagccgaaaaacgtggggctcgtcgtcagaaatctcgcagaattgcgaaaggaaaaggaggaggcgctggaagagcagattttcgccaacgcgaagaggctgtttttccggctgaaagatctatgagcgaaccgaacaggaacgaacaaaacaacgaaagacccgccgccgagcgggagaaaaaccgcgatcggggcgaacagaacgcccggaacgcccagaacccgcagaatgcccggcaggggcagaacgggcagggcgggaaccggaaaaatcagaaaaaccgcgaccgcgagcgcagccgggaaaaccgcgagaaggacagggagcgggatcgggaacggcgggaaaaggagaaccgcaaaaagccgcccaagccgcagccccatccaaacgcggggaacgcgaacaaaaagaaggcgcagaagggcaatcgggcggacgacgggcgcaaggatacctatgtctatgtcctggacgggaacgtgtatatcaatctcacgaacaagtgctccaacgcctgccatttctgcgtgcgcaacgagcgtgcgagctatttcggcaattatctctggctgcggcacggcgacccgacccccgaaaaggtgatcgcggcgctgaacgcgctcgatctgtccgcctaccgcgaagtggtgttctgcggcttcggcgagccgacctatcggatggcggagatggcggcggtggcggattacgtccacgaaagggggctttccacccgcctcaacaccaacgggcaggggagcctaatcaataagcgggacatcgtacccgaactcaaaggcaaaatcgacaagatcaacatttctctgaacgccgccagcgcggagaaataccagcccatctgccgctcgcagttcggcgaagcggggtacaccgggatgctggatttcgcgcgcgaatgccgtcgggcggaaatcgagtgctggttttcggtggtggacgtgatcggcgaagacgaagtggcggcgtgcaggcgggtggcggagatgatcggcatccccctgcgcgtgcgaccttatatttcggaatcgtaaggcggcggccccataccctggcttccttgtgcaaagaggcttggcggcggagcggcactccccaactatggctcccttgtgcaaagggagctgtcatgcgtagcatgactgagggattgtccgtttgggcttcgatttgtcgtatgattttgccttgcggcaatgggacgcaaatctgcggtttgcttgcggaatcggtccggcgcttggcgcggaggagaaacaggtcatggaaaatttgcgcggcgtccttgaaaaatacggattccggttcaaaaaacagctcggacagaattttctctccgacgccaatctcctgcgctccgtcgccgacggggcggggacggacgggaagaccgtcgtcgaaatcggttgcggcgcagggacgctcacccgcgctttggcggaacgcgcgaaaaaggtgtatgccttcgacgtggataccgatctcaaacccgtcctcgccgaaaccctttccggtttggagaacgtggaagtcatcttccgagactttctcaaaatcgatctgaaagcctttgaaaaagaggtcggcgcttacctggtggtcgcaaatctgccctattacatcaccaccccgctggtgggaaggctgctggacgaaagcgaaagctgtacgggattttccgtcatggtgcaggaggaggtggcggagcggttctgcgcgaaggcgggtacgcccgaatacggcgccatcacggcggcgatcgccctccgcggggaagcgcatattgtcaggcgggtgccgcgcaccatgtttcatccccgcccgaacgtcgattccgcggtcgtcagggtggattttcagccggggcggctgggcgaaaagagtgcggagatgtaccggaagacggtgcggtgcgcctttgcggggcggcgcaagacgctggaaaacaatctcgtgaacggctttgccctctcccgcgaacgggcaaaggaaattttgcgcaaagccggcgtggaggaaagggcgcgcggcgaaaccctttcccccgaacgcttcgcccggctgtcggatgtcttatacgacgagatcggcggagaaactctataactcggcgggaaaatctcatagagagccgcccggaagcattcgcttccgggcggcatatatattttcggaaattatcttccgagcagataaaatccgttttcgggtacggaagaaagccatatcgtcaggcgttcaaaatcgggaagtccttcccgttccgctctctccgcgatctcccgcgcctgcgctttcgtgtagtaattgatcccgtgcagatcgaggctgcgggacccgtccgggtgcaatccgccgccgaaacagggatggtacgatcggaagttctcgtcggaaatacggacgaacagggagtccgggcggtcgaagcggatgtcggcggcgttgaaaatctttctcggcgagtccttttgaggggagaggtattgcaattcgataaaatccgaaaaatcctttcggcggcgggcgtcgatttcccgtttccccaaaaacagcctgccgactttcgggaggggcggggcggccgttttgcggcgcttgcggcggattttttcggcgtcctttttgcaggcgtcggtatattcttcaagcgccctgtcgtattcttcgcgggggaagaaaaatgtctgcggggcggtttcgtcgtaagcgtattgcgttatgcgctttcggacggcgagctgccaatcgacggcgcccgaccaaagacctccgcggaggatgtatttccccccggcggacaggcggaacctgtctcccttccgattccggaagatgagcccgccgctcaaaagccggtttacggaagcgatccattcttcgtatgcggggacggaacggtcgagataatcggcgcccgcgatccaattttttatgttttgtttcccggcgatcacgcacaggaccaatccgtccgcgtccgtgtaatgtttcatctttgcccctttccgatcttgctttgttttccgaaccgctccgttcccgacaggcggaaacgcttctgccattcatgtccattatatatcgtcgcaggcggatttgtcaaccgtttgcgaggagggaggccttgccgcgccgttcctccgggtgttatgttccgattatgccattaccgcatagcggaaatatcccgactcggcataatttatgaaaccggaagagggaattttgcaaagaaaaaaaattttccggggggcagggttgcggcgacggaaaatcgggggaggataaaagagtaaaaaagacgggcgcgctcaaaaggcgcgtccgttcggtccggaagatatttttgtcgtccttcgcctccgagaaagggcggaaatacacaaaatcaaaggggcaggggagggatgaagtacaattcagtcgaattgattggcgagaatgtccgccgtgaggcgggcgagattgaggctgttgttgtccatgcgcgccccctcttctctggataacagcgccaccgcgcccagacagtccccgcccgagacgatggggacgatgatctgcgccgtcactccctcttcccgggaggaggtgagggggaggatgtctccgccctccgccgcgttggcgagatagctgcggcgctctttgaggatgcggtccatgtcttcggacagattctttttgtccagatcccgtttcccgtcgccgtaggcgtataaaacttcgtccgtgtcgcagatgacggcgagctgcccgctcagatcgttcagggactttgccgtcgcttcgctgaaacgttcgagcgtggcgatgggagagtattttttgagcatgagttcgtcgcggtcggtgaagatctcgaggggatcgccctccttgatgcggagggtgcggcggatctctttggggatgaccactctgcccaactcgtcgattctccgcacgatgccggttgctttcataaatagatgacctccttgtcataaaagcgaaaggcggcggatgaaagcgcaaacgcgcccgccttccggtccttccgctgtttacgcttattgtgtgtatgtatatggaagaatatgcacacaatttttccgcctttttccgattttgtctgccctttccgttttgtcttgcgcgcagggaaacggcggaggcggaaaaggggaaggggcagaaggaggacgaaggggcagaaggaggacgggagacgaaaagggggacaaaaaacgaaaaaacttttgaaagaggggacaaaataagttgacaaacgggagcggttattatataatagacgcgttcacatgcggtcgtggcggaactggcagacgcgcaagactaaggatcttgtggttaaccccatgcaggttcaattcctgtcgaccgcaccaaatatgcaagggatttgcaataaaatttgcaaatcccttgttttttcgtgcgattagtgcataattataaatccgaattttcgttgattcggcggaaatggggacaaaaacggggacaaaatactcgtgtttttttatgcaattcccttatagtgcttaatattcgagctttgcaatttcttcccgctggaagtcgtcctcccaatgtgtataaactctgtccgtcgtatttccgccggctttatgcccggttatatagtccacccaagatttatagcaatgcgcctcttgtgcggcggtggtgaaggtgtgtcggaggtcgtagaggcgataatcgggcgggaaatgtgcgcggaaggcgcgttcgaggagaacgagcgcgacgggaacggcggagcggatacggtcgatataccgtataagagcgggatgaagcgggattttccgcgtttccggcgcttcccattttttctttttcgcggtttggatgatgacgaagccgggagaatcgaaagacagcccgtataattcgcaggggcgcataccggtatagagcaaaagccaaaggcaaagctcggcgcgggaagccggctcttttgcaagaaaggtgcggacaagttcgcgggggatgacctttccggcgttgcgcctgtgcggaagcaaatgcacaagcggcatgacgtcagcaggcaaaattctatcggcgacggcagcggcggagatccacgaaagaatgtttttcgcctcttccgccgtgcgcccttttcccgccgcggtcaattcgttcaagaatttttggcagtcggtggcggtgatgtcgcgcatgagcttcccggcgaagaatcgtgcaatgtgccggcggacaacgccgcagaggttgtaatagtgcttttcggaaatgttgttgcgcttgaaggtttcgagataatggaaagcataatcggaaacggaaagcaaaacgcccgcgggagctgcgggcggggaaatggtatgccgttccggtgtttttctttcgccggagcagaaaaggcggagtttttcaataaaccgcgcttttgcgtcctctaaaaattttccggaagcagaaatgcgcgtgccgttgatctggatgcgtatttcgtaaatgccggaaggcttcaaacggacgtgcgcggttttgtggtctgtgcgaaagattttgcgaaaagattttggcattttggaaatttcctcctttgagaaagtgagagaaacttccttttgtgaaaccgccgcgccgtgtggaggttctttccggtcggcgcgggagccgggaaagaaaatcgttttgccgtcgccggaaaggagcggcgggagcgtcgggcgttcgtcgtgctgcaaatgctgccgttcgaggatacgccccgcgaggaaaagaatttgctgcaagtccttttcgtcgtcgaagttcataaaaaatcacctcatgttatttgacggttgccccgtctgacatggggattttttattttttgcgaacggacggagcggcgcctgcctcttgttcccggagcaaatcggcataagcggaaacgcgcgctttgccggcgtaagacaaggcacgataatttccgagaagctggctttcgtccaaaggcagcgcgggagcggaggaaacgggcgcgccgagttcgtccgaaagtccgagcagataatccgccgaaacgtcaaaatattgtgctaattttgtaagcgtggaagcggtcgcctcatttcttccgatttcaagttttgcaatcgttgattgactaactccgattttttcggctaattgtttttggcttaaatttgcattctttcgcaaatcggttaatagttcggaaaaacgcatttttgtatcctcatcaaaattttagcaaaaaaaattccaaaaatacttgacaagtgcatttttactt

SEQ ID NO: 4482 - DNA, 23612 bp, synthetic construct
  misc_feature 1..23612: note = Synthetic
  source 1..23612: mol_type = other DNA
ggccgcgccatcagcctggcgctggccgcggccgggttcgatatctgcatcaactacgcgggcaacgcggccgcggccgaacagacagccgccgactgcgccgccctcggcgtcaaggcggtcacccgccaggccgatgtgagcgaccccgccgcctgccaggcgctggtggaaggcgctgcggcggacctgggccgcctggatgtgctggtcaacaacgcgggcgtcacggcggacaagctgatgctgcgcatggaggaggccgacttcgacaaggtcatcagcgccaacctcaagggcgcgttcttctgctgcaaggcggcctgcaagctcatgatgcgccagcgctatggccgcatcgtcaacatcagcagcgtcgtcggtttgcacggcaacgcgggccaggccaactacgccgccagcaaggcgggtcttatcggcttgaccaagagccttgccaaggagtacgccgcccgcggcgtcacggtcaacgccgtggcccccggcttcatcgccaccgacatgaccgacgccatgaccgacgccgccaaaaccgccacgctggccgccataccggccgggcgcgtcggccggccggaggaagtggccgccgccgtggccttccttgccagccccgccgcggcctacgtcaccggccaggtgctgtgcgtcgacggcggcatgggcatgtaagaccaaaacgcgaaatgcggcgttgtgacagcggctttccggccggttgcgcatttcttttttcggactcttgaaatttccgcgcatggcgcgctattgggaggatattatggacaaacgcagagttgtcatcacggggctcggcaccgtaaaccccaccggcaatacggtggcggaaagctgggccgcggtgaagaacggtgtgtgcggcgtcggccccatcacccactacgataccgccgacagcaagaccaagctggccgccgaggtcaaggactttgaccccgccgttcgcgtggacaagcgcgaatcgcgcaagatggcccgctttacccagttcgcgatggccgctgccatcgaagcgatggccgacgccgggctcacccccgaagcgctcgccgccatcgactgcacccgctttgcgaccatcgtctcggcgggcatcggcggcctgcccaacatggaggaagagcatgccaagggcgagcagaagggctttgaccgcgtcagcccgttctttgtgcccatgaccatcgccaacatggcggccgggcagatcgcgatccgctacggcctcaagggctactgctacgcgccggtcacggcctgcgcgggcggcaccaacgcgatcggcgacgctttccaccgcatccgcgacggctatgacgacatggccattgcgggcggcgccgaaagctgcatcagcccgctcggcgtcggcggcttcacgagcatgaaagccctcaccgccgccaccgacccgaaccgcgcctcgctgccgtttgacgccgagcgcggcggcttcgtcatcggcgaaggcgcgggcctccttgtgctggaagaacttgagcatgccaaggcccgcggcgcaaagatctatgccgaagtcgtcggctacggcgccaactgcgacgcccaccacatcacggccccggcccccggcggcgagggcggcgcggcctgcatgcagatggccctggccgatgcgggcatcgcgcccgaggccgtcggctacatcaacgcccacggcaccggcacccatctcaacgatgtctgcgagacccaggccattaagaccgcgttcggcagccacgcctacaagctgcacatctccagcaccaagtcgatgaccggccacctgctgggcgcggcgggcggcgtcgagggtgtgttcacggcgcttgccctgcacgaaggctacctgcccgccaccatcaacctcaaaacccccgaccccgagtgcgacctcgactacctgccgaacgagggcctcaacgaacaggtcgagtatgcgatgagcgacagcctcggcttcggcggccacaacgcggcggtcatcttcaagcgctgggagggctgagccatggcgatcacaccgaacgacccgccgcgcacgctggatgcggccgggatcgcaaagatcctgccccaccgctatccgttcgcgctgctcgataaaatcaccgactatacccccggccagtgggcccgcggcgtcaagtgcgtgacgatgaacgagccgtttttccagggccactttcccggccagccggtcatgcccggcgtgctgattctggaagcgctggcccagtgcggtgcggtcgcggcgctgagcgccgagggcaaccagggaaaactggcgctgttcggcggcgtcaagaacgcccgcttccgccgccaggtcgtgcccggcgatgtgctcacgcttgaatgtgagctcatcgagcagcacggcccgctgggcatcggcaaagccaccgcctgggtggacggccagcgcgccgtcaacgcggagctgaccttcgccatcgttgaccgggggtgagcgtttgcccggcaaacaggtctctgcgcctgccggccggcggcccccgcagccccgccgcgcccgcgcctgccgccaggcgcgccccgcagcctcgctgcgccccgcggccccgcactgcccacaagctggacagaaggaggtttttgccatgctggaccaggcgttccaacaggtgtataccaaattcaagctgcacttttaccagcaggttttcagcaaatttgaaaaccgggaagccacgctgaccacggtggaatccttctgcatggaggtgatcgtggcgctggaccgccccaccatcgcggagttctccaagctgatgaacctttccacgcccaacgcctcgtacaagatcaacaaccttgtcaaaaagggctatctcgaaaaagtccgctccagcgccgacaagcgggagtactatctggtgcccacgcagcgctatctggactattacaacatcagctacgcctatttgcaggaggtggtcgaccgggccaaaacgcgcttttcgcccgccgacctgcacaagctcgaacagatgctgcgcatcgtttcggacgagctgatgcccgagatcccgctgcccgccgccggcccggcagccgaaaaataagcgggccgccgcgccaaggcggcagcccccatgcaaaacaccgcccccgccgggtttgtccggcgggggcggtttgtgcttttggctttttacaggttgaagtaacggttggcgttgtagtagctgatgccctgcacgatcttcttcagcgctttttcatcgttggggtattcgccgttttcgacccaggaacccacaaggttgcacatcaggcggcggaacagctcatgccgcgtgtaggaaaggaagctgcggctgtcggtcagcatgccgatgaagttgcccagcaggcccaggcgggccagcgtgcgcatctgctgatacatgccgtcgttggtatcgcagaaccaccaggcggagcccagctgcatcttgcccgggacttcgtcgccctggaacgagccgatcagcgtgcccagcatgtcgaagtcggacgggttgaggctgtacaggatggtccggggcagctcgtcggtgtcggtcagtttggagagcaggctgctcagcggcacgctgccctcggtcacgccgatcatgtcaaagccggtgtcggggccgagctttttcagcatcttggcgttggggttgcgcaggcagctgtagtggatctgcatgacgacgttgtacttcttgtacatgcgggcgcaggccgccagcaggtaggtcatgtaagcgtcgcgctcttctttggtcgggtcctcgccggccatcgccttcttgaaagcgacatcggccagctccggggaatcgacaaacggcacatagtcaaggccgtggtcggcggcgcggcagcccatctccacaaagaactgcagccgttcctccagcgccttctccacgcagcccacgcacttgaactcgcggcccacgacggactccagcttgtggatgtactcgacaaagccgggcttgtagatgttcagcgccttgtccgggcggaaggagggggcgacaacgaccttgatcgaagcgtcctccttgatcttcttgtgccactcaaggctgtcgacggggtcgtcggtcgtgccgaccatcgcgacgttgctctgctcgatcaggccgcgcacggtcatcttggggtcgtttttcagcttttcgttgcacaggttccagacttcttcggccgtgtcgccgttgagcacgccgtcatagccgaagtatttcttcagctccaggtggcaccaggtatacatcgggttgccaatggccatttccagcgcctcggcaaacttctggaagcgctcgcggtcgggcttgtcgccggtgatgtactcctccggcacgccgttggaacgcatgacgcgccacttatagtggtcgccgaaataatagtcggacccgtcggccagcacctgatggccgcccagccaaacctgggtgatgttctcaaagcggcggtcctcatagatctcctgcggcggaatgtggcagtgatagtcgatgatgggcaggtccgccgcgtagtcatggtacaaatgacgcgcggtgggggtatccaaaaggaaatccttgtccataaatgctctcatatcgcaaatctcctttgtcggcgggccgggggcgcccggcccggtactgtgggctttgttatcattatacatagttcggcgcagcggaacaagttgcaaaaattgcgcagccacaaaaataccaaacaaaaattcggcgcgcgccttgtgcaaaatgcggaaagcggacccccggcaggcaagagagcaaaatatgtgcgctgccgccgcggcagaccttgacgctgccgggcggcgcggctagaatgagagggtacacaaactgcgcgggaggaacgctgccatggaaacactcaactacgaagtcttgcaaaaaagcggctacacgagctatattttgcgggatgcgcccgaaaaggtcctgcagttcggcgagggcaacttcctgcgcgcctttgccgatacctggttcgaccttgccagcgagcgcgcgggctggaacggaaaatgctgccttgtgcagccgatccccaccggcctggccggggctatcaacgcccagcaggggctgtacacgctctacctgcgcgggcggcaggacgggcgcgcggtcagcgaaaagcgcgtgatctccagcgtttcccgctgccttgacccgtatacgcaggacggctacgcggcgatgctggcggtggccgtatcggacgatctcgagatcatcgtatccaacacgaccgaagccggcatcgcctatgacccggcctgccgcaaggaggactgcccgcccgcctccttcccggccaagctggcccaggtgctccatgcgcgctggcaggcgggcaagccgggcgtgatcgtgctctcctgcgagctcattgacgaaaacggcaaggaactgctgcgctgtgtcgacgcctatatccgccagtgggggctggaagcggatttccgcgcctgggtgcacagcgcctgcacgttctgctcgacgcttgtcgaccgcatcgtgcccggccgcatccgcgacgccgccgaggccgcccgcctcgacgccgaaaacggctaccacgacgaactcattgacgtcggcgaggtgttcggcgtctggaacatcgaaggccccgcctggctggccgaccgcctgccgttcaaagccgcggggctcaactgcccggtcgtgcccgacgtgaccccctacaagaaacgcaaggtgcgcattttgaacggcgcgcacaccgggtttgtgcccggggcgtacctggccgggttcgatattgtgcgcgactgcatgcgcaacgacacgatccgcgcgttcatgaaccggatgctgcgccaggagattgtgcccatcctgccgctggaccgggacgactgcctgcggttcgccgccgcggtcgaggaccgtttcaacaacccctttgtggaccatgcgctgctgagcatctcgctcaattcgacctccaaatggcgggcgcgcaacatgccgtcgctgctggaatacgccgccgccaacggcagcctgccgccctgcctgacgctgagcctggcggcgtacatcgccttttatacaaacgacgtccaggcgctgaccgaacagggccttgtctgccgccgcccgggcggcggcgcgtacaccgtctgcgacgaccgcccggtgctcgaattctatgccgcgcacaaaaacgacgccgtccccgcgctcgtgcgcgccgtgctggcgaaccaagcgttctgggggcaggacctgaccgccgtgcccgggctcgaagccgccacggtccaaaacctgaccctgatccgcgaaaaaggcgcgctcgccgccttcgccgcctgcctggcataaaacagaacagggcggagcctctggcggccccgccccgtttctcatagaagttggcgtataaactgttttactgcaggcgccccaaacggcacagccgggcatagacgccgtcccggcgcagcagcgcctcgtgcgtgcccgcttcggcaatgcgccggtcggccagcacaaaaatttggtccgcgctgcgcaccgtcgaaagccggtgcgcaatgaggatggtcgtgcggtccttcttcagccgctcgatcgagcgctgcacaacggcctcgctctcgtaatccagcgcgctcgtcgcttcgtccaggatcaggatcttcgggtccttcaaaaacagccgcgcaatgctcagccgctgccgctgcccgccggacagcataatcccctttgtgcccaccaggctgtcatagccgtgcgcgagcgaagtgatgaacccgtgcagcccggccagcttggcggcctcaatgatctcggcgtcggtggcgtcttcgcggccgtagcggatgttttcgcggatggtgccgttgaagatgtacacctcctgctgcacaatgccgaccgtctgccgcagcgtgcgcagcgaaagcgtgcggatgtccgccccgtcgatcaggacccggccgctgcaggcgtcgtaaaaccgcgcgatcagcgagacgacggtcgtcttgccgatgccggagctcccggcaaaggcgacggtctgcccgccgccgatgcaaaacgaaacatcctccagcacgttttcgtccgaatcttcatagtggaaggaaacatgctcaaagcaaatatctcccttcgggtgcggcagcgccgccgggtgttccggttcggccacggcggggcgcagctcgatcatctccataaagcggatgaagctcgccttgccctgctcgaacaggttgaggaagtttaagagcgtgttgatcggctccgacagcgtcccggcgtacagcaggaacgtgaccagcgtggccgcgctcaaactgccgccggtgatgaacagtgaaccgaagatgaccaccagcgtcgtcaacagctgcgggtaggcctgcaatgtttcgtaaaatacggcttccagcttgtaatacaggcatttgcctgcggtgtagcgccggtttttctgcgcaaagcgcgcggcgtgcgcgtcctccttgccaaaggcgatgacggtgcggatgcccgaaagcgtatcctccgcatactcgttcatgtcggacagctgccgccggttttccagctggcaggcttccatccgccggtcggcgtgcagcgtggtcagccccagcaagggcagcgccgcaaagacgagcagcgtcagcggaacatgcaggcggagcatgatggcaaacgcgccggcaaacttgaccgccgtcatcagcaggtcctccggcccgtggtggaacagctcggtcatgttgctcaggtcgttggagagtaccgtcatcagccggccggtaccgttgcgggcgtggaacccgaacgagagcgattcataatgccggaacagttcctcgcgcatcgtctgttccatcttggcgcccatcgcgtggccgaaataggcgtagatcacgttgctggccaccttcaccgccgccagcgccgccagcagcagcgcggccgccagcagcttttgcgccgcgcccgcgccccactgcgccagcaccgtgccggtcatatacccggacacaagcgggatcagcagcgtgcagcccgcgctcagcagcgcaaaaaacaggtccgccagaaagatgcggcggtgcgggcgcgcccggccgcgattgttttttgatatcatgtgataaaggagccactgtttatgtctctcgccatccacatccacccggcggataacgtcgccgtggcgctgcagcccatcgccaaaggcacggcggtcgctctgccggatttgggcctgaccgtcgttgcggccggggacatcccccagggccacaagctggccgtgcggcccatcgcggcgggggagaacgccgtcaaatacggctttcccatcggccacgccaccgccgccatcgcgcccggggactgggtgcacacccacaacctggccaccaacctgtccggcacggtcgaatacacctaccgccccgccgcccgcccgctgccgccgcagacgcccgggatgttttccggttaccggcgggcggacggccgcgcggccatccgcaacgagatctgggtgctgcccacggtcggctgcgtcaacggctgcgccgaggccctcgcgcgggaaaaccaggaccttgtcaccggcagcatcgacggcctgtacgccttcccgcacccctacggctgcagccagaccggggcggaccatgcccgcacccgcaggctgctggccgcgctggcccgccacccccacgcgggcggcgtgctggtgctctcgctcggctgcgaaaacctgacccgcgaacagtttgaagcggagctcggtccctttgaccccgcccgcgtcaagttcctgacctgccaggacgtccccgacgagatggccgccgggcgcgcgctgctcaaagaactggccgcccacgccgcgcaggcccgccgcgaaccgctgccggtcagcgagctggtcgtcgggctcaagtgcggcgggtcggacggcctgtccggcgtcacggccaacccggtcatcggccgcttttcggacgcgctgtgcgcctgcggcggcacggccatcctgaccgaagtgcccgagatgttcggggccgaaggcttcctgatggaccgctgccaaacccgcgccgtctttgacaaagccgccgccatgctcaacggcttcaaggactatttcctcgcccacggcgagccggtctatgaaaaccccagccccggcaaccgcgcgggcggtatcaccacgctggaagacaaatcctgcggctgcgtgcagaaaggcggcagcgcgcccatcgccggtgtcgtcgaatacggcggtacggtcacggcgcgcgggctcaaccttttggacggccccggcaacgaccttgtttcggccacggcgctggcggcggccggcgcgcagctgatcctgttctccaccgggcgcggcacgccgttcggcgcgccggtccccaccctcaagatcgccaccaacagccgcctggccgccgccaaacccggctggatcgactttgacgcgggcgccgtcgccaccggcaaaatgaccattgacgaaaccgcccgcgggctgtatgatttagtcataaagacggcgggcggccaaccgacctgcgcggagcgccacggccaccgccagatcgccatcttcaaacagggcgtcacgctgtgacgctgccatatgtaaaaagagcggactgctttcctttttagggagagcagtccgttttattacactgcaaaaactttctttttgcattttgctatgctatactgaaaccaacaaaaaaggcagcgccacacagcgctgccggaaaaaccaaaaatggtggatcgttcgggttaccaccataccctgcggcgtaaagccttatcttagaacttttgatggatattgataagctgacacagcttgcaatatggttatctctctgatggatattgataaactgacacatcaaaaacctaagctcagctttattataccccgccgcccgtcgcctgtcaaccggaaaaagaaaaggagcagtgccatgaaagaacctttacagtatgtccttgggttggatatcggtatcgaatctgtcggctgggcggtgatccgctgcgccccggcgtatcgtatggaagatgcaggtgtgcgcctgtttgccaccgcagagcaggaaagaggcaaaagcaacacgaaccaggatcgccgcacctttcgcgccgcgcggcggctggtgcgccgccgcagccaccgcaaggcaatggtcaaacgccaccttgagcgcatcggcctgctgcaccccggcgagcttgaagctttttttgaagacggcagccacgacctgctgcgcctgcgcgtcaaggggctggacgaacgcctttcgccggtcgagctggccgcctgcctgatcaacctgtgcaaccaccgcggctaccgcgaattttatccgctggatgaagaagaggaaaaagagctgactgccgccgaacgccaggagcgcgagcaggagagccgcggcatcgagcgcgtcaaacagatcatggcggcgggcggctaccgcacggcggcgcagatgctgctggaggacgcagctttcgccccggcggacggcgggcccatgcgcgtttaccgcagccacccccacaaggcggaccagtacccgctcagccgggatatgctgcgcgccgaggccgagaagatcctgaactgccagagccggttttacccctgcctgcggcagaattacctgacccgttaccgcaagggcggcgaaaaccgcccgctggagatgaccaacacggaattcctgctccagctcgtgtttgagcagcgggattttgaggacggccccggcgatgttaacgacaacctgcgccgctacaccggctacctgtccgccttgggcaagtgccagttttaccgtgaggaaaaccgcggcgcgcgcatgacggcgctgggcgacctgtatgccgcggccaacgcgctgtcccagtaccgctaccttgacacaaagaccggcgagcttgtgctgccgcctgcgctcgcgcgcgagctgctgacggctgcgctgctggacgcggagctgcccgccaaaaaaatcaatgatattgccaaagcgcaccatgtaaaggcgaacaacaagggcctcaaaaaagcggagctggccccgggttgtatcaagttcctgcgcgctgtgcgcccggtttttgaagcgcagggcatcgcctgggcggacgtcctcggcgcagacccgctgcaggcgcagctgcagccggattcgctgctcaaccgcatcggtcatgtgctttcctgctaccagaccccgcgccgccgccaggaggaactgcgcaggctgccgctttcgccggatgccgctatacaggaaaaccttgtcaaaaagctggcgcagctgcacctttccggcacggccaaggtctgcgaaaagtatatgcgggacgccgtcaacgcctttttgtccggtgaaagctacggcaatttccaggcgcggctgctggcggaacagggccgcggcccggcggcgcgcgctgcggggacctgtgtcaagctgccgcctttccccaaagacgccgacttcgccaaaaacccggtggtggcgcgcagcctgaacgaagcgcgcaaggtcatcaacgctgtggtggctcggtatggttcgccctgggccgtcaaccttgaagtggccagtgagctgggccgctcctatgccgagcgtgcggagatcgaaagcggcataaaaaagaacgaggcggccgccgaggctgaacgcaaaaaaatcgctgaaatcatgggctttacagacctcgcccgggtcagcagcagcatgctcgagcgctaccgcctggccgaactgcagggctggaagagcctgtacagcggcagagagttcacggacgaacaagccgtgctggacccgcgcaatgctcttgtcgaagttgaccatattgtgccgttttcgctgattttggacaacaccctgcacaacaaggcccttgtttttgccgaggaaaaccgcgtgaaaggccagcgcgtgccgttggaatacctgactgacccggccggccgcaaagcctttataaagtgggtcaacaagctggcggcggagaaaaagatcagccgacgcaagcatcaatacctgttgctgcctgatctgcacgaatccggcctgctggatgaatggaagacacgcaacatcaatgacacgcgctatatcgccaagtatctgcgcggctatctcgagcgcaacctcaaaccggccgccgaacaccgcagccagtttgtcttcccggtcaagggcgggctgaccagccgcttccgccgccggtggctcaatgacaagacctggggccgcaaagataaggacgagctgcgcagcctgaccacactgcaccatgcggtggacgctgtcatcatcgccaacctcaccccggccacggcctttattgcggaagcaaacttccgcctgcaccgtgtctacaaaatggccgggcaccggaaaaacgcggagtattgggacctgtacaacaaggaccttgataccctgaccacctatttccactacccgcgcgcactggcagagcgcagcctggacagcgagcgcggcggtccggacggcctcgacatcaccgccctgatcgagcgcctccacgaggaggtcgacgtccgcttcggcgaacccggccaggacccggacccggccgagtacagccgccgtgtggccgctttctaccacgacgacccggcctttgccgccacattgcgcccgatcttgaccagccgcaagcaggaacgcaagtggcagggcacgctgaccggcggcaacccgcagggcgcggtggaagtggacggcgtgctgctggggcgcacgcgcacaaatgtgctggagctgacccgcaaggacctcgaccgcctgtataccaacgacggccacctgcgcgatacgcttgcagctgctttcgccgcggcacagagcgataaaaccaagctgagcgaactgttggcggcgcagggtaaaaccgagttccgcaccaacaaggggcggctggtccataaggtaacgctgaaaggcggcgcgctggacaatttctatatcaagcagatcggcgcgcacaaccgcagtgtgctggaaacgagcgaatattattgcgtcgaagtttaccgcgacacaaaagggcagaccaaagtgcgcggtatccgccgcatagatgtgacacacaaagataagaaactctggctgacctgcccgtacccggcggagtatgcggaacatgtgatgtacctgttcaagaatgattacattacagtggaaacaaagaacggattaatgtttgaagggtattatcagagctcgtcggggataaagcagaacaaatttaacggaaaaaagaagaatggggttcaaacagttcaattccgaatttccggtacagcgattgtaaaaaaatatgatgttgacatccttggccgaaagggcggtgagattcgatgtggcgcacccttatcgttactgccggagaaaaactgaccgtaaaggacaactggctgcatgtgtacagcccgcagcaggaggcccgcgtccccattggggacctgtattccgttgtggtcgacaaccgccaggccctcctcagtgtgtcggttttgacccggctggcccaggcgggcgtccatctgcttctctgcgatgaaaagcacctgccctgcgccgagctgctgcccttgggtttacactatcgcccgctgaccgtgctgcaaaagcagatgaccctgccgcagccgttcaaggaccagctgtggcagcgcatcgttatggctaagatacaaaaccaggccaaagccctgcggttggccggggtgggcagcggcaaggcgcaaaagctggaagaactggccctgcgcgtgctgcccggcgatgcgggcaaccgcgaagcccaggcggccaagctgtacttcccggcgctgttcggcgccgggttcacccgcacgcaggcggatgtgaccaacgccgcgctcaactacggctatgcgatcatccgttcggccgtcagcaaaacggtggctggttacggctattccggcgtgctggggctgcaccacagcggccccggcaacgccttcaacctggccgacgatttgatggaaccgctgcgcccgctggtcgacctgtggaccgacgcccattgcgacgacctttatgaagagctgacccgtgccaatcgccgcggcctgatcgaccttgtcaaccaggcggtcgtttttgacggcagaaaaatgcgggtccgctatgccatcgaccagtatgtcaaaagcctgaccagcgccattgaagggcaggacgcgggcctgctgcgcctgccggtgctgacgcgcgccgacccgctgtttgaggatgaacaggatggctgaccgctttatgagactgctcgtttttttcgacctgcccgtcaacaccaaaaaacgccgcagggaatacgcccgcttccgcaaggcgctgatccaggacggctttttgatgctgcaatactcggtctatgtgcgcctggcccgcaactacgacgacgccaaaaagcacatgcgctatgtggaggataacctgccgcccgccggttcggtgcgtgcgctgaccatcaccgataagcagtatgtgcaaatgaagatcctttgcggccaggccatggcggacgaacatttccttgacagcagggacctgctggaagtataattttagtggatagaatatggccaaaaccgcagttcctaccatattttgcggttttggttctctgatggatattgataagctgatactggccgcgacggcgctgtgaagtacgcaaagttttggttctctgatggatattgataagctgatacgaccaatcgcggcgacgccattatcggcatgttttggttctctgatggatattgataagctgataccaccggcgagagggcacacgccgccaccacgttttggttctctgatggatattgataagctgatactctgtctgcgacagatcaacgaacgacacggttttggttctctgatggatattgataagctgatacggtcacggctgccgacggcacgaccacccagttttggttctctgatggatattgataagctgataccgcagacattaacgaggcgatcgtccccggttttggttctctgatggatattgataagctgatacggaaatatcggcaaaatgcacgccgctttggttttggttctctgatggatattgataagctgatacacctgtcggattgtacataacgcacacctcgttttggttctctgatggatattgataagctgatacggattgcattgaattctaatgcaaaaaacagttttggttctctgatggatattgataagctgatacgcacagctcatagacgctgcgcttgccgtagttttggttctctgatggatattgataagctgatacgaaagaatccacctcgatctgcgatttctcgttttggttctctgatggatattgataagctgatacctggacgattggagggaacgccatgacaaagttttggttctctgatggatattgataagctgatactgacggtgttgtcactcaagatgtagtatagttttggttctctgatggatattgataagctgatacctgcgcaaagtgcggacggacagccagtagttttggttctctgatggatattgataagcggatacactttcccgtatctctctataaaaattgaaaattcaaaaggaggtccccatgtccacactttcaaacggcgtctatgaaaaatacggcgcgcactatgctaccctcaccctcaccgatggcccctatgccctcaccgttacgccggagaagggcggcatggcgacctcgttcacaaaggatggcgaggagtacctctggctgcgcgacaaaaactttgaatcgaccgaccgcccgcgctgcggcatccccatcctgttccccagctgcagcaagccggacggcggcgtgcacattttcggcggccaggcctaccccatcgagatccacggctttgccgacctgctgccctggcaggtggccaaagcggacgacgaggccattgaactgacgctgacccccaacggcctgaccaagttctgctatccgtttgatttcaagctgaccatgcgctacaccctcgcgggcaacaccgcgcacctggccctgaccgtcgccaacaccggcgacaagcccctgccgttcagcgtcggcttccacccctattttgccaccagcgcgctggaaaacgtgcgctttgacatcacggccgctacctgctccgaaagcccgaccggcccgcagcctgccgcccccgcgcagatcacgctgaccaagacccccggcgcggccgactccacccgcctgttgaccggcgtcaagagcccgatggtgctctccgattccggcaacggccacaaggtcacggtcgcctttgacgaaaccaagttcggcaaagccatcctctggcagcagagcgccgagagctttgtctgcatggaaccctggaacggctgggccaacagcgtcaacgaggcaggcaagcacgaagagctcgcccccggcgccgaaagcaccttcgcctggtccgtcacgatcgaataacccaccccaaacaccacgcggccccgccggtcttctgcccggcggggccgcgttttggctgttgtttatcgcgtctggtgcagcacataggtctctatggcggcggcgacgccgtcgtggttgttgtccagcgtgatcacgtcggcggcggccagcacgtcggggctggcgttgcccatcgccacgcccagcccggcggcgcggatcatctccaggtcgttgccgctgtcgccgcaggccatcacctggcggcggtccagccccagttcggccgccagcgccagcaggccgcgccccttgttcacaccgggggcgtttacttccaggttgcgcggcatgctgctggtgatctccacccccgggcaggccgccgccaacgcggctttggctgcgtcgcggacagtgtcgtccgggtacaggatgctgaacttttccacctggccgctgtgcgccgccatataggcgggcaggtcgggcacaacatggcggctggcccgcacatagggcagcagcgcgggcgggcagacatcctccatgcgcgcggcgctgtcggcgtcggcgcagcagccgccgtcaataaaaatgcccagcacgccgccaaacggccgcagcgccgccagcacggcccgggccagcgcgtcgtcaaacggcaggcgcaccacgctgcgcccggtggccagctccaccacgctggcgccgttggcggtcagcgcatagcgcacgccgggcatgtgcaaaaattcctccggcacgcccgcggcctgccgcccggtggcggggatcacgtcaacgccgcggtccagcgccgcgcggaaagcccgcagcgtgcgcgggctgatgttcttctcatcgtcaaaaaccgtgccgtccaggtcaagcgcgaccaggcggatatcccagtggggcataggcgtctcccttctgcttcgcaaccgtcattttcaccaaatattctaccgcattttttgccatcctgcaatgccccgcccccgcttgacgtttgccgccgtccgcgctatgatgggacggatgaaaccccaacagggaagggaggcgggcgcgatgccccaccgtaccgggccgcggctgtggcagctggatgcgctgcgcggcctggcccttgtcaatatgatcgcctaccacgcgctgtacgactgggtctatgtctttggcctgccctgcgcctggtacgatatcagcgcgccgggctgccacatctggcagcagtatatctgctggagctttctgctcatcgccgggttcagcttcacgctttcgcgcgcgccgcttaaaaacggcctgctcacgcttggctgcgccgcggtgctgaccgttgtcacagcggtgttcctgcccggccaggccatctggttcggcgtgctgcatttaaccggctgcgcgctggtgctcacggcgctgctgcgcccggtctggcagcgcatccccccggccgccgggctggcggtgtcggcggcggcgttcgcgctgctcaaccagctgccgtccggctggctcgggttcgaggggctacgccttgtacggctgcctgcggcgctgtaccgcccgaactggttctggctcggcctgccggatttgagccgtttttcttcggccgattatttcccgctgctgccgtggctgtttcttttttggtgcgggtattttatcgcccgcctgtgcgggcgcgaacgcctgcgcgccgccgcggccccgccgcccgccgcgctgcgcgggctgtgctgcgccgggcggcacacgctgctgctttacatgctgcaccagccggttgtgtacggggcactgtggctgtacgcggcgcacaatttgtaaactttgtgcgaatttggacgatgcggctaaaacaaggttgacagggcccggtgctttatagtatactttttgttactggttgattagaaatttttgaccggcaaactcctgtctgaagaccaagggagggatagagatgtcggagatccgtgtcaaggagggcgaatccctggagagcgctctgcgccgtttcaagcgcagcaccgcccgcagtggtgtcctggccgaggtgcgcaagcgcgaggcgtatgagaagccttccgtgcgccgcaagaagaagtccgaagccgcccgcaagcgcaagtacaagtaattccgccgcaaggcgttttaccaaggtatgaatcggaacggcagggcgcggcggcgcggtgctgtacaccgcgctccgcacccaaaagcaggcccgcaccgcgggcctgctttttcttttgagagccaaatgagagtttagagtgaagagtttagagtgaagattcggaacgcggccgccggccgcgatcaaaaaattgccacaacgtttctctctgttttttgagccgcccgcagggcggcggtccaccaaatctaaactctgaactctaaactctaaactctaagaaatcaactcttaactctgaacttttaactctaagtaaaagaccggaggtttctatgctattgaccccagaggttgttttccggcgggtagaggcgatcacgccggaggtgctgcgccggatgggcatcacggcgcttgtgctggatgtcgacaacaccctcaccggcgacggcagccagcagctggacgacagcgtcgcggcctggcttgcggccatgcgcgccgcaggcatcagtttgaccatcgtctccaacaacaccgcccgccgcgtgcgcccgtttgccgagcgcatcggcctggcctgggtcccgctggcctgcaagccgctgccgccggggctcatgaccgcgcgccgccgcctgggcgttgcgcggcggcagatggccatggtcggcgaccagatctttaccgaccgcctggccgccgggctgtatggcatccgctgcctgtatgtgctgccgcgcaccccgcacgacaaaaaccgcggcgtgcgcttcaagcgcaggctggaaaagccgtttttgcggcgctactatgaaaaaggcgggaaaacgtatgaatgagacccacagcgccccgcgcttcggcacggccggcctttcggacagctacaccggcaagacgccggcggacatcgcggcttacacggcctcgttcggcctcacggcgtttgagtaccagtgcggccgcggcgtgcgcatcagcgccgggcgcgcggccatgctcggtgcggcgtgcgcggaaaagggcatcgccctttcggtgcacgcgccctattacatcagcatgtccagcctggaagaagaaaagcgcctgcgcagcgtcgactatattttgcagagctgcgccgccgtcaaggcgatgggcgggcggcgggtcgtgttccattccgggtcctgcggcaagcagagccgggagcaggcgctggaaaaagcgctcgacacgatgcgccgcgccgtcgccgccgtcgatgccgccgggtacggcgattgcatcctctgccccgagacgatgggcaaggtcaaccagctcggcacgctggatgaagtcctggccctgtgcgccgtcgacgaacgcatcacgccctgcatcgacttcggccatctctacgcccgcagccagggcgcgcagtttgccgaaaacgccgcggccgactacgccgctttgctcgaccggctggaggaagcgctcggcgatgcgcgcgcacggtgcttccacgcgcatttttcgcgcatcgcctataccaaaggcggcgaaaaatgccacctgaccctggccgatacgcagtacggcccgccgcacgaaccgctgctgcggctggtcaagcagcgcagccttgcgccgaccatcatctgcgaatcggacggcacgcaggccgaggacgccgccgccctcgccgcggcctatgcggcggccggggcgtaaaagcacggcggccgggcagatttttgccttttttgcccgctgcggccgcaaaacacttgcaaagccgcccgttttatattacaataataaacaggtatgttatttactgaattttgtattggaggaatccttttatgatctctgcaggcgagttccgcaacggcgtcaccttcgaacaggacggccaggtccttcaggtcgttgagttccagcacgtcaagcccggcaagggcgcggccttcgtgcgtaccaagaccaagaacgtcatcaccggcgctgtcaccgagaccagctacaaccccaccgccaagttcccccaggcgttcatcgagcgcaaggaagtgacctactcctacgaggacggcgacctgtaccatttcatggacaacgagacctacgacgacatcccggtcaacgccgccgatgtgcctgataacttcaagttctgcaaggagaacgaagtctgtaagctgctgtcctacaagggcaaggtcttcagcgtcgagatccccaacttcatcgagctcgagatcaccgagaccgagcccggcttcaagggcaacaccgccaccaacaccctcaagcctgccaaggtcgagaccggcgccgagatccgcgtgccgctgttcatcaacgagggcgacaagatccgcatcgacacccgcaccggtgaatacatggagcgtgtgaactgatttttacaatcccctgaccgggaaaaggagggacccgctatggcgatggacctgaacgcgaaagccgcctatatccgcggcctgatgaatggcatggagttcgaccccaacagcaaaaacggccgcatcatcgctgcgatgatggacctgctggaagcgatggccgccaccgtgaccgagcatgacgacgccctggaccaggtctatgacgaactggacgccatggacgaggacatggacgatctgaccagcgccctgttcgacatcgacgatgaggacgaggacgatatggacagcgaggccgagtacgaagtcacctgccccaactgcggcgtggtgacggcggtggacgaggacaccctgctcaaccaggagcttgtctgccccagctgcggcgctaccttcggcattgagctggcccccgacgaggaggacgaggacgccgaagaagcgcccgccgcccccgccgatgcgaccgagatcaagatcgactgatcccgccgcccggccccaacaaccagaataaacacctgcgccccggccgctaaggccggggcgcttttgtgtgctgctaaaggggctgtttctgtgtcatacggctctttcggcagaatgggaaaacaaacggcttttttcggccggtagggaaccacgcatctgccccggccgggtcaaacgacccggaggagccggtactggtcaatgccctgcgcaatgtcgaacacatacatccgctcgccgccgtcttccgcttctgcaatcaggcgcagctcttcgccttccacttcgacatgggcgctgtcaaaatcggactcgagatactccatcgcggggaccagcaggattcggtcggcgtccgcctcaaagcggacgaccatatcctctgcggggatcgcgctttcaaaaaaggcgaggtcgccgatcccgaggtgcgcggccgtaaacgcaacaaaatcgtcggccgggatcacgttataattccggatcatgccgtcctgctcaagatagacgacctcgctgcaggcatctggatagatgccataaaaacaatccagcatgcaccggctcaggcggaacgcagccttgctgtcagcttcctcgatggtttcgacagggtcggggagggcgatggtgagatagtaggcgaaggtgtggaattcatcggcgtcgagccccggcggcggctcaaaaagcacttcgtctttaagcatgaccgcgcccggcgcatagacggcggtttccgccggtttaggggaaggttcgggggccatggtgggctgcgcggccggctgcggcgctgcggtcggcgcaggcgtttcggtttcggacggcggcactgcggcctggcccggcgcagcaggcccgcgggcgcaccccgccagcagcgccgcgcacaaaacggcgggcagaacgatcttgctgcttttgcgtttcatggaaacaaccctcccgctcctgcttttggtacttccattctaccccgttcggggttcttttgtccagaacaaaaccgccgcccggcaaagttttacacccctgggcgggcggcggttcgcctgcgaacgggatattacataatggcttggccctgcatataatacacggcgtataacaaaaacagcgctccttcgcccgccagcagcgccgcgcgcagcgcgggccgccgcacgctgcccaaagccaggaacagcccgacgcagccgaacagataccgcccgcccgagatcagccacgagcttaaatagctcatgccgaaataggccagcgcgtagatgcccgccgccggggccgtgccgcgccacagcaaaaacgccagcgccgccagccccacaaagtagagcacaagctgcgggatgtagatgaaccgcgccaggccggggtaatcctgcgccatgccgaactgctgcacaaggttcgccccgaaccactgcgcatgctggtaccacggcgcgacgctctggtggtaaaggtagcggaagaagtccccctgtacggcccagttgaggcacagatacgccccgtacccggccggggcccccagcacggccgcccagccgccgcggcgttcgcggcgcggcgcggccagcacggcaaacagcgctgcgaacaggagcgccagcccctgcgtgcggcacagcgccgcaagggcggccgccacccccgccgcaccccagcgccgcgtctccagcagatagaggcagccgaggctcagcagcaaaaacaggccctcggtataaacgccaaaggcaaagaaggcaaacggatacaaaagcagcgccgccgccgcgcagcgggccccgcccgcggtcagccgccgcccgg

SEQ ID NO: 4483 - DNA, 23573 bp, synthetic construct
  misc_feature 1..23573: note = Synthetic
  source 1..23573: mol_type = other DNA
tggaaggaagccggcatcaccgtcatcccggtggtggccgcggcggtgctggccaagcacctggcccgcaccggggtggacgccgtcatcgccgaaggcaccgagagcggcggccatgtgggcgaaatgaccaccatggccctggtgccccaggtggcggacgcggtggacctgccggtcatcgcggccggcggcatcgccgacggccgccagctggccgccgcctttgcgctgggggcggcgggcgcccaggtgggcacctgcctgctggtggccaaggaatgcccgatccacgacaactacaaggccgccctcatcaaggccaaggacagcgataccatcgtcaccggccgcatcggcggcacgccggtccgggtgctcaagaacaagatggcccgggaatatgtccgccaggaaaaggccggcgccgacaagatggagctggaaaagtacaccctgggcagcctgcgccgcgccgtctttgagggcgacaccgacaccggcagcctgatggccggccaggtggccggcatgctcaaggaggtccgcccggtggcggacatcctggctgacctgatggacggctgccgcgcccgcctgggcgagctgggcggcctgaacgtctgaaccgcaacttttgccgaaggagaaccaagcatgaaacttgcttttatgtatgccggccagggcagccagcacgccgggatgggcgccgacctgtacgagagcagccaggcgttccgcaccgtctttgacgccgccgcccaggctgtggactttgacctgaagtcggtctgcttcaccgacccggagggggtcatcaaccagacccagtacacccagccctgcatggtggccttcgccgccggcgtcaccgccatgctggccgagcagggcatccgccccgcctacgccgccggcctgtccctgggcgagtattcggcgctggaatgcgccggcgtgctggacgcccgcaccgccgttgagctggtggccttccgcggcaaggcgatggccaaggcttccgaagggctggactgcggcatgaccgccgtgctggccctggaccgggagcccctgcagcgctgctgcgacgaggcttcggccctgggcgtcgtgcagatctgcaactacaactgccccgggcagctggtcatcggcggcgaaaaggccgccgtggacaaggccgccgagctggccaaggcggccggcgccaagcgctgcctgcccctgaaggtcagcgggcccttccacaccagcctgatgcacccggccggcgacgcgctggccgagcggttccgcaccgtcaccttcgcgccgatgcagctgccggtgctcttcaactgcctgggccgggaaaagtccgacgccgacaccatccccgccctgctggagcgccaggtgcagaacagcgtctacctggaggacaccatccgccgcctggccgagctgggggtggacaccatcgtggaggtgggccccggccacgccatcagcgggtttgtgaaaaagaccgtgggcgccgccatcacctgcctgcccatcgagaccgccgccgactttgacaaggcgctggccgcactgaagggggagggctgaaccatggctgaaaacacccgtcccaccgcgctggtgaccggcggcggccgcggcatcggccgggccatcacgctggcgctggccgaagcgggcttcgatgtctgcatcaactatgcgggcaacgccgccgcggccgaacagaccgccgaggccgcccgggccctgggcgcccgggccttcatccgccaggccgatgtcaccgacccggccgcctgcaaggcgctggtggaaggcgccgccgccgacctgggccggctggatgtgctggtcaacaacgccggcgtcaccgccgacaagctgatgctgcgcatggaggaagccgacttcgacaaggtcatcaacgccaacctcaagggggccttcttctgctgcaaggccgccagcaagatcatgatgcgccagcgctacgggcggatcatcagcatcagcagcgtggtggggctgcacggcaacgccggccagaccaactacgccgctagcaaggcgggccttatcggcctgaccaaaagcctggccaaagaattcgcggcccggggcatcacggtgaacgccgtggcccccggcttcatcgccacggatatgaccgacgccatgcccgaagccgccaagaccgccaccctggccgccgtgccggtgggccgggtgggcgagcccggtgaggtggccgccgcggtggccttcctggccagccctgcggcctcctacatcaccgggcaggtgctgtgcgtggacggcggtatgggaatgtgaaaaccgggccccggcccggacgctgattggctttttgtaacgcattcattcgggaggaagatatggataaacgcagagtcgtgatcaccggcctcggcaccgtcaaccccaccggcaacacggtggcgcagagctgggccgctgtccgcaacggggtgtgcggcgtcgggcccatcacccactatgacaccagcaacagcaagaccaagctggccgccgaggtcaaggactttgaccccgcggtccgggtggacaagcgggaaagccgcaaaatggcccgcttcacccagttcgccatggccgctgccatcgaggcgatggaggacgccggcattgatatggaaaagaccgacgccacccgcttcgccaccatcgtgtcggcgggcatcggcggcctgcccaatatggaggaggagcacgccaagggcgagcagaagggttttgaccgggtcagccccttctttgtgcccatgaccatcgccaacatggccgccggccagatcgccattcgcttcgggctcaagggcatgtgcgtggcgccggtcaccgcctgcgccggcggcaccaacgccattggcgatgccttccaccgcatccgggacggctacgaggacctggccctgtgcggcggcgctgaaagctgcatcagcccgctgggcgtgggcggcttcaccagcatgaaggcgctgaccgccgccaccgacccggcccgggcgtccctgccctttgacgccgagcgcggcggcttcgtgatcggcgagggcgccggcatcctcgttctggaggagctggagcacgccctggcccgcggcgccaagatctatgccgaggtggtgggctacggcaccaactgcgacgcccaccacatcaccgccccggcccccggcggcgccggcggcgcggcctgcatgcagctggccctggccgacgcgggcatccgccccgaggacatcggctacatcaacgcccacggcaccggcacccacctgaacgacagctgcgagaccgaggccatcaagaccgccttcggggcccacgcctacaagctgcacatctccagcaccaagtcgatgaccggccacctgctgggcgccgccggcggggtggagggcatcttcaccgccctggccctgcacgacggctacctgcccgccaccatcaacctgaaggtgcccgaccccgcctgcgacctggactacatccccaacgtgggcctcaacgagcaggtggagtacgccatgagcgacagcctgggcttcggcggccacaacgcctgcgttatcttcaagcgctgggagggataaaggatggcgattgttgcaaacgacccgccgcgcaccctgaacgcggcgcagatcgcacagatcctgccccaccgctatcccttcgcgctgctggacaagatcaccgactacacccccggccagtgggcccggggcgtcaagtgcgtgaccatgaacgagcccttcttccaggggcatttccccggccagccggtcatgcccggcgtgctgatcctggaagcgctggcccagtgcggcgccgtggccgccctgagcgaagagggcagccagggcaagctggccctgttcggcggggtgaaaaacgcccgcttccgccgccaggtggtgcccggcgacgtgctgacgctggaatgcgaactggtggaacgccacggcccgctgggcatcggcaaagccaccgcctgggtggacggccagcgcgctgtgaacgccgagctgacctttgccatcgtggaccgggggtgagcgcttgccgggcaaatatgcagcgccccctgctgctgcccgccgcccgctgcccgcgcccggccgctgccggcgcccgcggcgcacagcggctgcccggggggcgcccggccgcaaaccgaccgaacggcaggaggtttttgccatgttggatcaggcttttgaacaggtgtataccaaattcaaactgcacttttatcagcagatcttcagcaagttcgaaaaccgggaagcgaccctgaccacggtagagtccttctgcatggaggtcatcctggcgctgggccagcccaccatcgcggaattttccaagctgatgaacctttccacccccaacgcctcctacaagatcaacaacctggtcaagaagggatacctgaaaaaggtgcagtccagtgcggacaagagggagtaccacctggtccccaccaaaaagtacatcgactactacaacatcagctacgcctacctgcaggaagtggtggaccgcgccaaacagcgcttcacccccgaagacctgcagaaactggagcagatgctgcacatcgtctcggacgaactgatgcccgagatcccgctgccctcccgcgcctcggcccccgccgaagggtgaaggcggccgtgcgcggccggtgccccttttacatcgtgccggacttctcaaaacaaaagcgcagcccccgccgcaaggcgggggctgcgcttttgcttttgcttttgctttgtctgcgggggcggctcacaggccgaagtaccgcttggcgttgttgtagctgatgccctccacgatcttcttcagggtcttctcatcgttgggatactcgccgttctcgacccactggcccaccaggttgcacatcaggcggcggaacagctcgtggcgggtgtaggacaggaagctgcggctgtcggtcagcatcccgatgaagttgcccagcaggcccaggcgggccagggtgcgcatctgctggtacatgccgtcgttggtgtcgcagaaccaccaggcggagcccagctggatcttgcccggcacctcgtccccctggaaggagccgatcatcgtgcccagcatgtcaaagtcggaggggttcaggctgtacaggatcacccggggcagctcgtcggtctcggtcagcttggacatcaggctgctcagcgtcacgctggcgtcggtcacggcgatcatgtcaaagccggtgtcggggcccagcttgcgcagcatcttggcgttggggttgcgcaggcagctgtagtggacctgcatgaccacgttgtacttcttgtacatcttggcgcaggccaccagcaggaaggtgatgtaggcgtcccgctcctccttgctgacctcctcgccggccatcgccttcttgaaggcggtggtggccaggtcggggtcgtccacatagggcacatagtccaggccgtggtcggcggcgcggcagcccatctccacaaagaactgcagccgctcctccagcgccttggccacgcagttggcgcaggcaaacttgcggcccacgacctcttccagcttgtggatgtattccacaaagccggccttgtggatgttcagcgccttgtccgggcggaaggagggggccaccaccacctggatgctggggtcttccttgatcttcttgtgccattccaggctgtcgatgggatcatcggtggtgcccaccatcgccacgttgctctgggcgatcaggccgcgcaccgtcatgttggggtcgttctgcagcttgtcgttgcacaggttccacacttcctcggcggtgtccccgttgagcacgccgtcatagccgaagtacttcttcagctccaggtggcaccaggtgtacatcgggttgccgatggccatttccagcgcctcggcaaacttctggaaccgctcgcggtcgggcttgtcgccggtgatatactcttcgggcacgccgttggagcgcatgacccgccacttgtagtggtcgccgaaatagtagtccgacccgtcggccagcacctgatggccgcccagccacacctgcgcgatgttttcaaaccggcgatcctcatagatctcctgcgggggaatgtggcagtggtagtcgatgatcggcagcgaagccgcgtaatcgtggtacagatgctgcgccgtaggggtgtccaaaaggaagtctttgtccataaatgccttcataaacaggtctcctttgctttgcagggtggcaccgggagggaacatttcctgcgccttcccggtgagagaataaaacagaacctgataccattatacccagttgcggcaagggggacaagttgcaaaaattgcccgatgtcaaaaataacagccaaaaattcgactgaatccttgtgcaaaacgcagaaaatgcaaactaacatgtcaggagagcaaaatatgtgcggttcgcaccgtatgaaccttgacgcaccgacggaaaaaaactagaatggctacagatgcggccggcctccccgcggtgcgggcgggcccggccggggagtgcaggggcgcggccggcctggtccgcaccgcgcagaattgattcaacgcaaggagagtttaccatggaaacactgaattacgaagttctcgcaaaatccgggtatcagggctacatcctcaaagatgcccctgaaaaggtcctgcagtttggcgagggcaatttcctgcgtgcgttcgtggattactggttcgatgtgtccaacgagaaggcgggctggaacggcaagtgctgcctggtgcagcccatcgccccgggcctggccaagctgatgaacgcccagcaggggctgtacaccctgtacctgcgcgggcggcaggacggcgaaaaggtggaccggaaacgggtgatctccagcgtgtcccgctgcctgaacccctatgagaaggcggactacgacgccatgatggaggtcgccgtgtccgatgcgctggagtacatcgtctccaacaccaccgaggccggcatcgtctacgacccggcctgccgccaggaggactgcccgccctccagcttccccgccaagctgacccaggtgctctacgcccgctggaaggccggcaagcccggggtggtggtgctctcctgcgagctcatcgacaacaacggcaaggaactgctcaagtgcgtcaaccggtacatcgaccagtgggggctggaaacggacttccgcgcctgggtcaacggggactgcaccttctgctccaccctggtggaccgcatcgtgcccggccgcatccgcgacccggaggaggtcgcccgcctggaggccgagaacggctaccacgacgagctgatcgacgtgggcgagatcttcggcgtctggaacatcgaaggccccgactggctggcggacaagctgcccttcaaggcggcggggctcaactgcccggtggtgcccgacgtgaccccctacaagaaacgcaaggtccgcatcctgaacggcgcccacaccggctttgtgctgggggcctatctggccggctttgacatcgtgcgggactgcatgcacgacgacaccatccgcggctttatgaacaagatgctgctggaggaggttgtgcccatcctgccgctggaccaggaggactgccgccggtttgccgccgccgtggaggaccggttcaacaaccccttcgtcaaccatgagctcatgagcatctccctcaactccacctccaagtggcgggcccgcaacatgccctccttcctggaatatgtggagaagaacggcagcctgcccgcctgcctgaccatgagcttcgcggcctacctggccttctattcctgcgacattcaggcactgaccgacaagggcctggtctgcaggcggccggccggcaacgagtacaccatcagcgacgaccgctgggtgctggaattctacaacgcccacaagggcgacgacatccccgccctggtccatgcggtcatgaccaacgaacagatgtggggccaggacctgacccgggtggagggctttgaggccgccaccgtccgcaacctggaaaccatccgcacccagggggccaaagcggccttcgccagctgcctgtgaccgccgcaaaggagccgaccatgcctctcaccatccatatcaacccggccgacaatgtggtcgtggcgctgcaccccatcgcccggggcacggcggtggacctgcccgacctggggtacgccgtcaccgccgccgaggacatcccgcagggccacaagatggccattgcgcccatcgccgccggggaaaacgtcatcaagtacggctttcccatcggccatgccaccgccgacgccgcccccggcgcctggatgcacacccacaacctgaagaccaacctttccggcgaggtggcgtatacctaccaccccgacctgcacccgctgaccccggcggaacccgggaccttcctgggcttccgccgtgccgacggccgggcggccatccgcaacgagatctggatcatccccaccgtgggctgcgtcaacgactgcgccaaggccctggtgcgggacaaccaggacctggtcaccggcaccatcgacggtctgtacaccttcccccatcccttcggctgcagccagaccggccatgaccacgcccagacccgcaagctgctggccgcgctggtccgccaccccaacgcggcggcggtgctggtgctcagcctggggtgcgaaaacctgacccatgagcagttcctggaggaactgggggactatgaccacgaccgggtcaggttcctcacctgccaggaggtggaggacgagctggccgccggccgcgagatcctgaaagaactggccgactatgccggccggttccgccgccagcccatcccggtcagcgagctggtggtgggcatgaagtgcggcgggtcggacgggctgtccggcgtcaccgccaaccccaccatcggccgcttttccgacatgctctgcgcccggggcggctccaccgtgctgaccgaggtgcccgagatgttcggcgccgagggctttctgatgaaccgctgccggaacgaggaggtcttcggcaaggccgtgcggatgatcaacggcttcaaggaatacttcctccgccacaacgaggtggtgtacgaaaaccccagccccggcaacaagcaggggggcatcaccacgctggaggacaagagctgcggctgtgttcagaaagggggcagcgcccccatcatggacgtgatcggctacggcgacgccgtcaccaccaaggggctgaacctgctctacggcccgggcaacgacctggtgtcggccaccgccctcaccgccgccggggcccacctgatcctgttttccaccgggcggggcacccccttcggcgcgccggcgcccaccctcaaggtggccaccaacacccagctggccgaaaagaagcccgcctggatcgattacaacaccggcgtcattgccgacggaaaaatgaccattgacgaaaccgcccgcgggttgtatgatttggttatggaggtagccagcggccgcaaaaccaaggccgaggagaaaggcttccgtgaaatttccatcttcaaagagggcgtcacgctgtaaggcgatttcttttttcggtagaataacaataaagcggaccaattcccagaactcggggattggtccgctttattgtacaccaaaaacttcccttttggattttgctgtgctatactgtacaccagaaacgacaacacaatacagtgttgtcgaaagcaattaaaaatgatggaatattcgggttaccaccataccctgcggcgtaaagccttatcttagaacttctgatggatattgataagctggtacagcttgcaatatggttatctctctgatggatattgataaactgacacatcaaaaatctaagtgcaactttattatatcctgccatcagccttctgtcaacccaaaagaaaaggggaaaacacaatgaaagagtctttgcagtatatccttggactggacatcggcatcgagtctgttggctgggccgtgatccgctgcgccccaacgtaccgcattgaagatgcaggcgtgcgtttgtttgcgaccaccgagcaaaaacaaggcaaaagcaacacaaaccaggaccgccgcatctttcgtgccgcacggcggttagtgcgccgccgcagccaccgcaaggcgatggtaaaacgccatcttgagcgcattggcttgctgcgccccggcgaggtggaagccttctttgaggaaggcggccatgatttgctgcgcctgcgcgtcaaggggctggacgagtgtctttcgccggtcgaactggctgcttgcctaatcaacctgtgcaaccaccgcggctaccgcgagttttatccgctggacgaagaagagaaaaaagaattgaccgccgccaaacgccaggagcgcgagcaggagagccgcggcatcgagcgcgttaaacagatcatggaacagggccagtaccgttcggcggcacagatgcttctgcaggacaagactttcgccccggcggatggcggccctatgcgcgtttaccgcagccatccccacaaggcggaccagtatccgctcagccgggatatgctgcgtaccgaggccgagaagattctgaactgccaaagccaattttacccctgtctgcggcagaattaccagacgctttaccgcaagggcggtgcggaccgccgggtggagatgagcagcacagagttcctgctgcagctcatattcgaacagcgcgattttgaggatggccccggtgacgtcaacgacaagatgcgccgctacaccggctacctgtccacccttggtaagtgccaattctaccacggggaggaccgcggtgcgcgcatgacggcgctgggcgacttgtacgccgcggcgaacgccctgtcccagtaccgttaccttgatacaaagaccggcgagcttgtgctgccgcctgcgcttgcccgtgaactgatgacggccgctttgctggacgcggagctgcccgcaaaaaaaatcaatgacatcgccaagaagtatggtgtgaaagcaaacaacaagggcatcaaaaaaacggagctggctccgaactgcatcaagttcctgcgcgccgtgcgcccggtttttgaatccgagggcattgcttgggcggatgttcttggcgcggacccgctgcaggcgcagatgcagccggattcgctgctcaaccgcatcggccgtgtgctttcccactaccagaccccgcgccgccgccaagaggaactgcgccggttgccgcttgcgccggttgccgccgtaaaggaaacccttgtcaaaaagctggcgcggctgcacctttccggtacggccaaggtctgcgaaaggtatatgagggaagccgtcaacgcctttttgtcgggcgaaagctacggcaatttccaggcgcgactgctggcggaacaggaacgtggccctgcagtacgcgccgcagggaactatgtcaagctgccgcccttccccaaagacgccgattttgccaaaaactcggtggtggcgcgtagcctcaacgaggcgcgcaaggtcatcaatgttgtggtagcgcgatacgggtcgccctgggccgtcaatctcgaagtcgccagtgagctgggccgctcctatgccgagcgcagcgagatcgaaagcaataacaaaaagaatcacgccgcgaccgaggcggaacggaaagcaattgccgagatcatggatattgctgaccctgccaacgtcaaaggcagtatgcttgaacgctaccgcctggccgagctgcaggggtggaggagcttgtacagcggcgcagaatttacggacaaacgcgctgtgcttgacccgcgcagcacccttgttgaagtagaccatattgtgccgttttcgctgattttggataatacgctgcacaacaaggcactcgtttttgccgaagaaaaccgtgtgaagggtcaacgtgtgccgctggaatacctgacggacccggcccggcgcaaggcgttcgtcaagtgggtcaataagctggccgccgataagaagatcagcaagcgtaagcacgaatatttgctactgcaagatctgcacgattccggcttgctggatgaatggaagacccgcaacattaacgacacacgctacattgccaagtatctgcgcggctaccttgagcgtaacctcaagccggccgccgaacaccgcagccaattcgtttttcccgttaaaggcgggctgaccagccgcttccgctgcaaatggctcaatgaaaacacctggggccgcaaagataaggatgaactgcgcaaattgaccacgctgcatcacgcggtggacgcggttattattgccaacctgaccccagccacggcctttattgctgaagccgacttccgtctgcgccgcgtttacaaaatggccggcaaaaggaaaaccagggagtattgggatttgtacaacaaagacctcgacaccttggtcacctatttccactacccgcacgcactggcagagcgcagcctgaatattgagcgcggcggcaaaaacggccttaatattaccgccctgatcgagaggatcaacgaagaagtcgatgttcggttcggtgaacccgggcaagaatcggatccggccgagtacagccgccgcgtggtcgcgttctatcaggatgaccaggcctttgccgctgcattgtgcccgattctgaccagccgcaagcaggagcgcaaatggcaaggaacgctgacgggcggaaacccgctggggtcgatggaagtggacggcgaattgctggggcgcacacgcacggatgtgttgttgctgacccgcaaggacctggaacgtctgtacaccaatgacggcgacctgcgggattcacttgcggctgcttttgcaggggcacaaggcgaaaaaacaaagctgggtgaccttttggcggcgcagggtaagaccgaattccgcacccaaaaaggacggctggtacataaggtgacgctgataggaaaaccattaaatagctattacatcaaacaaatcgatgcgcacaaccgtagtgtgctggagacatccaaatattattgtaccgaaatttaccgtaccaagaaaggcgaaataacaatgcgggctattcgacgtattgatattgtttgcaaaaacaaaaagctctggttggcctgcccatatccggaagattacgtagaacatatgatgtatctctttaagaatgattacattcgtatcatcgaagtggatgggacagaacatgaagggtattatcaaagtgttgcggacactgctagctgtagaattaatgtccttcatgcaaatgaaatagaagcaagggcaccgcgtgttaccatctcgaaacgcagaacaaaagtgatttgcaaatatgacatcgacatccttggccgaaagggcggtgagatccgatgtggcgcacccttatcgttactgccggagaaaaactgaccgtaaaggacaactggctgcacgtgtacagcccgcagcaggaggcacgggtgccgataggcgacctatattctgttgtggtcgataatcgccaggccctcctcagtgtatctgttttgacccaactggccggggccggggtccatgtgctcctttgtgatgataagcatctgccctgtgccgagctgctgccgctggctttgcactaccgtccgctgaccgtgctgcaaaagcagatgacgctgtctcaagacttcaaagatctgctttggcagcgcatcgtaatggctaagatacaaaaccaggccaaagcgctgcgcctggccggggtgggcgccagcaaggcgaagaagctggaagaactggctctgcgtgtgcttcccggcgatgcaggcaaccgcgaagcccaggcggccaagctgtactttccggcactgttcggcgcaggctttactcgcgtgcaaggggatgtgaccaatgcggcgctcaactatggctatgcgatcatccgttcggccgtgagcaaaacagtggccggttatggctattccggcgtgttggggctgcaccatattggccccggcaatgcgttcaacctggccgacgatctgatggaaccgctgcgcccgctggtcgatctttggacagacgcgcattgcgatgacctctatgaagaactgacgcgcaccaatcgccgcgatctgatcgatctggtaaaccatgttgttgtttttgatggaaaaaagatgcgggttcgctatgccattgaccagtatgtcaaaagcctgaccagcgccatcgaggggcaggacgcagggctgctccatctgccggcactgacacgcgacgacccgctgtttgaggatgaacaggatggctgaccgttttatgagattgcttgtctttttcgatttgccggtcaacaccaaaaaacgccgcaaggaatatgcccgtttccgcaaggcattgatacaggacggctttttgatgctgcaatactcagtctatgtgcgcctggcccgtaaccatgatgacgccaaaaaacatctgcgctatgtcgaggacaacctgccgcctaccggttccgtgcgcgccctgaccatcaccgataagcagtatgtgcagatgaagatcctgtgcggccaggctatggcggatgaacatttccttgacagcaaggaattgttggaagtataattttagtggatagaatatgaccaagactgcgattcctactatattttgcggttttggttctctgatggatattgataagctgatacatataatagtcttgtaatcaacaaggagcagttttggttctctgatggatattgataagctgatactcgcgccgctgcggtcgtacacctgctgcggttttggttctctgatggatattgataagctgatacctcttcccaggtctgccccatctcggtgtgttttggttctctgatggatattgataagctgatactctacaagatgctcgaccgcagcgagggtgttttggttctctgatggatattgataagctgatactgacggcgtcggcgtccgccatcttctccagttttggttctctgatggatattgataagctgatactgtcggccacgacctccgccatcgcataggttttggttctctgatggatattgataagctgatacgtcggcgctttccccccacatactggagagttttggttctctgatggatattgataagctgataccggcccgttctgtttcatctctcgcctgtcgttttggttctctgatggatattgataagctgatacttatcaatgtagacagcgctgtactgtgcagttttggttctctgatggatattgataagctgataccgctcatgggtaacacaacgtcccatcccggttttggttctctgatggatattgataagctgatacgtctacccggaggacaactgcatcggccggttttggttctctgatggatattgataagctgatacgtttctccgcgtaattgtaatataaaagtcattgatttagaaggaggctctctatgtcaaaactgtccaccggtacctatgaaaagtacagcgcccgctatgccacgctcaccctcaccgacggcgcctgcgcgctgaccgtcacccccgaaaagggcggcatggccacctcgttcaccaaggacggcgaggagtatctctggctgcgggacaagaacttcgagtccaccgaccgcccccgctgcggcattcccatcctcttccccagctgcagcaagccggaaggcggggtccacatcttcggcggggcggcttatcccatcgagatccacggttttgccgaccttctgccctggcaggtggccaaggccgacgatgaagccatcgagctgaccctgacccccaacggcctgaccaagttctgctaccccttcgacttcaagctcaccatgcgctacaccctggcgggcaacaccgccaacctggccctgactgtcgagaacaccggcgacaagaccctgcccttcagcgtgggcttccacccctacttcgccaccagcgcgctggaaaacgtgaccttcgacatcaccgccgccacctgcagcgagaacgccgccggcgaacagccggccgcccccgcgcagatcaccctgaccaaagtggagggcgcggcggattccacccgcctgctcaccggcgtcaagagcccgatggtcttcaccgatgcgggcaacggccacaaggtcaccgtcgcctttgacgaggccaagttcggcaaggcggtcctttggcagcagagcgccgagagctttgtctgcatggagccctggaacggctgggccaacagcgtcaacgaggccggcaagcacgaggaactggcccccggcgccgcctccaccttcgcctggtctgtcaccatcgaataaaccggccttcccggtctgaacaaaacgccccgctgccaaaaggcagcggggcgttttgcggctgtttcggcgcagcaaagcggcccctgccgcaaggcaggggccgcagaaaaggattcaaaaaacgggatcagccgggctgcttgccgatgtaggccaggatgccgccgtccacatacaggatcaggccgttgacgaagtcggaggcttcggaagccaggaagaccgccgggccgcccaggtcggacgcctcgccccagcggccggccggggtcttggagacgatgaactggtcgaagggatggcgggacccatcgggctggatctcacgcagcggcgcggtctgcggggtggcgatgtagccggggccgatgccgttgcactggatgttgtattcgccgtactcggaagcgatgttcttggtcagcatcttcaggccgcccttggcagcggcgtaggccgaaacggtctcccggcccagctcgctcatcatcgagcagatgttgatgatcttgccgccgccctgttcgatcatgtcgggaatgacggccttggagacgatgaagggggcgttcaggtccacgtcgatgacctggcggaactgggcggcggacatctcgcacatcgggatgcgcttgatgatgccggcgttgttcacgaggatgttgatgtggccgacttcctcggtcaccttcttgatgaaggcgttcacggcgtcctcgtcggtcacgtcgcagacataaccgtgggcgtcaatgccggcttccttgtaggcggccaggcccttgtccacgagctcctgcttgatgtcgttgaagacgatggtggcgccgcagttcgccatggcggtggcgatggcgaagccgatgccgtaggaagcgccggtgatcagggcgaccttgccggtcaggtcaaaagatttcggggtgcagacagacattgtgaaaacctcccaaacatgttgttgcatactatccggacaccgggccggcgcagcgccggccggcggcgggaaacgggggaaagggcgctttcagcgcaggtcggtggtggcgatgttgtccatgtcgtcaaactccatgttttcgccgcccatggcccagatgaaggtgtagttggcggtgcccacgccgctgtggatgctccaggacgggctgatcaccgcgtcgtagttgtgcatcacgatgtggcgggtctcgccgggttcgcccatcatgtggaacaccacctggccttccggcacctcaaagtaggtgtagatctccatgcggcgctcgtgggtatggctgggcatggtgttccagttgctgccgggctccagggcggtcatgcccatcgaaagctggcaggtcttgagcacgctggggtggatgaactggttgatggtgcgcttgttgcaggtctccaggctgcccagggggcgcttggcggcttcgtcgatggtgatgagccgggtctcgtaccggcagtgggccggggccgagaccatgtagaacttggccggctttccggcgtcgtcactccggaaggtgacctccttggtgccctgggtgatgtacaggcagtccttgtagttcaggtggtaggccacgccgtcggcagtgatggtgccggcgccctccccgatgttgaagatgccgatctcccggcgctccaggaaatagtgggtgccgaaattggcccacacgtcgatgcctttgtcgatggagacttcctccttcaccggcatacagcccagggtgaccatgcggtccacatggctgtagacggccacgacctcgtcgggcttgtacagaccggtgatcagaaactcgttgcgggtctcctcggtggtatagcgcttgaagtcgcgctggttgcaggaatagcggatgtccatgccgaaaacctcctgtttgattcggtgcaagaccttgtatacaatcattatagacgaaacccaaagccaaaaaaagtgtatacaagcacaagaatgccccacaaattttgtgcgttttggtcgttttggcggggtgcaaaaagccgggggccctgtgccgccgcagcggacacggcccccggccggtttccatgaaacaggttattccgacgcgatggtggcggtcaccgaaaggccgcgcagccggcgggccggggcccgggcggccagcagcgcactacccgccaccagcgccacgatcaccccgatggcgccccagggcaccgtccagtcggtgccccagcggggggtgatcatgctcaggtacagcgcccggtgcagcggcaggcccagcgccagcccggccgcgcagcccaccgccgcgtagcaggccgactcggccagcaccatctgcagcagctggcgcaccgtcagccccacggcccgcatggcgccgtactggggcagccgggcggacacactcatctggatgcagttgaggatgctcagcaccgtgatcagcgcaatgaccacctcgaacccgtagaagaacaccccgatggccaggtaggccccgcggccttccaggttgctggcccgccggtcgctgaagacatagtccccgccggtggcccggccggccagcgtgcggacctgttccagcgccgcgtcggtgaagccgccctccacctggatgtccaggatcgtgtagccggtctcgccggtcagggcggcgaaggtggcttcgttgcagatcagcagcaccaccccttccacccggtccagcgggctggaggagagcagcccgcccaccgtcagcgagcggcccagcagttccagccggtcgcccacggccagggcggccggccccgccgggtcgtagacggtcagcaccgtaaagtcggcggccgggtccacggcgccctccagcagttcccggccagcccagcggaactggttttcctcataggtcacaaggttcaccgtcaggtcctgcccgtcggcggtccgggcgggcaggttgtaggcaaactgccggccgaacacccgccggaccccctccacgccggccagctcctgctgcagcgccgggtccagcgagcaggtgttgtcggcgctgaccacgctcaggtcgggggcgtagggctgcaccggcttccagccatggtggaaaaactccagcgccgtgtcaaaggccaggaacagcacgatggacagggcaaagctgcccgccaccagcaccaggttgcgccggccggccagcgcatggtggacccccagctgccaggccagccggcggccggtgcggcgcaggccccggcgcaccggcggggtgcccccggcgttgccccgcaccgcggtcagcggcgagaccgcccccgcccggcgggccggggtgcgggcggccagcagcaccgtcaccacccccaccagagcgccgaacaccagcgcgatgggggagagggcgaacatcggcatgtcatagaaatacccgggggccagcgcccgcagcggcgcacacagcccccagctgaccagggtgcccaccgccagcccggccggcaccgccgtggcgcaccactgcagcgactcccgccgcacatagcggcgcacctgccggggggtggcccccaggcagcgcagcagcccgaaaaaggccgtgcgggcggccacgctgctgttcagcgtgccggcgatcatcagcacgccggcggccagcaccagcacaaacaggaccagcgccgtgccgtacagcgaggccagccaccggttggaggtggaaaggtccagcgtcatcagccgggcgttctccttcaaagcgccgtcgggcagggcaaaggcggcctcgatgtcccggatggcccgttgcttgtcggacagcggggtgaaccggatgtagacgttcagctcgtgacggtcgctcaccgccccaaagccgtccagcgtcagcaccacccccgccgcgtcgttgcgggaaagcatcgtggtggtctcgataaagcccacgacggtcagggtgtgggcgccggtggggctctgcaggacaaagctgtcccccagccccaggccctgacggcgggcactctcggtcagcaccgcctcatcgggggcggcgggggcgcggccttccaggatggccagggggaagatctcggtgtaaaaggccgtgtccgacccgcacaccgccacctcctgcccggccagggtgtagccgccgtccagatggtagttggccacgtcgtacagccccaccgcggccacatccggccgggcggccaccacggcagcctggtcggcggtcaggtcggtggtggccacatgccagttgccgtcggtgcggatggccgtccgccgctgggtgcgcagttccatgtccgccatggcaaagatggtggccaccagcgacacggccaacacgatgcagaacagcgtcatccggttctgccgccggtgggcccgggcgctcagcggcaccaggtccagccagctgcgcagggcgggggttttggcagtcttcatccctcagcacctcccaggtcggtcagcaccccgtcgctcacccgcagcacccggtcggcgccggcggccagctcgctgttgtgggtgatcatcagcaccgtctgcccgtacagccgggacgcccgggtcagcagctccatcacctcgcggctgttgcgccggtccaggttgccggtgggctcgtcggccaggatcagcgccggccgggtcatcagtgcccggccgatggccacccgctgctgctgcccgccggacagctgccccggcagatggtgccgccgctcggccaggcccagcgtggccagcagctcctccagctcgtcgccgtcggggcggcggccgtccagcagcagcggaaacaggatgttctgctccacgttcagctcggcgatcaggtggaaggactggaacacaaacccgatccgccggcggcggaacagggtgcggcgctcctcgtccagctcaaacagcggctggccgtcgatgatgacctgcccggcggtgggggtctccagcccgccgatgcagttgagcagggtggatttgcccgacccggactcgcccaccacggcggcgaactcccctttttccaggctgaagctggccccgcgcagcgcgtggaccgcggcgtccccggtcccgtaggtcttggacagatcggtcacttgcagaattggcatacgctccctcactttctgtgcggcccgtatccttcggccgcgcagtctcatcctaccgcgccggggtgacagccgggtgaatcccggcttacgatgttgaaagctgtccgcccgggggcgccgcgggcagaaaggcggccgcctggccgggggtcagcccctgttccagcagcccggcggccagcccttccagcagttcccgccgggccgccccggcccccagcgccgccagccagcccccggccagcccccacaggcagagcccggcggccagccacagcgccccggtcagcaggcggcgggcgccccggtcctgccagaccgacgaaagcgccctcatgcctccccctcccaccggtagccgaacccccgcacggtcagaagatgccggggggcgccggggtcctcctccaccttgctgcgcagccgccgcacatacaccgacagggtgttgtcgtccacaaagtcgccggtgccgtcccacagttcgtccaggatggcccggcgggtcagggtctggccggcgtgccgcaccagcaggcagagcagccggtactcggcggcggtcagttccagcgtccggccgccgcgggtcacccggcagccgggcaggtcgatgaccagcccgccgctgcacagcgtctggggggccgcggcgcccccggcccggcgcagcagcgcccgcagccggctgcacagttcccccagctggaagggcttggtcatgtagtcgtccccgccgccgtccagcccgcggatgatgctgacctcctcgtcggcggcggtcaggaaaaggatcggcaccgccgacccggcggcccgcagttcccggcaaagcccgaacccgctgccgtcgggcaggcccacatccagcaccagcagcgcaaactccccgccggccagcagcttccgggtttcggccagggtggcggcgcgggtcaccgcaaaatcgtttttctccaacgcccaggccagcgcttcggccagggcttcgtcatcttccagcaaaaacagacgggtcatagggggcctcctttctttccccattattatatcacgccgggggcgaagggggcggcaggtgacaaaatcgtaaggcgggaaacctgtacgtctcgggcacacaagatgaaaagatttcactttacaaattaaacgcgttcaactataatcatgcacatacgctcgctgcttcaagggggaagcggaaagcggcccgccgtttcggccgggccgctttcgcaacctgagcccccggcgggcaatacccaccgagggggatgttatgctcacactggacaagatctaccacgcagcctttgcgctgcgggaggtggcccgccgcaccgacctgatcgctgcgccgcggctggccgaggggctgtacctgaaaaccgagaacctgcaggtcaccggcagcttcaagctgcggggggcctattacaagatcagccagctcaccgaagccgagcgggagcggggggtcatcgcctgttcggcgggcaaccacgcccagggggtggcgctggccgcctcccgcatgggcattcccagcgtggtgtgcatgccggacggtgcgcccatcatgaaggtggaaagcaccaagcggctgggcgcccgggtggagctggtgcggggcacctacgacgacgcccatgaccgggccgtggagctgcagcagcagaccggcatgaccttcatccacccttacgacgatgagctggtcatggccgggcagggcaccatcgggctggagatcctggatcagctgcccgacgtgcaggccgtggtggtgcccatcggcggcgggggactgatcgccggggtggcgctggccatcaagagcctgcgccccgaggtgaaggtctacggcgtgcaggccgccggcgcggccagcatgtacgacgcctggaaggccggcagctaccgcaccctcgaccgggtggacacct

SEQ ID NO: 4484 - DNA, 23543 bp, synthetic construct
  misc_feature 1..23543: note = Synthetic
  source 1..23543: mol_type = other DNA
agggtgttttgtaaaagacgaacaacacgagtctgggtggacatggtatgggcctcctgcatgatgttgcttctattataacgcattttgtgcgtcttgtcatggaaaaacgaggcttttccccctggtatatggacgtgtttctctgttttgctgcttttgaaaacaagttcgttaaacctggtggagcatcagctctccccggcggttatgtaccctacagccgaagctgcagggaaatgctcatagctccgtcagccgggagaggatctgccgggcgaggtcggtcagttcttccagctggcagcgcaaggcttctacgtcttggggatagagatagccagttaggtgggcttcgtgggtgtattggttcaggttattgctgcacatctgtaaaagataagccatcctgtgcagctctttcaggtccaaatgcaggcagtagccatccagtgccatcttgcggatataagcactcaaactgtggatccccatagtcagcatctttttatagatgcgattcttttctgttttgcttagtcgaagaatgatcgtttcatctcgattttctttcaccggacatctccttccctattttgagaagttttgaacggctttacaggcgctgccttatccattctttccagggcagaccgaacggaagggcgggggaggtcttccgcctgttccggcttggggcgatggtcctccatatccagctgcgcgttcagctccgcaaggcgagcggacttttccgccagttcttcctcctgcggaaagggcttttcgacctctgcttgcgctgcctgctgctgcgctttcaggttgtctagctcgttctcggcgtgggcgatgcggtctgcaaaggcgttcagggcattgtccagccgggtgatgctgccgtggggatcggtgcccagcgataccgggtagggcaggcggccttttaataccgcctggtactcgctgcggaagggctcgaaccgcagggagagtgcaaatcctcggtagctgcccaccaactgttcctctgtgttcgacagttcagtgcaggccaggagcagccgttcaccagccgattttttctcgtcgtaggtcatgcccttgagggtcatgtcgcagaatgtctcttggccctgcggatgtgccgcagcaatctcagcatccgatttcaaggcggtaatcgttgcagtttgcgcctggatctctgccgggaatttggtcagcagcttgtcttgcagccggaatttctggctctggtggtcggctttcaggacccggagttttgccacctgcacgtccaggtccatcttttctttgatgagcgaattgccggcacacagcgccttgatctccgcataggagagagcctgctcgtccacatcctcacaggagcgcaccgggcttttgctggtcatgatctgggagataaacctttgcttgttctccaaagtttgccagaggtaggcgtcaaatgtcccttcagtgacgtaattataaacgtaaacttgtttgttttgattgccctgacgaataattctgccattgcgctgggtcatgtcgctgggcttccatcctacatccaagtgatgcaccgccaccagccgatcctgcacgttggtgcccgcacccatcttttgggtgctgcccagcaggatgcgtacatccccggagcgcaccttggagaaaagcgccgccttttttgcctcggtgtcagcgttgtggataaactcgatctcgttttccggcaccccggcggccagcagctttgccttgatgtcctcgtacacgttgaagctgccgtcgttttttggggtggagaggtcacagaacaaaagctgggtcagcttctgttctttgccctcctcccagatctgcaacacattccgcacacaggcgttcagcttgctgctcgggtcgtccggcagcaggggattcatcaggcgcacatccagcccgatcttccggccgtcgtttgtgatgcacaacatattgtcctcggatgcatccacgatgccggaatgcaccctggcggcacgctcgctcaggttctgcaccatctctttttggagttcggagggctttgccaccaccgtctcgaacgttgcctccggcaccggaagatggagctggtcgctcgttttgatgtcggctacctccttgaacatattcatgagttccggcagattgaaaaatttggcgaagcgagtccttgcccggtagccggtgccctccggcgcaagctcgatggcggtggtggtctcgccaaaggtggaagcccagcagtcaaagtgggttagctgcttttgctgcaaggtgctgtactggaggtagcgcatgaccgtgtataactcggtcatggagttgctgaccggggtgcccgtggcaaacaccacgccccgcccgctggtcagctcatccatataccggcacttgccaaacatatcgctggatttctgcgcctcgctggtggaaagccccgccacgttcctcatctttgtgtacaaaaagaggttcttaaaattgtgactttcgtccacaaacagccggtctacccccagctgctcaaaggtgatcacatcgtccttgcggtcggcggcccggagtttttccagcttggcctccaggttcttgcgggtcttttccatctgctttacggtaaagcgctccccgttggagtatttcagctctgcaatggcgttctgaacctcctggatctgctcctggatcatgcgctcctgccgctcaaaggacagcgggatgcgctcaaactggctgtgaccgataatgacggcatcgtagtccccggtggcgatgcgggcacagaattttttgcggttggcggtctcaaaatccttcttccgggctaccagcagcttggcgttggggtataggtgcagaaactcgctggcccactgttcggtcaggtggttgggcaccacaaagagggatttctggcacagccccagccattttgcttccatggcagatgccgccatttcgtaggtcttgcccgcaccaacttcgtgtgcaagcagcgtattaccgccatacagcacatgagcgatggcgttgcgctggtgctcccggagggtgatctccgggttcatgcccacgaatttgatgtgggagccatcgtattcacggggtctggtgctgttgaacagctcattgtattgcttcaccagcgcaatgcgccgctgatggtcctgccagacccagtttgcaaaggcatccttgatggactgctgtttctgctgggctaaggtggtctctcgcttgttcagcacccgttttggtttgccatcggcatcctcgagggtgtcatagattcggatgtccttaaggttgagggtctcttccaggatcttgtaggcgttggccaggccggtgccgtaggtctcgcaggaggtgatatctcccttgcccagggcggtcttgccctcaatgcgccattccgctgtgtgaggggagaacttgacggcgatggagcggcgcatatagtagggcacccgaaaggtttcctccatgaacttctggacgatgtcaggggaaagccaggtggcccccaaccgcacatcaatttctgaggcttccagttctctgggctgcgccttggtcagcgcatccacattgaccacaaactccgggttcgtctcaacggcaagctgtgctgtccgcagctttgcccgcacattgccggagaggtattcatccgccgtcttccagcctgcttccgggtcggtgaggtcggcagcagggtccttgaagatcacgccggaaaggtccgtggtaatatgcccgtattcacctggggtccccagcagctgcgccatatagggcaggtccaccttgccatgttccccgatggagaccgccagcgcttcgctgggggtatccacacgggtgacggtgtgttccggtcggatggtgcgtttcgtgaacattgccgccttgctcttgagctgcccctgctcgtccagattttccagagaacagagcagatagtaggaggaatcctgctcaaacagccgcccgtttttgcggtcgttcagcaggccatattttgcggtaaaggtgtcgtagacagcgttcagttttgcctgcgttgcttggatgtcctcatccggaaaggcgttcagctgctggtcgatcagctcgtggacgatctgccgcagctccaccatgcccttgacccgctcttgggcggtgtcggacagcgctacctgggtcatcacggaattttcccggtagtacacctcgccatccactaccgtgtaggagaagtttttgacatctgggtcggcaggcagggtgtgccggacggtttcttcctcggcaatatcgggagtgtctacctcggctgcggtgtactgcccctcgatatgctgcaccgcttgtgcaagctggtctgccagcactgccccctcaatgggtgcaacggtcaagtcgtgaccatattgggtgctttccagcgtgagctgccccagcaccatctccgggtggtctacgaaatattggttgatggcaaagccgtcttccgtccggccaagctgcacccatgcaggttcgatatcggccggacggtcccgcttctgcaaaaagataatatcgctgacaacatccgtgccagcattggcacggaaagcgttgttgggtaaacggatagcacccaacagatcggcacgctctgccatgtgcttgcgggcggtgctgtccttgctgtccagggtgtagcggctggtgacaaagactacgatgccgcccggccgcacctggtcgatggccttggcgaaaaaatagttgtggatggaaaatcccagcttgttgtatgccttgtcgttgaccttgtagttgccaaaaggcacattgcccacggccagatcgaaaaaatccctgcggtcgctggtctcaaagccagcaaccgtaatgtcggcctgcgggtacagtttttgtgcaatgcgcccggtgatgctgtccagctccacaccatacaggcggctggactgcatccccggccatgctctccggcagcatcccgaagaagttgcccacccccatgctcggctccaggatgttgccgctgcggaaccccatgtgctccaatgcattgtagatactacggataacgatggggctggtgtaatgggcattcagggtgctggcacgggcagcggcatattcatcctctgaaagcagtcctttcagctcggcgtactccgtggcccagctgtccttgttggggtcaaaggtatctgccagaccaccccagcccacatactgcgaaagcacctgctgttcctcggcagtggcggcacggtgcccctgtgccagccggaacagggtgcggatggcctccacgttccgggcatatttctgctttgcgccgccctcgcccaaatgctcgtccgtgatacggaagttcccggcaggttcagggacactctccgtgtcaagagcttcatccaaggcagcggcatccgggaaggtctgtacctttccgtcgatcacaacagagacgggcagcttgtccagttcttcatccgacagctccggctcctcctgccgcagtgcatcctcgaactgctgtttgttgatgacctcattgtcccaagaatgaccgtgcgcactggtgtcgatgcgcacatcggtttcgccaacatagccgatagtgccctcgatcgttctggtagacaggtctactacaacttcgtccccaaccttatagatggttgcttcctgcgctgctgtatgctgttctctttcctcatcggtcaggtatcgcccggactggatcatcaggtcgatatactgttcgatcgcagcccatttcagcttgaacggctcccgggcactatgcagagaaaattccatcccggaactgttgtaggtgataaaaccgctccggccatccagataggagtggctgtgcccaccgatgccgtattcctttgccagagctttggcacgaaggtttctatctggctgagtctggaacagctccataatgcgctgctttccctgcgcaaagccagagccggaggtgcgcagttcgtgctcgatctcagcctgtggcaaaacaaaagcggagagcgttttttcgctctccgcttggtctatattctcgatctgctgggcttcggtggggatgcttgcatccagaaaacttagctgtagatcagttccgtcaggatcatttcttccacctgtgctttcagactgttcatgtgctgtacccagcccatctgctggctctccttgtccggggcggggttctgtttcaacagggagtttatcagctgctgcatccggctctgggctgtctgctccaactccaacagatgcgggtacaggctcccgttcagcagcatcgtgtggtacagtaccgggcgatgctccatcagataggcccggcgcatccgtccgtatcggcccagcggtttcggcggctggtgcagggtcaggttcgggagctgatagtccccgatggtcgagtggctcgtgctcgtggtgttcatagtggctcctttcaagattctggcggcgggtgtgggtcttgacggtgcgctcgatctgccgcagcacctcccggctcatgtcgctgaccgccgcacccagcgcaaagacggcatccggagtggagaagtcgcagacagcgtggaaatccgcctggtcaaaccagcctgcgggctggcagccgcagcgttccagcagcgtataggtgacgctgatggcggcggcggacttgaactgcatctccactccggcttcatcatactccatcagcagcgaaccgtccaggatggcatggatgtcctgcccgttgttgtcccagtagctgtccaccaaccggccggaaaggctggccagcagctggggaaaggcgctttcgggcaggtcatactgccgggcaagcatctcggtcacagcggggagcagcggctcggtcacccctgccacagttccggctcacgggagttgcgccgcaccccggtgtccgatacatcaaagacatagcgcagccgggggaagccgctgctttcgtccagcagggcaatgcccttggccccccgtcgcacatagcggttcatccggtcgttccagatgtcataggcagcgcaggcggtggcatccggccgctgggcgtagatcatcagctggtccgaaaaggggtacttgtacagccgggatgcggtggtcaaaaactcggtccaggcttcccagtgccgggtcagtccgctggccgtgcgctgggccagggcgtaatattcttcggttttgcttggcaagggcgggcctcctttcatatgggggtataaaaagagcgggcaaccgttttaggttgcccgcagcggagggagcgtgaaggaaagtcaataaattgaaacgatcaatcttttgcaagtgttttaatgcactgctgcataaccgaaataatgtgctcgatgctgtcgcagcaatcattccgcagccattcgttaatgattgcgatcaagccgttgatatgaaattgcatgatatagttttggtcctctggtgatacctgaaagcgattcaggatgggggtcaaaacatgatggttcaatttttgataagcatcggtcatccgcagcgcagacgaatgttcgaccgtagtcttgaatatacgccggtgttccttgatgtaggtaaggtagggcgtgagatattccggcgtgatgaggaacaattcttccagcggacgggcttggagtttttcaaggaaaccggtggcatcctgcggcatggcactctcaaattgacggatgatatactcggtgctttcggtcagaagatccccgatcgtttcatagtgcagatagaaggtagaacggttcacaccggctttttcacagatctccttcacggtgatgtaggaaaaatcctttttctcgatcaattccagaaaagcttcgtccattcgggcggcggtggaaaaatacttgctttcagatttgttcaatggtggtcgcctttcttgttccaaattattttttgctgatctcttctgccagggcgatgatttcataggcgtacttctgcttgccctgtgccagcacctttttataaaggggatagtttacccccatacccagcagcccgaggcagcccacattgaagccaaagataaacatggcggtggtgccgccgccgatgacgttcatgcacaggcacagccctatgccgaaaatgagggcagagaggatgccgagactgtaagtgaggatcgtggcagggagctttgctctggcatccagcttgcgaagcgcaaccactttggaggtgtccttgggggcgtactcgttggcgatctgttctgcgtaaattttgtctgtgttcatggcttgttgcctccttcatttgatggctttattatacgggtgaagaagagcaaacggaacgacacaaacggcactttgtgttgaatacagaggtttgcaggacgcagaaaagggaagtataagaagtataacatatgtaagctcaatgtgtaatagaggggggtggatggaaggggggcattggaggggaaatatccttttaaggtacaaaaaagcggacagctgaaacggctgtccgcaaaacattatttttttggctgatactgcatattggatacgttgtagatcgtaataaaggctttggggtcttcccggttgataaaattcatcagcttctgatattcgctgttgtccacgatggtaatgatctcgttgtgcttttcaaagttatatgcaccgatggcttcgtacatcgtagcaccgctgtgcaggtcttcgatgataaattgacgaagctccttttctttttcggtgatgatgcagacccggcgttttctgctgttgtcaaagatgaaatggtccagaacgatcccgttaaaatatgtaccaaggacgctcaggaccacggtttttttatcatagaccagtgcagcggaaagcgctacgcacattcccgagagcgacatggctttgcccagctcaatatgcaggtacttgttcatgatcttcgctacgatatccagtccgccggaggaggcgttgcggttaaagaggatgctcaacccaatgctgaccaccaggatatagcaaagcacatccagctcctggctgtcggtcatggagtggaagttcgggaataggatctcaaaaagccgcaggaacacgggcagcaggatgctggtgtaaacggtcttggtaccaaactctcgtccgcaggttataaaaccgatgatcaaaaggacgatattcaggaccattgtaatggcagacaggggaagcgggataaaattagacagcacgatgccaaggccggaaatactgctgacagaagtatggcttggcaccagaaaaaagtataccgccgctgcgatgatcgctacagctgcggtcaggatcaggatctcctttaggatctcggtgcgattcgacttctttttttccatctttgtccctccaaatttcagtgcgatatgctaagtatagcacagggaacgctgacagaaaagagaatatgtatgccgctgttgagcggcatggcggagaagcattcttagataaagtccgggtacagttccagtgcctcaaactccgcatcggtcatcccggccagcttgtctaaggaagctaaagtgtctttgtaaattgttgcagatatcttttgccatccggggccctcgctctttacctgaaaaataaaattgaatagttcgttgcaaaaagcccttttcttatggaaaagggcttttattgtgctataatatttatataatgctattccggagaaaagggcgaggacgatataggtaagacgatttttaattgattccgttccgaatttatttgtgcaaaagaaaacagcactgaaatccagtgctgttgcagtctctaaaaggtggattattagggataccaccataccctgcggcgtaaagccttatcttagaacttctgatggatattgataaaccgatacggtatcaatgatgtttactctgatggatattgataaactgacacatcaaaaatctaagttcaagattattatagccgctcagaaaatgattgtcaacgggaaaggagtacaaattatgcggtatgttttaggtttggatgtgggtatccaatccgtgggatgggcggttgtacgctgcgatgagcctgcgcgtattgaagattttggtgtgcgggtatttgacaccaccgaaaacccaaaatccaaagacaacgccaatcagaaccggcgggcattccggtctgcaaggcgggtacttcgccgccggagccaccggaaagagatgctgaaaaaacatttggagaaaatcggtctgcttcatgaaggggaagtagaagcgctttttgagtctggtcgggcagacccgctgcggctgcgtgtcaagggcttgacagaacagcttgcgccggcagaacttgccgcctgtttgatccatatcagcaatcaccgcggatatcaggctttttataatttgacagaggaagagttgacggatctgccagcttctgagaaaaaagagtatcagcaggaacttagcgggattgagcaggtgaccagcattatggaacaaggcggctaccgctcggtggccgagatgattttgaacgatgaggcttttgctccggaagatgctggaccgatgcgaagctaccgcagccacccgtataaagagattcgctatcctatcagccgggagatgttgaaaaaagaagctgatgaaattctgcgtgtccaggctgaattctatccttgtctgaatgagccgtaccaggtgacctggcgtaaagaacgtcggactccatccaatcgtgaatttttggaatggttgatattccggcagcgggatttcgaggatggcccgggtgattgtgatgatgctatgcgtaaatatactggttttttgcaggcattaggcaaatgtccgttttatcgcagcgaaaatcgcggtcctcgtatgacggtactgggggacctttatacactggtcaactctttgtcgcagtatcggtatctgaatactaaaacatctgaacttgggcttcctaaggcactggcgcaagagcttttggaaaacgctttgaaggatgctgcattgtctgccgataaaattaaggagcttgcaaaaaaatacaatatcaagattgataataagtcggtaaagactgcagatcgagccccgaactgcatcaaatttatgtgccgggtccgtcctgttttggagaagtataacattgattgggtatctgcccttggaggaacttctttggaagaggtgttggatgagagcacgatgctaaaccagattggacgggtattgtcgttgtatcagacgccgcatcgccgaaaagaagaactgatgaagatttccggggtatcacaggatctggcagagcggctgactgcaattcggctttcagggacagccaaagtcagtgcgcactatatgcaggatgcggtaaaggcttttcaactgggagagcggtatggagagtttcagtggaagaaaatgaatgagctggaacaggctctgactggccaagccagaggtgtacatgtcaaattgccgcccttctctgctgatgcggaatttgccaaaaactcagtggtgatgcgcagccttaacgaaacgcgaaaagtcatcaatgcgatcatcgggcaatatggttctccgtgggcaataaatgtagaggttgcaagtgaattaggccgttcctgggctgagcgggctgagtgggataaaaagaataagcaaaattgggaccagagcgaaaaagagaaggaacggatctgtgagatcatgggctacgatagtcccgaccaggtaaaggggtctatgttggagcgattccgtcttgcagaacagcaaaactggcagtgcctgtataccggaaaaccgatcacggacaaacgagctgcactggaccctaaaaactataattttgaggtagatcatattattccgttctccctgatcctggataataccctgcaaaacaaagcattggtctgtgccgatgccaatcagaccaaaggtcagcggacaccgctgatgtatctgcatgatgcggctcagcgggagcagtttattgggcgagttaatcagatggccaaagaccatatcattagtgaccggaagcgccagtatctgcttttggatcagctggagaacagccagcttttggatgaatggaagagccggaatctgaacgatacgcgttatatcgcaaaatatcttcgtggatatttggaacgtgaacttgccccggcggcagagcaccgtacaccgtttgtttttccggtcaagggcggtctgaccagccgcttccgccgggtctggctggataaggagacctggggaggggagaataaggaaaatctgcgtgacataactaccctgcatcatgcggcagatgcggttgtgatcgccaatatctccccggctactgctttgatcgcagaggataatatgcggctgaaccgtatcctgaaaaatgatcgcggcaggcagacgccggagtattgcgctcagttggagcgcagtttgcaaacactggagcaatattatcatattccccgtgcgaaagcagaggcctatctcaaacgtcaaaatcggatatcagcccggatcgccaacctgaatatcgaggtgaatatccgttttggaaaacccggcgaggaaatggatctggatacatatcgaagcaacgttctgcactattatcacgatgatgcgtcctttgcttccaatttaattccgccgcttaccagccgtaagcaggaacgcaagatccagggctgtctgaccacgggtaatgctctgggaacgatgacggttgatggtgaactgtatgaggctgagcgcatcgacgtgatgaagctgacacaaaaagatctgccccggctttgcaccaatgatggcgacctgcgggactccctgacggagctgttggcgacagcaggcgataaacccttgaaagatgtactgccgaagcagagcgaaaacgaattccgtacccaaaagggccgtttgatccgtaaagtaaccctgaagggcaagcagctcagtcagtacaagatcaagcaaattgcggagaataactactcggtccttgatactacgaagtattactgcacggaagtctatcgggatactgttggtaaaaccaaggtgcgggccattgccagggcggatcttgtgcgcagagataaaaagctgtggttgacctgtccctatcccgccgactatgcggaacatatcatgtatctttttaaaaatgattatatccgtgtagagacgcctaatggcctgcaatttgaaggtttttatcaaagcctcgctggaatcaagcaggcgaagttcagaggcatagagaaaaatgcttctgcattgcgtcgattttccatatcggggattgcaacagtaacaaagtacgacatcagtattctagggaaaaaaggaggggaaattccatgtggcgaacccttatcgttacttccggagaaaaaatgacggttcgagacgggtggctgcatgtttacagccctcagcaggaagcccgcgttcccattggagacctgtattctgttgtggtggataatagacagaccttgctaagcatgggggtgttgacacaactggcgcaggcgggggtgcatgtcctgctgtgtgatgagaaacacctgccttgtgcagaacttttgcccctatcacagcactatcgacctttgacggtgctgcaaaaacagatggatctttcgcagtcctttaaggatctgctttggcagcgcatcattacatcaaagatccaaaaccaggcaaaaacacttcgtttggtgggggctaacaggagcaaggcgcaaaaactggaggagttggctcttactgtgagtgcgggagatcggggaaatcgtgaggcacaagcagcgaaactgtattttcctgctttatttggtgccgggttcacgcggacaatgggcgatgtgaccaacgatgcactgaactatggttatgccgttatccggtcagctgtttccaaaacactggcaggatacggatattccggcgttttggggctgcatcatatcgggccaggcaacccgttcaacttagcagatgacctgatggagccgctgcgcccattggtggacctatgggtggatgaccattgcgatgatctgtacgaagagctgacccgtaccaaccgacgcgagttgattggccttgttaaccatatcattcggttggacggtaaaaaaatgcgggtgcgctatgcgatcgatcgatatatcaagagtctgaccagtgcgattgaaggcaaggatgctgggttgctgctgttgccggaactgatccggaatgatccttcctttgaggatgaacaggatggctgaacgatttatgcgattgatggtattttttgatctgcctgtggatacaaaaaaacgacggagagattattctcacttcagaaaagccttgatcaacgatgggtttatgatgctgcaatactcggtttatgtgcgcttggcccgcaaccatgacgatgcgcagaaacatctgcgcatcgtggaggaaaatcttccgccagcgggttctgtccgggcgatgatcattaccgaaaagcagtatacgcagatgaaacttttgtgcggggagcagatgaaggacgaacatttccttgacacaaaagatcttatcgagatataatgtagtagatacaatatggccaaaaccgcaagagccacaatatcttgcggttttggttctctgatggatattgataaactgatactgcgctctaactatgcgcaaactctagacgcgttttggttctctgatggatattgataaactgatactgtctcccggcagcacctcatccagatagagttttggttctctgatggatattgataaactgatacagaatggccggggtgctgcacgttaagtgcggttttggttctctgatggatattgataaactgatacgtgacgctgcgtggacttacgaaccagtgcgttttggttctctgatggatattgataaactgatacgatattaaaatggcccagtaccttacttgagttttggttctctgatggatattgataaactgatacctggacccccttgttgtccaactgggctaggttttggttctctgatggatattgataaaccgacctcgaaggcaaatagaagcagcagcctttagattaaaatgctggtggatgggccaccctcctcccccaaagaatcaatctgagtaaaaacagggatgaaaacaaaataaataacgataaaccgcttgatatatacttatgttagacagggagcgatacatagctgcggctgatgtccatcagctttgcggtctctaactgtgtcagaggcggctgtccagccaggccgtagcgcaggagcaaaagtttgcgctcccgagcgggcagcgattcgatcagttgacgcagatggcgggcatcatcctgccgctcaaagccatcctccatggaaaaactgtcctgcaaaacgtcctccaatgtcaaggcagagtcctccttgctgctttccagcgattcctgcaaggagaccatgacgactggtttgcggtcccgccggaactgcattcggatctcattttcaatgcaccggctggcataggtggaaaaacgggccctccgggtggagtcaaacgtatccaccgccttcataagcccgatggtgccgatgctgaccagatcctcctggtcaccgggcagcgcatagtatttttttataatgtgtgcaactaagcgcaggttgtgccggatcagcgtttcccgggcatgggggtcccccgcacgaagggcggcaaaggcggcagcttcctcccgcgcagacagcggacgaggaaaactgccggactccaggtgaagcgccaggtacaaaaactgggtcgaaaaaaattgcagcagtgtcagcagcatgaacagcacctccgtaaaataagatagggtagtaattttactctatgttgcttctgtgcagaacagtcgggagaagagcaaacacagtttggcggaaacaccggatacagctattatttccaataactgccttgacgatatacagaaaaaggtatatactcaaactatgtccagcaagggggcggaagcgccttttcgggactgtttggatggatggcaggcggaaaaaccagcgcatccaagtcagatgggattttgattcacacaaggggacaaagggacacgagaatgggaaaatattttgggaccgatggcttccgcggggaagccggagtaacgctgacagcagaccatgcgtataaagtggggcgttttctggggtggtactacaatacgcttcgggagcagaacggtaataccgaccctgcccggatcgtgatcggcaaggatacccgccgcagctcctatatgtttgagtacagcctggtggcgggtctgaccgccagcggtgccgatgcctacctgctccatgtcaccaccacgccctctgtggcctatatcgcccgggtggatgactttgactgcggcatcatgatctctgccagccataacccgtactatgacaacggcatcaagctgatcgacaacaacggcgagaaaatgccggaaaagaccctcctgctggtagaggactacctggacggcaagctgcatctgtttgaccaggattggccggagctgccttttgcccggcgggagcgcattggccgcaccgtggattatgtggcaggccgcaaccggtatatgggttacctgatcagcctgggggtctactccttccgcggtgtcaaggtgggtctggactgtgccaacggcagcagctgggccattgccaagagcatttttgatgcactgggcgcagatacctatgtcatcaacgcacagcccaatggcacgaatatcaacctgaacgctggctcgacccatatcgagggtctgcagaagtttgtggtagaaaagggcctggatgtgggctttgcctacgatggcgatgcagaccgctgcctctgcgtggatgaaaagggcaatgtcattaccggtgaccacatcctgtacatctatggccgctatatgaaggagcgggataagctgctggaaaacacggtggtgaccacggtcatgtccaactttggcctgtacaaagcctttgatgagctgggcatccactatgccaagaccgctgtaggcgataagtatgtttacgagtatatgtcccagaacggctgccgtattggcggtgagcagagcggtcacatcatcttctccaagtatgccagcaccggcgacggtatcctgaccagtctgaagatgatggaggtcatgatggcgaaggagcagccgctgagcaagctggctgagccgctgaccatctatccgcaggtgctggaaaatatccgtgttaccgataagaccgctgcccagaacgacccggacgtgcagaaggccgtccagtcggtggcggaagcactgggcagcaccggccgcatcctggtgcgggagtccggcaccgagccgctggtgcgggttatggtggaagcccctgaccacgagacctgccagaagtacgtcagccaggtggtggagaccatcaagagcaaggggtatggcctctaaagtaccctgggatcgttcgatccagcgctgaaaatagagagaatccctgtttgagcaatgtcgtgtttggatgacgctgcccaagcagggcttttcttttgcctgtggagagaagcgccgccccggtgttttgctgcagcagaaaggttgcctttttcgttctggtttgagataatcgtaaacagagggcggttcagggcgtccggctaccccgaaaaaccgccgccgcatccgtattctacaggtagggagtgtacaaaaacatggagtatgagatcatacgcagcgttgccgcagcgcagaaagatacgcaggccgcggatgaacttgtccggcagtatctgcccttcatcaaagcagagaccgcaaaatttttaaggcgcagcccagtagagggacaggacgatgaactggggatcgcaatgtttgccttttacgaggcggccatggcctaccagagcggacgaggcgcttttttgaagctggcagcggctgcgatccgcaaccgattgatcgattatcaaagaaaagagctgcgtcatgcaggggagatctccctggaccaaactgtggatgatgaggagtccgggcgtccgctgctggagaccattgacagcggctgcgatgagatcgccgatcgggagcagctgcgtgcgacccaggaggagatccagggttttgcgcaggagctgcagcactatggcctgaaattgacggatattgcggacaactgcccaaaacaggagcgcacacttgccgcctgtcatcgtgtgctggcgtatgcacgggagaacccgcagcttttggcgcagcttacctccacagggaaactgcccatggcgcagctgtccgctggcagcggcgtggaccgcaagaccatggagaggcacagaaaatacctggtagccctgcttctggcatttaccaatggctttgagatcatccgtgggcatttgcgccggatcgcacgtcctgtgaaagaggtggagtgaatggaatatctggtaatggaatgtggcctgagctatgcagtggtcatggatgccgaaggccggtttttgaaggtgcccaatctgggctataccgtagggcagaggttggatgaggtcctgcttttgccggaaagacctgccgtaaaaatgtcgctgtccaaacagatcatccgctggggcgcaatggcagcctgcctgtgcctgctgatgctgggtggctggttctggcagtcgcccattggcacggtacggatcaagataaacccggatgtgcagctgaagatcaaccgttttgacgcagttatggctgcccaagggctgaacgaggatggtgcagctctgctccagggctaccgctcttatggaaaagagatggagaccgtagcggaagaattggcagaccgcgccgtagagatgggatacctgagcgagggcggcaagatcaccctgaccgtaggctcaaaccgagacgaatggcggggatcggctgagaaaaaactgcggcaggagctggaaaaccatgtcgagaagagcatcactgtggagatcgcaggcagtggaccggatggaagcagcggcaccccgccaaaacaggaggccgctgtgccaatgatcccgaataagaagccggagcgcccctctgctgcggaagatatcgagaagcagccggaacgtgtgcccccggcagaggatgcagaggaccaggagcagccccatgcagacagtcctgtgacggatgcaccggaacagggagggaaactccccgcagacaaaacagaggatgcggcaccgggtgagacactgcccccctcccgtgaagaggaggacgagcgcgaggagccggacgaggacgacgaagaagagcaaagcgaggagccagacctttcggagggacccgacgaggacccccaagaggatgatcccgacccggaggaggacgaagcgcccgacctagagcaggaggactctgaacaagagccccccgagcaagaggagccggacagcgaggatgagccggacgcccagcaggagggaacaccagttccggacccggaagaggaggacgatgagccgctttctgccgaggatatcgaggacgattaaaaaattcaaaaaaatttttgcgccgaccccgattttgccccagatgctccgtaatctatattcaacaggcaaacaaaagcctgcaaaaggccaaacaacttttatagataaggagtgtctactatgaaaaagatgaattggaaaacctgtctcgcccagactgcttctatcgcactgactctgtctctgctggccgggatcactgcacaggccgctggccccctgtcgtttgggaacacagcggccgggacggtgcggttgagcttggaaaaagcgaaggaactggtgcttgcgcagctggggctgacaacggcgaccttctgcgatcatgaatacgacctggaagatggcgtatacgagtttgaattcatcgtggatggcgtcaagtacgagtatgaggtggatgccaataccggcgaggtacgggaagcagacatcgagggcaacgacgactggaacgaccgggacgattgggatgattggaacgagttcgatcgtcccgacgaggacgacctggaggacgatgacctggacgatgacgacgatgatctcaatgaggacgaggatgaccgctgcgagatcgatgatgatgaggacgatctggatgaggacgatgacgacgaggaccaggacgattgatcctgtccaatggcatcctgtccgcagttaactaaaaaaagccgctgccggtttttgaccggacagcggcttttttgtgcgggaacagtgtttttagtgcaggagctgaaaagtttgctgaaagttatccgcctgttcatcattcagtctttcttttgccaaaaagccggattagaatgaggcatcatacaaaggaggcggaaaaacgccatgatcgattatcgtgaagcaaactccaaagattttgaccgcattgcccacctgtctgcacaatcgtttgggaactacccttactttacctgcgtttttcgcaatgcgttcaaaaatgaggatgcgtataaagcatatatggaaaaactgcaccgcatcaatatcaaggcaaatgcacagcagaacaaatgttttgtaggcgtacaggacggagagatcgtgtccgccgcattgatccaggaccccgctaaaaagaaagcggatgtagaggactatgtcaaagccggtggattgagcctggcttttccggtggggctttcaaaaatattgaacttctttcatttttcagaggatgcccgggcagactgcgacaaaaaacacccctctgcctggtatctggaagttttagccgtggatgactccctgaaagggcatggcttgggcagcgggatgctgcaagactgcctgatcccctacatacaaaaacatggcggagaggaactgaccctgatcaccaatacggagggcaaccgcaaattttataaaaagaacggcttccaggagttttctgagcgcaagctggagcaaaatggtcaaaccatcgggaactggagtttctgcatggatctgcacaaaaaaccggtgcccagcatggcgtaagcgctttttccccgcgcagcagccgggggtgatgtttttggacaaagttccttctttttcagctgccctcttgcaatctgtaaacaggcgatgtataatatactacatataggtttgagtgctgctgaactcgtacagactcagcggagaatagtgaatccggtcagaatccggaacggtaccgccgctgtaagcgtggagactgcacacgggacgaaagtcggtcattgggagagatcctgagaaggctgtgtgttggttgaggatatgcgagtcagaagacctgctcaaatggaagggacttatatgctctcgagtatggggatataggtgatattgttgcgcaaaaacggccgcagcagctcctttggagttgctgcggcttttctttttgtgcgggtcagtatgccgttgtgtcctcctgcgtttttgcagatgcataaaatcagctgttttgctttccgaaaggaacgtgaaaatagatacaacgatatggaggaacaaaaaatgaaaaaaagcaagactctttgtgccctgctgctgagcgtgtgccttgtattgggcatggctgcttgcggggagaagaaggacacccccagtgcatcgcagcaggcagaaagtgcgccggcttcgtcggctgcatcccagccggctgcggagcagcaaaagcctgtgctgctggtggtcagctttggcaccagctacaacgatacccgggacaagaccattggcgctgtggaggagagcttggcaaaagcctacccggagtatgagatccgccgggcgtttacggcgcaaaccatcattgatatcctggaagagcgggagggtctgaagatcgataacgtcacccaggccatgtcccgcctggtgatggatgatgtaaaggatgttgtgatccagcccacccatgtaatgccgggtgcagagtatgatgatatcctggccgatatccagagctatgcagatcagttccagagttttaaggtgggcaagccccttttgaccacggatgaggactatgcacagctgatctcctgcctggtggaggagactaagccctacaatgcagaggataccgcgatcgtgttcatggggcatggcacccatcacgaggcaaatgccacctatgcatctttgcaggaaaaactgacccaggccggatacaccaactactttgtaggtaccgtggaggccaccccctcgctggaggatgtgctggcacaggtggaagcgtccggagcaaaaaaggtggtgcttctgccgctgatgatcgttgccggtgaccatgccaacaacgatatggccggagacgaagaggactcctggaagaccgcctttgccaatgcagggtatgaggtggaatgtgtgctgaagggtctgggcgagtatgccggtgtacagcagatgatcgtggagcatgcccgtcaggctatggaatttccggaccccgtttccgcagaccagatcgcggacggcagctatgagatcagcgtccagtccagcagcaagatgttcaaggtggtcaagtgcgtgctgaatgtggagtccggaaagatggatgcagtcatcaccctcagcggagatgggtacagccagctctttatgggcaccggtgagcaggccgctgccgcttctgcggatgcatatatccagcagtctgtggacagtgagggcgcagtctcctttacggtccccctggaaaaactgaatgtggaggtggatgtggcggcctggagcgtccggaaggagaagtggtacgaccgtactctggtattcttctccgacgcgctccccgcagaggccgtcacagcggaataacatgaagaaaaagacgcttgcgatcctgtgtgtctgtgcagctctttgcgtgctgctggcgtcagctctggtctccggccgcagcaaggagcttacggacggagattacaccattgcggtctccctgtccggcggttctggccgggccagtgtagagtcgcctgcaaagctggtggtttcgggtgaaacgcggacagcggtgatcgtgtggagcagcccatattacgaatatatgctggtggatggagtgcggtacgagccgctgccttcggacggaaactccacttttgcgatcccgatcgtactggacacggatatggaggtcagcgcatcgaccatcgcaatgagccagccccacctggtggaatatacgcttcggttcgacagttcgaccattcaaggagagtaaaccatgagacgacgcatctttctgctgctga

SEQ ID NO: 4485 - DNA, 14131 bp, synthetic construct
  misc_feature 1..14131: note = Synthetic
  source 1..14131: mol_type = other DNA
taaaaaagcaacgccaagtgcggttggcgttgctcattacgcacctttaggtgctgctggaataatggcccttatagggccgttctgcaaaccccacgttcaacgtggggttatgattttaattcttgttccagaccgtcaaattctggtgtggagaaaaattctccaagagtaatattcagatcatcgtaaatcatatttagctttgttactgcttgagtaataaagcaaaatcgcaccgatcataaaaaggtgccaattttaccacagtggaggcactcagtcgacctcctgaccctacatttttgcaatctacggtcactttcattttattatagcagaccagagatcctatatcgcgaatagccagaagctccgttcataatccgatgtttagagtgtactcccttgaacccatcttatcatttcgatataataaaataaattctcattaaaacaaaaacagcactggaaaccagtgctgcgctattcctgaaacggtggattgttcgggataccaccataccctgcggcgtaaagccttatcttagaacttctgatggatattgataaaccgatacggcatcaatgctgtttactctgatggatattgataaactgacacatcaaaaatctaagcttgggcttattatagcgaattaaaaaatggttgtcaacatggaaggagtatcaattatgcactatgttttaggtctggatataggcattcagtctgtgggctgggcggtaattcgctatgatgagcctgcacgcattgaagacttcggcgtacgcatatttgacaccacggaaaatagaaaatccaaagataacgccaatcaggaacggcgtgcgttccgggccgcaagacgggtggtgcgtcgccggagccaccggagagagatgctgaaaaagcatctacaacgaatcggtctgctccgagaaggcgaagtggaagcattctttgaatcgggcaaatccgatccgctgcgtctgcgggtcaaaggactgaccgaacagctcacaccagtagagcttgcggcctgtctaattcacatcagcaaccaccggggatatcaggcgttttacaatctgaccgaagaagaactgaatgaactgcccgcttccgaaaagaaagaatatcaacaggagcgcagcggaatcgagcaggtgaccggccttatggagcagggcaattaccgttctgttgccgaaatgcttctgaccgatgccgcttttgcctcggaagatggcggaccgatgcgtacctaccgcagtcatccttataaagatactcggtatcccatcagccgggatctgctgcgtaaagaggcagacgctattctgatgaaccaggcacaattctacccttgcctgaatgaagcttaccaggtgacctggcgcaaggaaagccgtacgccgtccaaccgggaatttctggaatggctaatgtttgagcaacgggattttgaagatggccccggtgaccgtgacgatgccatgcgtaaatacacaggctttctgcaggccttggggaaatgctccttttatcggcaggaggaccgcggcccacgcatgagcgtgctgggggatctgtatgctctgaccaactcactgtcacagtatcaatatatagatgaaaaaacttctgcattcggtatgcccaagacactggccaatgatcttctggaggcagcattgcatgatgcggaattgcccgcaaaaagaatccaggaactcgcaaggaaacacagtgtcaaaatcgataacaaagccgtaaaaaccgcagaccgcgcgcccaactgcatcaaatttatgcgccggattcgtcccattctggagaaatacggcatagactgggaacaggctcttgggggagccactctggaagaagcgctggatgacaacacgatgctgaatcggatcgggcgggttctgtcgctctatcaaacccttcaccgccgcaaggaagaattggtgaaaatccctgggatttcgccggagctggcatcccgactgactgcagagcggatttccggtacagcaaaggtcagcgcccattacatgcgggacgcagtggaagcctttcagctgggcgagcggtacggtgaatttcagtggcgcagaatgaacgaacaggagcagcccctgcccggtcaggccagtggggcgaatttcaaattacccgccttccccgccagtgccgagtttgcaaaaaactcggtggttatgcgaagcctcaacgaaacccgaaaggtgatcaacgcggtcattgaacgatatggttctccctgggctgtgaatgtagaggtcgccagtgaactgggccgctcctgggccgaacgagacgagctggatcgcaggaataaacaaaatctggctcaaaccgaaaaagacaaaaagcaaatttgtgagatcatgggctaccacagtcccgatcaggtgaacggttccatgctggagcgtttccgattggcccagcagcaaaactggcagtgtctgtataccggcaaaccgatcacggacaaacaggctgcactggattccaaaaaccgaagctatgaggtagaccacatcgtaccgttttcgctgattttggataacacccttcagaacaaagcgctggtctgtgccgatgccaaccagaccaaggggcagcgcactccgctgatgtacctgcgtgaccctcagcagcgggaactgtttatcggacgggtcaatcaaatggccaaaaaccatgtgatcagcgaccgaaaacgacagtatctgttgttggagcatctgggaaacagtgagcttctggacgaatggaaaacccgcaatctaaatgatacccgctatattgccaagtatctgcggggatatctggaacgggaactggcaccggcggctgagcaccgcacgccttttgtgtttcctgtcaaaggcggcctgaccagccggttccgccgcgtctggctggaccgggaaacctggggcggagatgaaaaggggcagctgcgtgagacgactaccctgcatcatgcggtggatgccgttgtgatcgctaacattaccccggcgaccgccttgatcgcggaagacaatctgcggctgaaccgcatcctgaaaagcagccatggagtggaaactgcagaatactgtgcccagctggagcgcagcttgcaaacgctggaacagtattatcacattccccgcgccaaagcgcaggcctatctcaagcgtaaaaaccggatcactgcactgatcccaaccctgaatatcgaggtaaacatccgctttggttctcccggagaagaaatcgacccggacacctaccgcgcttgtgtgctgtaccattatcacgacgatccggcctttgctgccggcctgaccccgccatgcaccagccgcaaaccggagcgaaaggttcagggcggcctgaccactgccaatgcgctgggaaccatggaaatcgacggcgttttgtatgaggccaaacgtgtcgatgtaatgaagctgagctggaaaaatctctcgcagctctgcaccaacgatggggatctgcgggactccctgatcgaactgctggccgaaaccggggacaaaaagctggaagatattctgtcggcgcaaaacaaaacggaattccgcacccggaagggccgcctgatccggaaggtaacgctgaaaggcaatgtggtagaccagtaccgcgtcaagcagattgcgccaaacaactattccgtcctcaacaccaccagttattattgcaccgaagtctatcgtgacactgccggaaaaacaaaagtgcgggcaatcgcccgggcggatctggtgcgcagagacaaaaagctgtggcttacctgtcccgcccccgccgactatgccgagcacatcatgtacctgttcaaaaatgattatattcaggtgcaaacacacaatggggtgctctttgaaggattttaccaaagcccggcaggcattaaacaagcaaaattcaatggaattgagaagaatgcttccggttcccgtccgttccgtatttccggaactgccactgtaacaaaatacgacatcagcattctgggcaaaaaaggaggcgaaattccatgtggcgcacccttatcgttacttccggagagaaaatgaccgtgcgggatggctggcttcatgtgtacagcccccagcaggaggcccgtgttcccatcggcgatctatactcggtcgtggtggataatcgccagacattgctgagcatgggggttttgacccagctggcacaggcgggcgtgcatgttctgctgtgcgacgagaaacatctcccctgcgccgaactcctgccgctggcacagcactaccgccctttgacggtactgcaaaaacagatggagctttcccaatcctttaaagacctgctctggcagcgcatcgtcacagccaaaatccagaatcaggcaaaaacgctccgtctggtgggggcaaacggcagcaaagcgcaaaagctggaggaactggcgctcacggtgcagccgggcgactccggcaatcgggaggcacaagccgccaagctgtatttccccgccttatttggggccgggtttacccgcacgctggatgatgtgaccaacgctgcgctgaattacggctacgcgattatccgatccgccgtttccaaaacgctggcgggatatggctactccggcgtattggggctgcatcacatcggtccgggcaatccgtttaatctggcagacgacctgatggagccgctgcgccctctggttgatctgtggacagatgatcactgcgacgatctgtacgagcagctgagtcgcaccaaccgccgggaactgatcggtcttgtgaaccatatcatccggctggatggccaaaagatgcgggtgcggtacgccatcgatcggtatgtcaaaagcctgaccagtgccattgaagggcaggacgccggactgctgcggctgccggaactcatccgcaacgaccccacctttgaggatgaacaggatggctgagagatttatgcgcctgatggtattttttgacctgcctgtgaatacaaaacagcgccgcaaagagtattccagatttcgtaaatccctgatcaacgatggtttcatgatgctgcaatactcggtttatgtccgcctgacccgaaaccacgacgatgcccaaaaacacctgcggattgtagaggcaaaccttccgccggcaggctctgtccgagccatgatcgttaccgaaaagcagtacacccagatgaagcttctgtgcggcgcgcaaatgaaggacgagcattttcttgacacaaaagatcttcttgagatataatctagtagaacaaatgctgtcaaaaccgcaagatccacaacatcttgcggttttggttctctgatggatattgataaactgatacatacaatccaatactaccacacactacacgttttggttctctgatggatattgataaactgatacgtacgacgacagggaaatgcccagcgtgatgttttggttctctgatggatattgataaactgatactggtggcatcgtccagaactttatcaatcttgttttggttctctgatggatattgataaactgatacctcgtccgttacacagtgcaacacatggttgttttggttctctgatggatattgataaactgatacacaaacagattgcttcacacgcttatgcttgttttggttctctgatggatattgataaactgatacaacagcaccgcgcggccctctggaggcactgttttggttctctgatggatattgataaactgataccggcatgatggtgggccacgataccctgtagttttggttctctgatggatattgataaactgatacgcctacaataacaagcagctgggcgtggggttttggttctctgatggatattgataaactgatacgaacagtatttgaatcattcccagtatactgttttggttctctgatggatattgataaactgatacttctcggtagcgcgggcccggcatgttgcggttttggttctctgatggatattgataaactgatacttgctgttgaatactgcgaaatagccttcgttttggttctctgatggatattgataaactgatacccataacgtgcgctgtaaatgtcaaagggtgttttggttctctgatggatattgataaactgatacgctgtacgaggtttctgtggttaccttcccgttttggttctctgatggatattgataaactgatactgaaaagacggacgatatgatccagtacgagttttggttctctgatggatattgataaactgatactaggtataattgttcgtaaccttgttgtatgttttggttctctgatggatattgataaactgatactaccagcaacaaaaggcgcggaacagtttagttttggttctctgatggatattgataaactgatacatttctgggcttcatcctgccaggttgcttgttttggttctctgatggatattgataaactgatacgaaagagcggctcaatcaaaactcgctaacgttttggttctctgatggatattgataaactgatacagttcttcgcggcgaagggtgagcatgttgttttggttctctgatggatattgataaactgatactgacgagttgtacccccctgatagaccacggttttggttctctgatggatattgataaactgatacatttctgggcttcatcctgccaggttgcttgttttggttctctgatggatattgataaactgatacgaccggatcaagcagatcaagcggaacagccgttttggttctctgatggatattgataaactgataccagcaggctgggagttttgtcatcagagacgttttggttctctgatggatattgataaactgatactaacctgtccgttctttgctttcttgctccgttttggttctctgatggatattgataaactgatacgacccggcaggaatggctgcagggccagaggttttggttctctgatggatattgataaactgatacaggcgaagcaacggcacctgagatatgcccgttttggttctctgatggatattgataaactgataccttttcgccgctgatgtctgcggcggtgatgttttggttctctgatgaattttggagcgctgtttgtatctcttttcaagcagaaactcccgtttatgcgccttcaagtttggtggcataaacgggagtttttgtttcatcttcctattcggagtgattttgcgttccattcgcttttctctgaaacacgagtgcgttacgaagtatccgaggtgcggaagtatacccccggagccggacatctcttctggatttactgtactttcggttgtatcttctgcggatttggcgtatactgatattaactagtatcaatttgtatcagtattggaggaactttcgatggatgcttccttgtttgcgaaaatgctttcagacaaaagcataacggatctaaaaaaactgggctacaaatatcctaaagcggatcttcaggagtttgtggcacttctaaaggagaatttctatcataagctaccgctgaacgatttcgacggagaacgtattgttttcttagaaagcgtcacccaggtctccttgtccgcagtacgcattcttctcacgccgcagcgcagcgaccacttgtttggtgcaaaagcaatggaggatgagatcctttccactttccggattgagcaaatcaatactacgcgcgacagtgtacggcgagttctggcggggcactcccctcgcaatgaagatgagcaccgcgtttatgggatgaaacgcggcttggaatttattgcagatccatcgcacacgatcaccgagggaaatctgtatcggttgtatcagatgacgattggagagtttttgccggaagaggaccagcttctgccaggaaaccgataccggcacgatgcggtgtatgtggtaggtgccaaagtagaacacactggtttaccgtgctccaaactgccagaatacatggctgcgctgatcaagtttgcccaggagggggccgaaacgaatgccctgctaaaggctgctattcttcatttctatctggcatatctccatccctattttgatggaaacggccggatggcccggcttttgcacctgtggtatctggtacaacagggatattcgtctgcattgttcgtgcccctttctcgctatgtggaggagagccgcaatcgctactacaatgcattttctctggtggagcgcaatcaggaaatcagtggcattgtggatctgaccccttttcttacctattttattgaacaggtgtatcgtccgcttggcgaaaacaagatgggtggtcatgcaatggattccttcaaagaggctttagcgcaaggccaaattacggaaaaagaagcagctctgtggcagtttgtcctttcctgctatggggacgaagaattctctacgaagcagctggaaaaggatttcggtaatgctgcctatgccaccatccgtggttttgtcctgaagttcgaatccctggggatgctggcttccacacgatatggaaaccgagtgaaataccgggtgatatagcagccgaactctcaacactctgttcataggaaacctgcttcggcttattgcccggagcaggtgttttaaattgttaggacaacgcgcgttctaacaatgattataataatgattagaatggattgttagaaagagggtggctctgtgcaggaagataaaacgaccaatttcagtgaggtacagtttattcctcgtcctcaacttcttccgtaacgctcagatcctcgaaatcttccggagaatttttgaaacagcggcgaaggtattcttgtccgccgtccactgcgacggttttacaggagcagaatttgaaatcgtgcacggtttccgattcaatcacatcaccgcagaatttgcaccggatggcatttcggataatctttttcatttcagttcctccataaaggtcagtgtcgttcaatccgtttgctttcccctcttctttttggcccattccgttttcttgcgattccatacatcgtcgaaatggtcggtgagcagctgctcgaatgctgcggcgtcgaagtcttccctttcagcggagaactgctgcaccagtggtttcacctctgctcgccagcatttcatcaccttgctgcggcgctcggcggtaagcccttccacacgggaaaggccggtgttgagccggttgccgattttggtatagagtttcagggccggattttcccgttggctctgttccgccgcctcgtctgaggcggcttttttgcaggtgcatttcccctgattgggggctgtccggctgcaatattttgcggtgccgctgaagggcacgaacagcttcccgcaccgctggcaggggcggacggtctggtgctgggcgcacatctgcacgaattccgccatcaccaccgaggtaaggcaatccgccaccagataggaacggctggcgatgtccggatgctttcgggctttcggatcttctttcggcatggacagccgtcccagcatccgcatgtggagtttctcgtacagccggttcccttccactgcggcccgatggttggtgatcagcgcatctccatagcggtaatctgccggtttttccgggtcggcgtccgctgcggccagtgtgtattccaccaggcttgcaagagatggttgaaaacttgccagctgtttcagctgaccggccagcaaagtgagcgaggtatacgtggcggcgctcaactctcggtcatccatatcggcataactcaccatggttgcatccggctggggccagcaggtcaggtaccgctccacacactcgctggactgttccagcgcatagcagagctggatctcctgatggagaatcctgccgaatccatttgccataaccaggcccagttcttccgaggtcaggttgtggaagcccagccttttcagcatctggtggtagacgtccgaggcagcctgggtgcaatatcgctccagcaaggtctgcatggccggataatcccccagcgcggtttggatttcctgatacagccgggccagctgataataaagggcctgttccggatgctccaatgcctgccggatgctgcggcccggttgtttcggttccggctgaggttccgcagggcgcgtctcttccggcgctttggagaaccggctgaaaaacgatctgcgttttttcgtctcggcagcagcgggttcagctggttccgggggctggtaattccgccagtccgtctgttccagcagctccgcattgaccgaaatcgcgcacccggaaaactgctggagcagcgactgggccttctggtagaattcctgccagggcatatccagcccggcaaacaccagatcgcccaaagcacaggattcttcgatccagatccgggcctggttgtgctccacatattccgggtctttcatgttctgctgaatctggttcattacttcgattacagatctccgttccccgcttcggcggggttctttttttgtctgctccgggggcggattgcggtgtaccaggatgggcagacacagctgcttttcctgaaaacggaacacaaaacttgtggacatcgtaaaatcctcgctttttttgaaaacctcgaaaaatggctcaacaaggccgttttttcatgtgtatcggcgcaaatttgttgtgtaatttcaacattacatgaattcaagataacacatatagcgttttcggtcaagccgtggtatcttgtgttcacggcaccttgacaactgaatatccatgttccccaatgatccgcgttcccgtcgcgtccgcgcagccacgcagggcctatcatcctgcccgctgcgcggcgggacgggttcgtgaaatttaatattaatggaggtgactctcacgaacgaccaagaaatcctctgctttgcagacattccaaccgaggaggtgaactggctttagtatccttacattccctatggaaaaattacgattttacagggcgacccgggttgcggcaaaaccatggtggcgctgtcgctggcggcaatgctttctaccggggctgctctccccttttccccgcaggcaaacgacccgattacagttctttaccagacgtcggaagatggaattgccgacaccataaagccccgtctggagcgggcgcaggcagactgcacccgcatcaagatcatcgacgagtcaaaaacgccactgcgtttcgatgacacccggctggaagccgccgtccggcaggaaaatgcccggcttctgattctggacccgctttccgcgtacattggcgaatcggtcagcatgaaccaggctaacgaggtgcgcagcgccttccgtagcctgtactccatggcccagcgcaccggctgcgccgtcctgatcgtggcacacatgaacaagatgaacggaacctcggctttgtaccgcaccagcggttctattgatgtggccggtgcggtgcgctccatcctcacagtgaccaaataccgcaagtcccccacccagcgagtgctggtgccggtcaagagcaatcttgcccccgcaggcaatggactgctgctggaggtgaccgaccatgtggaatggctcgaccagctggaagaagcggatgcagacaagcttctgaacggcaatcaggggcctgctgcgcccacaaaacagcagcaggcggaacaacggataacactatgaaaaaaagaaccttttgggataagttcgacgccttcatgatgaaggacaacacctttattctgctggtgatgggcgctgcggccgccatcttcgccggtacttacatgttcatcaacctgggcaccggcgccttcaacgacctgtccatcgtggccatgctgaaggacggcatggacggcggtgactacgccgctgccgctggcttcgctgccggctttttgatcgcccgcgtgctggaaggtcctctggttggcctgatggacatcggcggcaccctgcagaccggtgtcggcatcggtatccccgcactgttcctgtccatgggctggcagttccccttctccagcttcccggttgccctgctggtgggcgctatgatcggcctggtaatgggcggcgtgatcatgctcatccgtaaagctgtgccggaaggcgtcgccgtgggcggcaccagcatcatgatgggcgcgggcaacgccatcggccgttatctggctcctctgatcgtggtggctgccactcagtacgatgtgtacgccggcatcggcgccatcctgggctgcgccatcttctacaagtggggcaaggagctggcaggcggcgccatcctgggcgccatgctgttcggcggtatcttcctgtaagttgagaaagcggggcgtttttgttgaacgtttatgaagaaatcggcttgaagcgggtggtcaacgccagcggccgtatgaccattctgggtgtttccaccctgagcgacgaggtggcccaggcggccatcgcgggcggccagtcctacgtggtgatcgaggacctgatcgacaaggcaggcgagatcatctcccgctataccggcggcgaggacagctgcgtgacctccagtgcttcggcggccatctgcctgaccatcgcgggcctgatcaccaagggcaacaaggtgctcatggaccggctgcccaactcggatggccttgccaacgagatcgtgattcagaagggccacagcgtgcactacggcgcgcccatgcccaccatgatccggctgggcggcggtgttccggtggaagccggtaccgccaacgaggtggtgcctgaggacatcgagggcgccatcaccgacaagaccgtggcgctgttctatgtgaagagccaccactgcgtgcagaagggcatggtctcgctggaggtcatgcgggacatcgcccaccggcacggcctgcccctgatggtggatgcggctgcggaggaggacttccgcaagtacatcgccctgggcgcggacctggtggtctacagcggcgcgaaggcgctggaagccaccacatccggctttgtgaccggcaaaaagcagtacatcgactgggtgaagaagcagtaccacggcatcggccgtcccatgaagatcggcaaggaaggcatcatgggcctgctgaaggcgctggagcgctacgagaacaaggaccacgaaaaggaagtgcgggaaaaccgggaaaaggtgcgctacctgtgcgaggagatcggcaagattcccgggctgaaggctcaggagatccaggacgaggccggccgtgccatctaccgcgcccgggtgaccctggaccccgccgtcgagatcgggtgcaccatggaggagatcaaccgccagctgcggcagggcaacccctccatctacgcccgcaccgagtttttgaatctgggcaagatcgactttgacccccgtcccatggtggagggcgacaaggaactgatcgtgaaacgcctgaaggaaatcattggaggttgatcattatggcaattgcttattatcatgaccgcgtatgcctgaacgtgctgggcggcagcgtggagaacgcgaaggaactgtatgaggccgctgagggccatgtggaagtgggcgtgctgtccaccaattatcccgatgtggaaagcgccgtggaggacatgaagcgctacatggaagtgctggaaggcaacctgtccgtcggtctgggcggcggcaaccccaagcagtggaaggccgtggccgacatcgccaaggagatcaaggccaaccacttcaaccaggtgttctccgctgtgggctacacccgcgccaacgtggacaatgagttcagccacatcaacgccctggtatctcccaccggtacccccggtctggtgaagatctccaccggccccatctccaaggactgcgccgagcccgccaacgttccggtggacaccgccatcgccatgatccgcgagatgggcggcaactccatcaagttcttccccatgggcggcctgaagtgccgcgaggagctgcgcgctgtggctgaggcctgcgcccgcaacaactttgttctggagc

SEQ ID NO: 4486 - DNA, 11366 bp, synthetic construct
  misc_feature 1..11366: note = Synthetic
  source 1..11366: mol_type = other DNA
gtgctgtgatctacagcctggtggaaacagccggtgccaacggtctttctgagcggggatacctgcacattgtgctgtccaatcttccctccatggacttccgccagcaccctgagctgctcaaggatctgatgccctggagcgactacatgcgcagttgttttgaacaggaataacctaggggaccagctttggctggtccttttctgttgtcaagtacactgttttgtgaggcgcttacttttaaccgatttgagctccttatgggagctcttttctttatccctcacgggggattatggagcgcttacctctaaacacagaatcacccgcagccgcctttgtctaaaaggaagttgcgggtgatttttagtgtttatgcttgtgaaagtcaaaacttcaggataaagcaaagcatttatttcatgacgacagattcaatcaagcaatttaaaaacaagttcaataatattaattgctgaatccagcacagaaaacagtcccagcattgtaatcaaaaaaactattctatctatgcgttttctttggcttgactcttgttcactgcttaatatttccaatttatatgtaagattttcaagcatatcatatacacctagattgattaaaagctttttgtagatcattttaatgttgttccatctggaaatataatccggcaatatcataccatatgctctgaattcagtcatttgccttttcagattttcaatctcttgtattttgtttgtttttcccgagttcaagcgatgttcgagatgcaaacatgcgtactttttatgcagtgctaagattactaataaaagtccgtttctttcttgctcttttatttgttcgtcaaaagtttgtttctcatctcctgttgcatatgatattgtttgggaagaaatgcagcatccccatcgatatgaattatagttataatctttcacagcatatacataagaaatgtcctcctctgaagaatcttgaacaacactttccaatggggccataagatgcatgttaaatgtgatgtttctcatttgattgatactgtcaaaccgttttgtgaacaatccaaaattataaatgaacgcatcaagaaacagtgatttgtcagtatagaacgggttcaaatgtatcgttttaaaccaagtccgaagtacactttcaaaatcaatgtttggattacctacaaaagaagtttttacgtttccactttcgtatcctggatgacatactttttctaacatttcaatttttttacatgaaagcaaaacacatacaaaagcaatatccatttgacatttaaaaacaataatttcatcaatcaatattgtttcattgtattcatctacatttaagagacaacatgggctttctttttttattaagcattgacttacattttgttttcttattattctgcattgcaaaccggagaaattatgatattcaaacatatcctgaatatctcggtttatatccgatgattcaacggcatatggttctcctatagatttaaatatattctctatttcttttttgcttccttcaaaacgggttggaaatataataaaactgccccaccgatctttaatcttgctcatgtttatcgcactcctattttaaatctcaattaaaattcaaactacaacaattgaaatcatccatttattctagcaccatttttcgaggcttgtatcattttaccatatacatcccaagcgaattcgttaactttatatcaatttttcaaatcgttctgagtaaccgatgtacgataagacaacaattcaagtcatcctctcgttgtttcccggcactgtctgcgggatcaagggatttgtggatctcccctatctcatgctttattttccgcatcataaaatgccgttttatgagaaaaagccctatttatatcgctttcaacgtgttatactggataaaataaaaagcgcccgaaccggacgctttcagatacaatcaaatggtggaatatttgggataccaccataccctgcggcgtaaagccttatcttagaacttctgatggatattgataaaccgatacggtatcaatgatgtttactctgatggatattgataaactgacacatcaaaaatctaagctcagctttattatagccgccgggcgaatcgttgtcaacgggaaaggagcgcagtatgcactatattttgggtctggacgtggggattcagtcggttggatgggctgtgatccgatacgatgagcctgcccgcatcgaggattttggggtgcgcatctttgataccaccgaaaatcagaaatccaaggacaacaccaaccaggagcgccgggcttttcgggctgcaagacgtgtgctgcgccgccgaagccatcgcagagcaatggtgaaacggcatttacagagaattggcctgctgcgggaaggtgaggtggaagccttctttgaatccggtcagtccgacccgctgcgcctgcgggtcaaaggtttgaccgaacagctgacaccggctgagctggcagcctgcctcattcacatcagcaaccacaggggctaccaggctttttataacctgaccgaagaagaactcaaagagctgcccgcggcagagagaaaagagtaccagcaggagcgcagtggcattgagctggtggaaggcatcatggagcagggacattatcgctcggtggcggaaatgctcttgactgacgacacctttgccccggatcatgccgggccaatgcgggtataccgaagccatccctatctggatacccgttaccccatcagtcgggacctgctgcgcaaagaggctgacgccattctcaccaaccaggcccggttctacccctgtctgaatgcgccttaccagaccacctggcgcaaagaatccaaaaccaccaccaaccgcgcatttctggaatggctgattttcacccagcgggattttgaggacggccccggcgaccgggatgacgccatgcgcaaatacaccggctttttgcaggctctgggcaagtgtcccttttaccgcgaggaagaccgcggtccccggatgaccgtactgggggacttgtacgctctcaccaactctctgtcccagtatcagtacatgaacaccgaaacaggtgtctttgaactgcccaaagaacttgccgaagcgatgctggctgcagccctgcgggatgccgaactgcccgccaaaaagattcaggagctggccaagcgttaccacatcaaggtggacaacaaagcggtaaaaaccgccgaccgtgctcccaactgcatcaagttcctgcgccgggtccgtcccattctggagaaatacggcatcaactgggaaaccgctctgggcggcaccaccctggaagacgttctggccgatgacaccatgctcaaccagatcgggcgggttctgtccctctaccagacgccccaccgccgccaggaagaactggtgaaaattcctggtatttcaccggaactggcaaaacggctgacggcggaacggatttccggcaccgccaaagtcagcgcccactatatgcgggatgcggtggaagcctttcagaagggcgagcgatacggtgaatttcagtggcgccggatgaacgagctggagcagcctctgcccggtcaggccagcggcgcccatgtcaaactgccgcccttccccgtcgatgccgagtttgccaagaactcggtggtgatgcgcagcctcaacgaaacccgtaaaatcatcaacgccatcgtggggcaatacggttccccctgggcggtgaatgtggaagtggccagcgatctgggccgctcctgggccgagcgggccgaactggaccgccggaacaagcagaacgaggcccagaccgaaaaagacaagcagcaaatctgccagatcatgggatatgacagccctgaccaggtcaagggttccatggtggagcggttccagctggcgcagcagcaaaactggcagtgcctgtataccggccggcccattacagacaagcgggccgccctcgaccccaaaaacaagggctttgaagtggaccatatcgttccattttccatgattctggacaacaccctccaaaacaaggcgctggtctatgccgatgccaaccagaccaaggggcagcggactccgctgatgtatttgcgcgatcccgcacagcgggagcagttcattgggcgggtcaaccagatggccaagaaccatatcatcagcgaccggaagcggcaatatctgctgctggccgatctgtaccatacggatcttctggacgagtggaagagccgcaacctgaacgatacccgctacattgccaagtacctgcggggttatctggagcgggaactggccccggccccagagcaccgcacgccttttgtgtttccggttaaaggcggcctgaccagccggtttcgccggacctggctcaaccgcagcacctggggcggagatgaaaaaagtgaactccgcgaatccaccaccttgcatcacgcagtggatgccgtggtcattgccaacatctctcctgccaccgcgcagattgccgaggacaacctgcgcctgaaccgcattctgaaaaatagccgcggcatcgaaagacccgaataccgcgcccagctggagcgcagcctccaaaccctggaacaattctaccatgttccccgcacccgcggggaagcttgcctcaagcgccagaatcggattaccgcgctgatcgccaacctgaacatcgaggtggatatccgtttcggcgtccccggccagaccaccgaccccgacagctaccgcagcctggtgacgaacttctatgctgacgacccggattttgccgcccgcctgacccagcccctcaccagccgcaagccggaacgcaaactgcagggcaccctgaccacggccaacgctctgggaaccaaagagatcgacggcgttttgtatgaggccaagcgcaccgacgtaatgaagctgacccaaaaaaatctgtcccagctctgcaccaacgacggcgacctgcgggactctctcgctgagctgctggctgacgccggaaccagaactctggcggatgtgctgtcggagcagggcaagaccgaattccgcacccaaaagggccagctcattcgcaaagttaccctgaagggcagcgtggtggatcagtacaagatcaagcagattgcacccaacaattactcggttctggatacgaccagctattactgcaccgaggtctaccgggatcctgccggcaaaaccagagtgcgggccattgcccgggccagtctggtctgcaaagggaaaaaactatggctgacctgccccaaccctgccgactacgctgagcacatcatgtacctgttcaagaacgactacatccgtgtagaaactcccaacgggctgcaatttgaaggtttctaccagagcccggccggtatcaagcaggccaaattcaacggcatcaaaaataatgacgctaaaagctgtccattccacatttccggcggcgctgttgtcaaaaaatatgacatcagcattctgggcagaaaaggaggcgagattccatgtggcgaacccttatcgttactgctggagaaaaaataacggtcaaggacgactggattcatgtctgcagcccccagcaggaagcccgggttcccatcggcgacctgtactcggtggtggtggataaccgtcaggcactgctcagtatgccggctttgacccggcttgcccaggcaggcgtccatgtgctcctctgcgatgacaagcacctgccctgtgccgagctgctgccactgacgctgcactaccggcccttgacggttttacagaaacaaatggctttgtcccaggaattcaaagaccatctgtggcagcggatcatcaccgccaaaatccaaaatcaggccaaagcgctgcgtctggccggggccagcggcgccaaagctcaaaagctggaagacctgtcccttcatgttctgcccggtgatatcggcaaccgggaagcccaggcagccaaggtatacttcccagccctgtttgggctgggttttacccgagccctggaggatgtgaccaacgcagccctgaactatgggtatgccattttgcgttccgctgtctgcaagacgctggccgggtatggctactcaggcattctgggcctgcatcacatcggagccggtaatcccttcaatctggcggacgacctgctggaaccgctgcgccctctggtggacctgtggactgacaaccactgcgacgatctgtttgaaactctgacccgcaccaatcgccgggaactcatcggcctggttaaccacgtcatccgcctggatgggaaaaagatgcgggtgcgctatgccattgaccgatatgtacgcagcctgaccagcgccatcgaaaagcaggacgccggcctgcttcttttgccggagctgatccgggatgaccccctgtttgaggatgaactggatggatgatcgatttatgcggctgatggtgttgtttgatttgccggtgaataccaaaaagaggcgccgggattatgcgcagttccgcaaggcgctgattcaggacggttttctgatgctgcaatactcggtttatgtccgtctggcccggaaccacgacgacgcccagaaacatctgcggattgtggaggatcatctgccgccagccggctctgtccgggctatgttaattaccgaaaagcaatatacccagatgaagctgctgtgcggcgaacagatgaaggacgaacatttccttgacaccaaagatcttcttgagatataatttagtagaaacaatgctgccaaaaccgcaggaaccactatatcttgcggttttggttctctgatggatattgataaactgatacatctggacattatcgctccaaagataacggttttggttctctgatggatattgataaactgatacctccaggcccgcgccgtatttggggttggcgttttggttctctgatggatattgataaactgataccaaggcggccatacatactatattatataagttttggttctctgatggatattgataaaccggcacgggattgaactgtatgtcagacctggaaaaggcttcctttggcagctttcaacctgccggaggaagccttttattccagctctaacatcccgaatccacacaggcttccccgcagatccggccgtcacttgtactttacaaccgtatacggcaccacaatgccgccctcatctcccactgtgttcagcagttccaccataccaggcaggcgctctgcacagaagtccttccgcagaggcaccgggctgatccccagtttctcgaaattcttcaagatgccggaggtatcgtatcgtttggcttccagcttctccagggctttgtccacagactggaccgtcttcagaagctcgaccagtttgtacatggcctctttgtttttccttttgtaatgggatgcccgaatcttttcctgcaggacctcggcctgatagtagctcacgtccgggaagcatttgctgaacttcttgacaagttcctcccgggtgcattggaccagtgcatggagcagactgtcggtgtcggaacatcccagcttcttttccagacggcgcagatactcccgctgacagtgcatctcaaaccggatgactccattcggcatcttctcataggagagctccagcccgttttccttcatctgatagctcttgtcgtagatcaccaactcatgggttccacaggcaaagcgcaggtagtgcttgttgtagcggttggccttctttttgttttgttttttgtcctggtagatcattcgtgtgtacttgggcggcgtaggaagtttccgcaggacacgcactagttcacggaagatcttcttgctgtcgcagcggatgttggtacagaaatccacccgtgagagtttgtactggtttatgtcattttcaaaggttgtcttccagaacagcctccggaaggcatctgccacgcgatccacgctttcctgtgtgggctgtaggatgcccaggtaagagtattcgtccagcggttcaatcagctttctggggttgatggtcattttcaaaaagtattcagaaaagagatcgttgccgtcgtcgtcatagtcagagggatgctcagccttggaatcattgaagccgcactgcatgagacagatccgtactccatagcggttgaaggcgttgcaatgatggaagatataggcggatccattttccccctttgagaaggtttcgtatgtaccggggtaattgagatacatgttctctttgattgtataatacttggtctgtgtcaagtgcctggtcaacgaaaaggtatgaatcgaaaatccatctggttccagattgaatactgccgttttgtgtttggtaatctttctgcttttacggtttccttgattcaggttcttgttcttactcatagtaaaaacacctccattggattgatctatgagagattcatcattatagcaatgttacaaaacaatcaaaaaataatgccattgtactgagaatgtttaaataaaaatatacccccctttatccgttgatcatattaactatactataagtatagttcctgcttaaaatacacctgtgtaaaggggtagttgttgatattcaatagagtccccgaacggcggggatgttgtttcaacaaaaaagacctgccgcagacatccatctgcaacaggccttaactgttccttatgttttatgttgtataactgtcaaatcagaaccaggtttgaaaaacaccttgacagggtatcggaattttcccacggtactgagcgaatttgttcgtcaataaaatcgaattccttcccgggcgattggatggcccaggtgacgcccaaacgggctttcagtttcaggcgggcatgcccgatgtatttctttgcatacggttccatctcgtccacgaaagccgcactgcgcctgacaatttcacgatcatagggatcttccgaaatggcgttcagcagcaatgtctccagcgcgccctgttggtcggtcgggattaccagcagcagaaaagacaatgactgctgctgcccgtaaccgtcctcataccggttttcggtccaaacattctgctctgcttgcgtgaccaccggggcaaagcactggcacacttccctttcaatggcttcttcctggcgatcatcgcggtctgtgaccaaagccattttggagaatacctgggcatctttaattgccgcccggatcttttcctcgaaaaagctgccaaatttattcttcccgcccacagcgcaaatcagcaaataatcacttccctgctgataccaataagccgactcccccgccttttcatccactgaaatgcgatagtttttcggcccacgcttgcaaggtatccactgctggacccggcctaaataataactgagcaaaatcgcatccgttttgccctcacacagaatcagtttgttcatagacgtacctcaaagccgaactgttcccgattctgatatacatggcgtcctgaaagaacacgggcatagctgcggaaagaatttaaatcctttttgagcgtgacaacgctgatcgggtcttccccgccggttttacggtcgtagtcctcaatggcaagaaaaccgtcgattgcttcgatgctgtgggaggtaataaagacctgcacgtcgaacttccggcaggtagcagcaataaatcggaaaatttcatcgaaatagcgcgaatgaattgcagtctccacctcatcgatcagcaaaatgccatcgacagcttttgaaattccacttgcaatggacaacactttcttaatgccgtcaccgtaggtagagagcggcatggttcccagctctttgtgtctaacacattcaaccgggcggttggtgatttcgttcttcagcagaagtagatccgtgatgccggggtcaaacagctgcaggatgcccacacacagatctttataggagtcgttcttgatgatagaggacaacattccgcctctcagatggtcaaagggcgccagataaaccacgttcagcaaccggctgcttgcgatgcccctgccggatatggtagaatactcgtgaaagctgatctctttcttctcctggccgctttcagtacgaacctccagttccccctggaacgcctggcattccgaaggcagaagattttctctccgcgtagaaaagcggaaaagcattttctgctcctcagggtccagcaaaatcgtctgtgtcttgccttccagtgcataacagacatcctgtccatgacagcgggcctgcatttcgatccgcttcacttccgactcaatatgagggaacagtgcaagcaagttctcataggcagaagtgctgccaaacggattcaagttgtcccgcattcgggcaatccgcagcgtgttggtaaagtctccgggattgcgcagcaggagaagcgcctccaacaggctggttttgccgcagttgttgtctccggccaccagattgatatgattcaggcgcggaatagacaattgctggatgccgcgaaattgttgaatctgcaggctttcaatatggattgccaccgtcacacctcctgatcttcgaagctgactaccagcctctttcccagcgcgtccgcaatccgtttcagggtggacaggctgggatgatggtttccattttcaatcttgctgagattggcctgtgagatgcccgaacgctgcgccagctgtttttgggtcaggttggaggcgctgcgggcggcgaccaccaaagcgcgcacttcttcgttgatgtcgtagtcttcgttctccgggacatctttcgcaggcgtcagctgcaccttgtcgagggcctcgtcaagaaatttctgaaagtcagtcatggcacatccctcccttttaatcatatgttatatttaacatattgtcaagcaaatttatatcaaatttgcaatttttcaaaatagcatctcattcaacaatgaatcgctctgcgttcaacaaaagttcaactggattccaacaaatcccaaaaagaaaccataagataaaaattaaaacacgaaaaaatccagtgtccatgccgatttacaagatatccccaaaagcggcgaaaagcccagatcataactccgactccaaaggccagaggttcgaatccccccggccgcaccacaaaaaaacaccctgcaccttcaaaaaggtgaaccgctccagtaaaagtagacagtgaaaaaagaaggcctcctgtggtagaataaaactactacaggaggtctttgctatgcccagaaaatacagccacattcagg

SEQ ID NO: 4487 - DNA, 23213 bp, synthetic construct
  misc_feature 1..23213: note = Synthetic
  source 1..23213: mol_type = other DNA
atgaatgacttagattatgtaagatttgaaaatatcaataaaattattacagatggaactcatgtttctagaggaaattattatattcaaacccaagatcattactatggaatcaatttcaaatatttcttaaacttaaataaaattaataataatatgacttttcaatcattgccaaatctgcaatatcataaatatttaaattctttattctataaaaatcttctttattctattgattatgaacttaaaaatactactagagatttgggttacgggtatatccaaaattctttaaatgtccctataggcttgcaattttctctttttaagaaatatatttctttgggaatttggaataatttttatgcgagtaatttagctattacaaatgcttcagcgaattatatacctgatttggataaaaaatctacgcgcaagtttggaaatcttttatctgcaggttattcaatctatctcaatacagatttggcaaaagattacgataaagtttttcatacagttcaatttgaaatggcttttagtgccccttattttcaactttctaatggattgtttgattcacagatgtatgcccttacttcccaagcaagaaaccaataccaacgagatgatttagatagatattttatcgacaatcattattataacgatatctgggatccccttagtgttacaagctctatgatttttacaaaaaggatggatttgaaattaacacaatacttttatggtttaggcgggaaggaattgttttattggaaaatgtctcaaatacttaattttgatgatcctatttctattgctagaatccctatggagaataaaattggcttctctccattggagggattagatatttatgggagtattttttactcattttattataatagccttgatgaaattgctttaaatgcaaattataaacataattatttgctggccaatttatcttactatatcaagagaaaatttaatgataatgggattaacaaaatcatcgaaaattcagcaaattatctaaaaggagcagtgagtaatgattttggatattttggtttgagtgcctctgtagggtatgatattaaaaataatgtcttgttggattgggatgttggaatttttaaaaatatccgatgttttggaattgggcttaaatttgttaatcaaagaagaccgattttgactaacgatccgggtaatcctttagaagttttgaaaaatacttatattaaattagagctcaattttgtacctcttactaacacgggtttgacctatcgtgttgtaaaataaggaaataaaataaggaaataaatggagataataaaaactgattatatcaagtttgaagatagagatgatgctttagtgcgcttgatggatgagattttgatatggcatttagatataaagaattgcatattgcttgcaaccagtttagcgggagttggatttggtgataaaatgtccaagaaactcaatgtgccacttgattttttattaaccgtgcctatttgtgctcctttaaataatgaatgtgagatcgctattgtaagtgaaaatatggatataataatgaatgaagctttgatagattcttttgatattactcttgattatatttatggtgaagccaaaagagcttatgaggaaattattttggcagatatttataagtttagaaagggctctatgatgagttctttgagtggtaaagatgtttttattgttgatgagggggtagagaccggacttacaatgaatgttgctattgagacttgtattgccaaaggagctaagagcatttatgtggttactcctgtgattgccaaaaatgttgcttcaaatttgtgtgagatttgtgatggtgttattagtgttatgaagcctgaatattttgtttctacggctcattattataaaactttgttgccgatgggtaaagaagaaatagaaaaaatattggatacatcattgcaaaaaaccagagatatagaactaaaaaacaaaaaataaggaacacaagtgcatacaattgaattaaaagatttgaaagaaaaatatactttagagtatgtagccaaacaggctagtggagctattctttatcaacatggtgggactgtaatgcttgcaagtgtggctgttgatgaagagcttgtagaagaagattttttaccattaacagttcagtatattgaaaagtcttatgccgtagggaaatttccgggtggctttatcaaaagagaaggcaagcccggagaatttgaaacattgacttcaagaattattgatagaagtttgcgtcctatatttccaaaaggttatgcctatcccacacaaataacaattatggttttaagttatgataaaaagagtgatttgcaagtatgcgccctgaatgcggctgcaaatgctttgtatatttcaaatctacctttttctcgtcctgttaatgcggtcagagtagggagaattgatggagattttattttgaatccaagcatgcaagagcttgaaaattcaagtattgatttgtatgtttcaggaagcaaggaagaattattgatgatagagatgcgcagtctcaaaacaaattcccaaaccaatgagattgcagaagaagatttgttggaggcacttgaatttgctaaaaaagctattttaaaagcaagtaaagaatatgaaaaggttttccaatcttataaaaaatctcctatacatttaactttacatacatttaaaaatcatcctgatatttatgagtatattcataaaaattattttgaagaactcaaagatgcgctaaatcaaatggcaaagagcgagagaagtatggggttaaaaaaaattgctgcagatatttttgaaagtgttggtcaggataaagaatgggagttatctgctattgatgctatgttggaagtttgtaaaaaagaaattttgagacatcaaattatccatcaaggagtcagggttgatggtagaggatatgaagatgtaagagctattcggatagatactaatattttaccttttgcacatggatctgttctttttacgagaggacaaactcaagcattggtagttggcacgatagggagtgataatgatgcccaaactcaggagcaacttggtgataaaatatccaataaagaaaagtttatgtttcattataattttccaggatttagtgttggggaagctagcccgataggttctccgggtaggcgagaattagggcatggaaatttagcaaaaagggctttagagtcaagtattttagattgttcaaaaacaattcgattggtttcagagattttggaatctaatggttcaagttctatggcaagcgtatgtgccggatctttggcattatgtgcaagtggaatttctattagtaatcttgttgccggagttgcaatggggttggttgttcaagaggagaaatatgcgatattgacagatattaatgggcttgaagatcgttatggagacatggattttaaaattgccggttctaaaaaagggattactgcaatgcaaatggatataaaattaggaggcatatcccataatatcttacaagatgccctttatcaggctaaacgagctagagaatatatcttagatattatggaagaagctaaggaaaaaattattatcaacacaacaattctcccaagtttagaaatttttaatatccaacctaacaagatcgtagatattattgggcaaggtggaaaaactattaaagatattatcgaacgttttggggtaagcattgatattgatagagaaagcggagagataaagattttaggtcaaaatcaagaaagcgcaaatatgacaaaggactttattttgaacctcattgatactcaaaaaattgatttgaataaatatgaatccggacaaatatttgaaggtgaagtcaaaaaagttcttgattttggtgcttttatatctttgccaaaaggtggagatggtttattgcatgtcagcaaaatcactaaacatcgagaagaaaatattagagaatatattcgagaaggggatagaattaaatgtaaaattttaggcttgaacaagggaaaaatagaacttgatttaatacgagagtaatttaaacttatatttatgattttttagagataatcccatctcaagaagtttagtaggggataaatccgaagagcttcaaaaattgcaggagattgttatgaaaattttatttatgttgttttttggggcagttggtcttatttttgccaatgatgtagctataggtggtatggatatgatcaagtccttttctgttgcgggcgctgttattggtctgggaatagccgctcttggtggtgctattggtatgggtcatgctgcggcagctactatttcaggaactgctagaaatcccggaattgggggaaaacttcttacaacaatgtttattgctcttgcgatgattgaagctcaggttatctataccctggtttttgcgattattgcaatttatgctaatccttttgtagggtaataaaataaatttgccccaaaaagggcttatgcgctggtggtggaattggtagacacgccatcttgagggggtggtgaggaaactcgtgcgagttcaaatctcgctcagcgcaccatgatttttatacttgaaatgtttagttgtgaattggatattttcacatagcattatagtattcaaaaagccggagtggtgaaactggtagacgcgctagactcaaaatctagtaggggcaaccctgtgtcggttcaagtccgaccttcggcaccattgagattttttaattattttgcaatacgaccacttcaatcttccttgaataatggattttaaaagtctaaaattctgcaattcttttttaaattgattgtttctatatcaaagttctataatcttctgtaaagatttgtttattttggattgtcttgaagagttagagattgtattttcagaatttgccctatggcatctccgaattccttataagtcatgcggggttctttagtagtttttgataagattatttgtttgcttattttgactccttttgatatttctctaattttctgactcttttttctaaatctctgttatcaaaaaacagaaataaaaccactgcacataaggctatatttgctaataccgggacaatcattgtctctcctttgtaaatttgatataattcttgaaggcaagatagatgattttgattggacaggattcactcctgtctcaagtgggggttacccactccaaatctgaatgatttggctgatgtttaagataatgctagtcgtcaaaccgattatctcaagaatcaatctcaatcttctcatcttgtcttttctacttggattaaaataatttatatgttttatgaatgaataatatgactttaattaaattatttttttatgtaaaattttatttatcgtttttatttgcctaactcctgcataaatatttttttgattcttggaatacagagacagattttttcttggcaatttgtgaaaatgattgcatgtttttccctgatagctttagcttgttctttttgggctttagatattgtcttattaatcgcttttgcagtttgcttactcaaatctttttccaaactcatgatattccttttatttattataattgacaatttgtaataaattatgtaaaattattgtatctaagctgattacttagacgtttaaaaaaaggtaactttgtgaggaatgcccaacatatctttaatggtatgttgggtttttttttggtttgtgggagggtgggattcttcacaaggagtccataaatggattttcttaatatcttgtttgtgattatctcaatgcttattggcatttttagggaagagataagaaaattcttaaatctcaaatccaaaagataattaccgcttaccttaccctctcaaaaaactcatcaatttttgagagggttttttattcaatgatagataaagctcataaaatcaccccttcaataccaagttctttagtgtaataactcaccccttgattacttgtaagtatccaatgcttttgagattcagagagtctttggataaggatttgttttggggattcagagagaatgaccagtttcagaggttttgccttccttactaagtctttaaagccttcatattcactgagttcattcactaagattttggcttggaatgcgatactctcttcattaccgccaatcttttgatagatgggttttttgattgtttcaatctttttgatacccattgacagagtggttgtgatagactctatgttttgagagactctgaagacaaatctatcaatcttgataagagtgtctttggtgtgaatggatttgtattttttaaaaggatcttccataggttctgccggcttgttttggagttctttttgcttggctttttgtttttggatttcttcttcgagttcttttttagcgtttttactttgtgtgttgaagatgttttttagcatgggattccttattaaaagtctttgtcatcatcatagctgtaactattaatcgcccttgttatctcttgagcgttggtattggtattgatggtgatatttttgtaatcattgataactcttgagttatgtgtttggttgttggcaatggaattaagcatcttggctttgttttcattttgcttcgctagtgtttcatcaatgctacccttaagggatatggaagagtttttgtttgcttcaacttctatttttttatcatcaccaccaaaaataccggcaagccatcctgttaccttgcctcccagattgactgctgtagtgattgctttaatcagcatttcaaaaggataagctatcaacctgacaattcctccaataactttaccaataactaatcctgtttgtgcaaaaccgcttaattcttcaccggtattgctaatatctccaaagattagattaaataacataccaatgggtttaaatataagctttattacattccaaattttagaaaataaaggagcaagtggatcaaaggctgtttttaaggaattccataatcctataaaagaatcttttagtggttgcataccttgtgcaattccttgaaacaatcctttaaaaaaggctttgattggttcccaatatttcatcaccaaataaactgctgcccccaatgctacaaacaatgcacctatacctgtagagattaatgcacctttgattgaaaacattgcaattttaaatcctcttgcaaatagattaataccaatagataaagccttaaatgttgtatttaatatcagcaaggcagtattataagcataggtaatgcctgttgctattccttttatgatgtttgtaattcttaattttttatttaaaaaatctaaactgaaactaatagctttaagggtaaagttatgagccttagtagcaaatgtaagggcattggttctgatggttgcgattttggttaagaatgattttctagctaaagcaagattgtatagtcctacgccgtttgtaaggaatgcaattgagtattgcaatggataaaaaactagagtttttagatttccaagcatcataataccaagcattgctgattttaatccaaccaatactacaatgccacctgctatatatttcatcactcctttataattatcaaaaagttcagatagccactctacacctatttttaatccactaaaaatcttacctagcacaggcacaaacccattcccgatactcacccccagatgcttaaaagagtttcctaaggagatgactaaatctccaaaaccatcccctgctactctatctactgctttttgtaatgcaccacttgaatcttttgtagattctaatgccagattaaaggctttgactccatctttagcggagtggatattgtttgccattttcttgccaaagagttcggagatgactccaaagcgttcttcatcctccagattgtttaaatcttcaaatagatttttaatcgcttcttggggattggattgtatatcctcttttaactgctctgcgtctaatcccatttttgccaaagaccttttaaaaccatcagtggcatgatcaatattattgagttcggtgaagaatttgttgatacttgaacttgcttctgatgaatccaatcctacggataagaaagacgcacttaaagctgatgtctctttggcagagagtccaaaggctttagcccctgagagagtggtattggttacttctaatatggctttggctgatgttttggtggagagtgccattgcactcacctcatcagagaagacagagagttctttggtattgagatgaaaggctttggatattttagagattgtatttacggattcttccatccccagtttaagtcctacttgcatgtttaatgccagttggctgaagtctttgagttcctctttagctactcccagttgtgcgcttaactctgtagttttgagaatatcattcatccttacgccattatttttacctaaatcccacatatcttttttgagattctccagttctttggaagagaggtttgcaaaagcattgatgtcattgagtgcattgttaaaatcaatgctaaggcttaagggtttagagataagccctttaaaagatgcgtaagtccccagtatttgataccttaacccatcaatagctttagtggcatgactcatatctatttctaatttaactctagtagcatctcgaatgcgttttgccatttcattgacttttgcaaattgatctgtgggcataatcgaagaggttttaaggactcctaattcttctttgaattttgctattgattttgtaagcccgagatccaaactcttagtcagactttctcctgtttttttattaaagattctcatgcctttggtaatctcttcaaagtctgctcccagattgagtgtgatgtctgattttaatcccattgcttaacctttgatttgaattttattttttatttgaatattgatttttaaaaaaaagtgatgtagaataattggagtttgagaaaaggaaataaaaatgagagaaaaaaaggaaaaaagcttaaagggtttttgggtagctgcttgcaatactctgacatttttcactttccatgtttcattttttttcttttttatgtttttactctcggtagttttcgggtattcatttccggaatttttaataatgtattttcttgtaggtattcttatgttcttcatttttgttattcctttgagagctaatgtatgcgggttttattatataaaagatgatggtatctttctttgagttcataccttactctcagcgattcttttagctatctttgtatatgtcaaaaactctttaaattccatattcttaatatcacttaaactaaagtgcaaggcataaccgattaaggctatgccttctgtcagtccgatacatccactccaataaaatcttttaccgaatcaagtagttttttaaattctctcacagataaggcattgatagcatctagtgttaaatcaccttgactcatatcaacaagtagagattttgcaattcccagctcatctttgcttttggcttgtgctgaagaaatttgaagtaaagtaggctctttaattgtgatttcttgattattttttgagtttgtaatagaatttatatcaaaaatcagttgctttctaaggattattttttgtttggttgtgaggagtgattactctattatcattagagtagtttttgatttttatctttaagtgctttgttagtaaatttagtattaaaaacaataaaaaattattgattcatataatataaattgctcaatatttagttcttatgataaaatataaaaatttatttttgaatataattttaaggataataaatggttactaaaattttgggtatagatattgggattacctctatagggtggggattgattgaagttgataatgacaataaagaaaatagtagaattattgattgtggagtaaggttatttagtaaagcagagaatccaaaagatggtaaatctttggcattgcccagaagattagccagaagtacaagaagaaattttaaaagaaaaagggtaagagtcaaacaaattaaaattttactttcaaaatatctagatattaagctggaagactttatttcagaagatgaacatctcccggagttttttattacaaataaaaattttatttctccgtggcaattaagaagtgatggacttgatagaaaactaaataataaggagtttgcaagagttcttttacacattgcaaaaagacgtggttataatgataaaacaaatataagcgaagaaactatagaaaataaagaaagtaagattattttagaagctatcaataccaataaagagcagatgcaaaaagcaggttacaggactattggggagatgatgtttaaaaaatattataataaagaaatttctaagggtaagtatgaaaatgttagaaatcataaatctaaagatagcaaagaaatcagttacagacgttctataggtagagaagagcttaaaaaagaaatagaaattttattttgtgcccaaagaaaatttggcaatcaaaaagccacacaagacatgcaaaaatcttatatggacatagctttttatcaacgtgatttaaaaagctttgagtcaatggtgggagattgtgaatttttcaaagatcaaaaaagagcctgtaaatgttgttttagcgcagagaaatttatcaatcttggaaaaattattaatactttaatttttgttcaaaaatatgcaggggaagtctattcaaaagaaaaaatccaagaaaaaatccaagagattctcagtgaagctgagaaaacaaaattaggtatcacttataaaaaacttcgaaagatattgaatcttgaaggagttgaaaaatttgaatttagtgccttggattacaccaaaatttcaaaaataaaaacaggagaagaagaaataatcaaacaaaaagatccggaaagtcagatttttattaaatttgaaaaataccataaacttaaagattatctatctgaattttctgaagaatttgaaaagttaagtcaagagactttagataatattgctaatattattgcatttaataaatctcctaaaattttggaagaaaaactttcttttttgtctatttcagaagcaatgagacaaaaattaatacaaaatcaattaaattttaatcaaacaattaatttaagccttaaggcactttataaaatattgcctataatggagcaaggcagtaactatagagaagctctggaagaagcaaagcttttaaaacaagattcaaataacaaaaaagattttttgcctccattgtctgaaactgaggaattttctaatgtgttaaatccggtagtaaatcgtgcaatatctcaatataggaaagttgtcaattcagtacttcgtaaatatggagaggtgcataaaattcatattgaacttgctcgtgaagttggcaaaagttttgctgataggaaaaaaatagaaaaagaacaaaaagaactctatgagagaaatcaagaagcattaaaaatatgcaaaacaattggtttagagccaaatggtcaaaatattttaaaagtaaaattatggatacggcaaaatgagatttgtgtctatagtggaaaaaaaatttcttcaaatgatttaaaaaatgataagaaagataattcaaaaaacaataaagaagatgataagaaacttgaaattgatcatatttatcccctctcaagaagcttagatgattctcaaaacaataaagtattggtatttgcaaaagtcaatgacgaaaaaaacgatcgaactccttatgaatggttaaaaggaaatgaacaaaaatggaatacactgataatacgtctgcgcacaatgtgcaatttaccagagaatgtaaaaagaaaaattgttgacaaaaattttatggataaaaaattaggtacaagaggagagtacttaacacgtaatcttaatgatactggttatatcagcagactagtaagtcaatatacaaatgaatatttaaaattcttgcctttagaagaaaatgagaatatttatttaaaatcaggtgttaaatcatcaaaaaaacatattgtcgttattagcgggagtctcactgcaatgttgcggcattattggggattagattccaaaaatcgggatacacatcttcatcatgctcaagatgcccttattttagcatttaccactgattctaatattaaggcttttacagattatctcaaatcaaaagaagaaggctattataaaaaaatcaaagcagatcgaaaggcacttgaattaagaaaaagtgataataaagctaagtatttactacgtgatccaataaaaaatttccgatctaaaaccaaagaggctgttgagaaaatttttatttcaagagcttctcaaagaaaagttaccggaacattgcatgaggaaaccataagatcaaaaaaagattattttaaatcttatggcggagaaaagggagtacaaaaggcgcttgaattaggaaagatacgccaaatcaatggtggcattttcgataatggcgatatggtaagagtggatatttttaaatctaaagataagggtaagtactatgttgtgcctgtttatagttatgatatagcaatagggaagttgcccaataaagctattgtatacggaaaagataaagaaggggttatcaaagattggttggaaatggatagtaattatgagttttgctttagtctttttagaaatgatttagtccaaattcaaactaaaaaaatgcaaaattttgaatatgcatattatgtgagcacagattcaggtacaggatctttaacctttagacatcatagtaattatttatcatcagaatcagagaaagtttttttcaaaatcaaaaagtcctcaggttttttggcacaaaactgcggcatacaagatcttaagatttttaagaaatgtattgtttctgtattgggcgaaattaacgaagcaaaatttgaacccagaaaagatattaagttaaaaacaacaaaaaaatgaatttcaatgggtagttttgatgaggcttataaaactatttttattagtaatcctgctaaattgagtcttaaaaataataatttttgcattactcaagaaggcaaggatataactttacccttaagagatattttagttattatttgtgagaatcatcaaattaatattactaatagtctattaagcaaattagcagattctaaaatcgttctttttagttgtgatgattctcatattcccaatggtgtttttatgccttatcttggtcattataaaacttctgaagtgttggaatttcaaattaagacatcccaacaaaccaagtcaattttatggcagcaaatcatcaagcaaaagctttataatcaaagtgagcttgctaatggacaaaatccccaattagctggtaaaattctaaaaatgtctaaagatgtaacccttaatgactctaaaaatcttgaagcacaaggggcaattctctattttcaagcactttttggaaaagattttaagagaactgaaattaaccctactaatgctgccctcaattatggttatgctattcttaggggttgtgtggcaaggaatttagtggggagtgggttcctccctacgctaggtatttttcacaaaaatcaatttaactctttcaatcttgctgatgatatgatagagccttatcgaatttttgttgattctcttgtggtatttatgttagaaaatcaaagtcttaaagatgattttagcctatgtcaccgtcaaaaattagcgagcatcttaaatgcaaaaattcaatgcaaagataaatactatccgatgtatcgtgctattaccagaactgtatggtctctggcaaatgcgatcaaaggatttgaaagtgaattgatattaccattatttaaaaaagaagattctgatggaagagaaatttatgagagttttagtgatgtttgacatgcccacccatacaaaagaagatagaaaaaattctgcaaaatttagaaaagaacttatcaaggatggatttattatgttgcaattttctgtttatgtacgcatttgcaagggagtcgcaagtgcaaattctcatcttgataggcttgatttaataattcctccaaaaggacatataagagccttgattcttacagaaaaacaatttgatcatatgagattattgcttggcgaaaagagtgaagcagaaaaagcaaataaaccaagacaacttgtattattttagggtttttcggagattgtaactccacatggaaccctataaccatttattctaggcagtttttaaattcttcttctaaagattggtattatagcatattttctatgctttttgaccttttttctcccaaatttagggaataaagacaaggtctattttagcatagaagaatttaaaaactgcctaaaaccatcgctctctccttcttgaatttcttcttattttagcatagaagaatttaaaaactgcctaaaacgcttaactctcgtgcgattttatggcaaagattttagcatagaagaatttaaaaactgcctaaaaccctttgatagtaagtataaaaataagtggtattttagcatagaagaatttaaaaactgcctaaaactagtaaagatgcttatcaaaattggacaaaattttagcatagaagaatttaaaaactgcctaaaacaaacttcaagatcagtatcaaaaagcacttattttagcatagaagaatttaaaaactgcctaaaacggtatggagtgtggcttcaataaggatggcattttagcatagaagaatttaaaaactgcctaaaactctttaagaagtttaaaactaatgctggcaattttagcatagaagaatttaaaaactgcctaaaacgcttgaggagcgcgccgatataaagagtttattttagcatagaagaatttaaaaactgcctaaaacttttgactaacgatccgggtaatcctttagattttagcatagaagaatttaaaaactgcctaaaactcggatggctttacactaaaaaccttcagtattttagcatagaagaatttaaaaactgcctaaaaccacattgcctaaagcctgcgtgccgttactattttagcatagaagaatttaaaaactgcctaaaacggagggaagggaactcatttcggggcgtcaattttagcatagaagaatttaaaaactgcctaaaacaacaacaaacgttttaacccctcaaaaaagattttagcatagaagaatttaaaaactgcctaaaactcattggggctcctttttgtctattttaaaattttagcatagaagaatttaaaaactgcctaaaactcccatcttttaagtaaaagttcttttgttattttagcatagaagaatttaaaaactgcctaaaaccaagaattgctctctaagctttcaatcttgattttagcatagaagaatttaaaaactgcctaaaaccaagtaatatagggggtttgaacaagattgattttagcatagaagaatttaaaaactgcctaaaacaacaacaaacgttttaacccctcaaaaaagattttagcatagaagaatttaaaaactgcctaaaacatcaaagagataccatgctttgggatcgctattttagcatagaagaatttaaaaactgcctaaaacccgactagattttttcttttttcatcagctattttagcatagaagaatttaaaaactgcctaaaacaagaaagactttggaatgaatcaaaaagaaattttagcatagaagaatttaaaaactgcctaaaacgacgccatcttggagagatgatgaacacattttatagaatttttaatatttatttaattttagaatagatatattttcataatgaaagcaaatttttttatactattattttttatgtctttgggtgtatctctgtctctagcagaaagtaaaatatatgttggggtgggaggaggagtgaatttttacgcgttgggcaaagaattaaaagattttccatcagaaactctttaccctatagattggcaaggtatgctttttggtgggttagaattcaatgatggtgatttcaatggggcacaagtttatttttcttctgattttaatggtttatggagaagagattttttagtagggattaattatgtttttgagccccaagaaagcgatctcacttatgctttgattacgggctttgatttaggtatgcagtttatagaatcgcgaaatacgctgtgggggggggggtgaatatttctaattacataaatgatgagacttttattatgcattataatctggggattagatttcgctataagcattttgcgcttttattaaatactgcattccctctttttcctacgaatgtaaattctaacgttagcgtttattctttctattatggccgttttggtaccgagaaatatggctatagcgaagatattctttgtcacctctatcctattaccacaacactaggtattatatactttttttgaaattctatcacaaaggagtaaatgatgcaaatattaaatcaaattgcagaaatcgttgaagtgcttttacttgtagcattggttttaaatatgtctcaattgaataaaagagttaaaaaaatagaaaaaaaaggagaaaaaaatgatcagatctgaaaaaatttgcgttgtttgcggcaaaaaatttctgggaacaaaaaaatcaaaattttgctcagaggcttgcagatgcaaagattataggatgaatctcattctgaatgataggaaaaaagttaatataactttaactttatcaaaacacggcaatgtcggtgaagaagagttcaaggcagagagttttgaagagttgctatcgttgatagagagtaatagtaggggggaagatcacgttttttatgattctcttgaaaatataatcaaagaatgggatatggttggggttgattgggaagaatacgggctgagtgaagcccccgatcctgataagatttcttttaaaatcaaaaagcaattttatgatcaaaaatggggattgaagggtgatgaaaacttcgtttggaatccgaatacagaaagttgtcaaactttttttctaaaaatcccaccaagatttttagaaagtaaagaaaaaatggcaaaatatatcgttaataatcttttggaaagcacaaggggttatagaatttttaaaaaaactacaaaataaaaggataaaaaatgaaataatagttaagtataattttaaaagcaatgaaaatataaaagataatatcttttataaagaattttttagtttcgaaaaatatttaagaagttttggagattttgaggaacttctacaaactcctgagaatagatacaatacctgtatcgtgatgattcatacatttttccacaaaaaagtatgcaaagaagtttttgatataaaatagattaaataataaataattttattttaatgaatattttgagtatttattaaaaaatatctcaaaaaactacaactccgatgaaaagttagggaaaaatctcagtaagtggattagcacaaatgaaaaacttgccgacaccatcatagccaaacttgattttcgcatgcaagataaaacacaagcttatatcgtggctgctgcagtctcaaaacacatcaatgaatcttctgcagggggtaaatatgtcgattggctggggttgagggagtctttgaaaagcttggaagaaaaaatagaaaatccgagtctcaaagattatatagccactctgaaggggatgagtgagttattttataatgacgggaatatcatcaagcaaattcaaggggggaatatccccttaccattaggagcaaacggactctctaccaatctgattgtaaaagcacatacagggcttgtcaatggcacttttaaaaagcttcaagccttcttgcccaacacttcaggcaggaatgctgcatttttataccatatcaaaaaagccatgaaccaatcgcgcacttctaaagacttcttcttcaatctcatctccgatcccggcacacctgcctctcttatagccgaactcaaaaatgagattttaagtatctcagggacactcgggaaagtcatgaccaaagctacacaagccctggatcaaaatgcccaacaagattatgtggaactgctgaaaaatgcccaaaaataccaagaaaaacaatcattgactcaagaagccaaagagaatccaaaacccaatcatgaacccctcaaagagtttggtacaaattaccctgaatactaccatgacgggaaaggagcgattactaaactcctccaaaccaaagaagggcaagtcatgggagcattctacaaagaagggttaggggatattgatttggtatggggagatgagaaaatgggactctctcatattctgagcaaacaccctgaagttgtggataaaatccctgagatcataaatgatggtgcagtggttgtaagaaaacacgatgccacacagataaacaaagatggctataaagttgtattaaaaagtaatttatatggagaacctacggataatcattgggtaatcacagcttatgaagatacaagaggtagggataagtttatcgactctatccctaacaattcagaggagactctctctaaaacctcttcatccaatcctagcacaaatgaaattaaaaatcaagcaaccctaagcactcaagaagccaaagagaatccaaaacccaatcaagagcccctgaaagaattcggcacaaattaccctgaatactaccatgacgggaaaggagcgattactaaactcctccaaaccaaagaagggcaagtcatgggagcattctacaaagaagggttaggggatattgatttggtatggggagatgagaaaatgggactctctcatattctgagcaaacaccctgaagttgtggataaaatccctgagatcatccaaaacggagaggcagtagaaaatgcgggtgtgaaaagtatcaaatttaataatggaaaatcttatcggataggcttatcaaaaggttggaataataaaggggataatcattgggtgattaccgcttatgaagatactaaatcgcctcatcctgatgtccgaccaagtaatgaggttgcctcgcagagtggaaccgatctctctgcgaacgatttatctgagaatcctagcacaaatgaagttaaaaatcaagcaagggctaaagaaaatccggcactccaagcatggataaaggattaccaaaaactcaaagacaaatataaagattattttagcgcacagcgtttgaagggatacatggaggatggaatctctctccaaagcagagcaaaggaattaaaagatgcgttagaaaaagctgagtctgaaggaagtgaagctatgatcagaaaagaccttgcagtcatccaagacaaagaagtccaagacttctttaaaaaagctgacttcgataaattgaaacttcttagtgctatggatgatcttgagttttatcaagcagtgggtaacaaccaaaaaatcatagaactcattgaagaaaaaattgcctaccttcaaaacaaaatccaacgcaatcaagaagccaaacccaatcatgaacccctcaaagagtttggtacaaattaccctgaatactaccatgacgggaaaggagcgattactaaactcctccaaaccaaagaagggcaagtcatgggagcattctacaaagaagggttaggggatattgatttggtatggggagataaaagaggggggctatcccatatattggataaacatggcaaggacactgccttaaaaatagatgatgtaatagaaaccggacagatttttagagataaacataatcgcttaggcatactcaaagacaatcaaatagtaggcattcatgaaaaatataaaggtgatgacaggcaatggatagttacaagctatgagttgaaagaccctaagcagtatctcgacggtgctgaggcttacgtttcagaacagctgggcaaaaccaatctatccaaaaatctttctcccgataatcctagcacaaatgaagttaaaaatcaagcaagggctaaagaaaatccggcactccaagcatggataaaggattaccaaaaactcaaagacaaatataaagattattttagcccacagcgtttgaagggatacatggaggatggaatctctctccaaagcagagcaaagaaattaaaagatatattagaaaaagctgagtatgaagtaaatgaagctatgatcaaaaaagaccttgcagtcatccaagacaaagaagtccaagacttctttaaaaaagctgacttcgataaattgaaacttcttagtgctatggatgatcttgagttttataaaaaaatgggtgagcatcagaaaattaaagaacttggagatctccttgaagaagaaattgcctaccttcaaaacaaaatccaacgcgatcaagaagccaacctcactaaagcacaactccaagagagtcccaaaatcaaagaagactatagtaacaaagaacccttaagcactcaagaacccctgaaagaattcggcacaaattaccctgagtattaccatgacgggaaaggagcgattactaaactcctccaaaccaaagaagggcaagtcatgggagcattctacaaagaagggttaggggatattgacctggtatggggagaggtaagtaatccaagcaaacacacaggatacggactggcccatatccttgataaacaccctgattttgatatcggacttatccctgagatagtggagaagggaaatatcataaacagacataatggttataacatagaatcagaaaaatatattgtaggcattaataaagggtttgacggaaaaggggataatcattggattgtaagcgcattcgatagtaagaaacccaccaagtcagcatcctctgatgtttttaaagaaagcgagagtctgccttcaaacttaccccataatcctaccacctcagagctaaaaagtcaagaagagcttctgtcaaaataccctactcttatttctacccccgaacaatacgatgagttgatgaaaactctcaatggttttgccttatataaatctgcttttccaaataaggattttgaaattcaagacgtcttatccgctgccgctgatatctacaccggactccctgatagagacataattacaaacccgcaactccaagaacttttgagtcatcttgatgataaacactcccttgtgttacgttatagacataatttgaacgaatttcccgccctcatagaatccaaaaaattcgaactcaaaatgacacaagaagcagcacaggctatacaaaagaatattgaaaaagaaaaacaaaatgacagatatcacatcagttacagaacatcggatttacaatccaaaaaggaaaggatacaaaaactccaacgcgatatttctttcttaagagaagaactccaaaaaactatagaattgtccaagactttgggacacccttccaaagaacctccaaaaatgaaagcctataaacaaatagcctccaagtaccctgaaggtttattgctatttcttaaatatccttttgatatacaaaaaaacgcagaaaaccaaacagaagatatttggaaaagttttattgaagaaatccatcaagaaatccgaaaaaaatctaaaactaaaaaaggcgaaagacctccccgatataactatgaagatttggaaagagcagtcaaaagccaagaagtcagagattttattgaacattctcctaaggaagtttgggattatctcaatctcaaagatgagataaaaaatttgcaaagcgccctgcataagaatcaagaacggatcaattatgccaaagccaatcaggataacccattttataaagaaagcttgccaatgtttgaaaacagcaaaaaaaacattatgcaaaatttgcaagacacacaaacagcactccaagcactccaaatcaaatccaatctgccccctaaacctaaagaagaacccaatccgaatgcaaaaatcaaagaagactatagtaacaaagaacccttaagcactcaagaagccaaagagaatctaaaacccaatcaggagcccctgaaagaattcggcacaaattaccctgaatactaccatgacgggaaaggagcgattactaaactcctccaaaccaaagaagggcaagtcatgggagcattctacaaagaagggttaggggatattgacctggtatggggagatgagaaaatgggactctctcatattctgagcaaacaccctgaagttgtggataaaatccctgaaatcataaatgatggaaaggtagataggggaacaaacagaatctttttaaatacagatgatagtagaatagctattgctttggattataaaggtaaagataaaaaatggatcatcacagcatataataaagattacctgtccccggcatatccgcaccaagaacagcttacccccgcaacttcagcacatcgtatgcgagataaccttcagcccaatcctagcacaaatgaagttaaaaatcaagcaaaacaaactcaaaaagaacccaatccgaatgcaaaaatcaaagaagactatagtaacaaagaacccttaagcattcaagaacccctgaaagaattcggcacaaattaccctgagtattaccatgacgggaaaggagcgattgagaaactcttgcagaccaaagaagggcaagtcatgggagcattctaccaccctgatataggggatataactcttgtttgggggaaagaaggcagtgctaaatccgatggattcggactcgcaaagattgtaaagtttcaccccgaagttgtggataaactcgatggaattatcaacaatggcagatttatacttgatgaaaaacaaagacctaatattgta

SEQ ID NO: 4488 - DNA, 23147 bp, synthetic construct
  source 1..23147: mol_type = other DNA
  misc_feature 1..23147: note = Synthetic
cgttgtgatcccctcacgtgcttttcttatcccatcatcaaagagtgtttgaaagcctttttcctttaatatttctttgagttttgatgtgggggttttgccgatgaggggtttgatagtatcagtgatttctaaaacctcaaaaatcgcctccctgccatcaaagccctgcatatggcatttttggcaacccactggggtgaatgcgttttgttcttgggcgattttttctgtttgcgagattgctttgggttttttgcaatgcgggcagagcttgcggaccaagcgttgggagatgatggtatggaggctagaattaagcaaataaggtgcgattcccatatccaaaagccgatcgatggtgctagcggtgtcgtttgtgtggatagtcgagaggacgagatgaccagttaacgagctttggatagctagctggagggtttcttggtcgcggatttctccgaccataataatatcggggtcttggcgcaagatcgcccgcaaggcttctgggaagccaaatccataatcaggattgatctggacttgcgtggcgagatcgatttggtattcgatagggtcttcgatggtgatgagctttttttcagaagattttagcgtttcaagcaaggcataaagcgtggtgcttttgccactccctgtgggtccggtgatgaggataatgccgtgcggggaatggatacttttttgaatcaatgcgtgatggtcggtgctgaggttgagaaaatccaaatcaatctggcgggtttgtttgtaaagcaggcgcattacgatggattcgccgtgctgggtaggcacgcacgagattctaaaatcataatccttgccctcaatattgaggctgtatcgcccatcttgaggcaggcgtttttcgctgatatcaagccgtgattggagtttgattttgttacaaaggagttcaaagatttcgcagcttagcttggcgatttctttgattttgccatctttgcgaatcttaaaacttgcgtgcgtgtgtttggattctaggtgcaaatcgctcgcattttgcaaaatagcagtttctaaaataaaatgatagaagctttcgatactgctttgggcgcttttttgctggttgatttgggtgctgaagcgatagatttgttcttggattttgatatgttctaaggcgatataaaagcttttggggtggatggggcaatgctgcacggcaaatgttgggtatttttgtttgatgatttcttggagtaagctttggttatgggtgttttgtttgtgagtgttttctttgtcttcacatacggctaaaatgatattttgttttgcaaaatcaatcaaaaatacgaatgtttttagcttgcacgctagctgatagggcaaaagggtgcaggatttttcatcaatagcccaatcttgaaaatccagcgtttctatctcgctcattgcattcatcagcgattcctaaaaaatgcttcgacttctcgctttaatgtttgggcttgttttgtttcgccgattttttcgaggctttcgatagtgattttgtagctttggatgccgtttggatcgatttgattagcgcggtaagcccaaatcatagcattttcatacgccccatttgcgtagtaatcttgtgcgattttaatagcgtgggcataggtgagattgccttgaatttcgcccatataaaatggtggtttttccagcacaggtttttggggggtttgaatgcgtggcgatggcagtgcgggcgacgtcataggtgcgggctgtgtttgcggttttgaaaggctcaaagatttttgagaatcctcgatggctttagcatagccgttttggtaggaattgatattggtcgcaatgataccaagcaaaaatgaagcccctataatcaaagtgcttggttgcaacaaaaaggaccaatctatttttatatttattttcattataggtttccctcggggatattgtatcccaaatcactcggaaagctcgtgggggtaatgatttttggcgtgatgacgatgatgatttcttgggtttgtttgagatcttttttgtaggaaaaaaagtatttgagtaggggaatatagcctagaatggggagctttttttctacgatggattgggttttgtggatgagcccgcctaagatgactttttgattgtcttggagtttgacaatagaggagagttggttggtcgatagattgggtggggatttgagtgcattgggctggttttctatagcggcgtctttggctttggtgatggaaggattgattttcaagatgacatagcccttgctgattgaaggcgttacatctaaaagcacgcctgaaaaaaccgtggggaattgttcgccagtgttttggatcacagcggtattcgtgctgttttgataaacgagattttgtgtatagcgcaatacattgcccacagagatgatggcaggctggttgtttagcgtgaggactttggggttagaaaccgagctgactttgccatagtgatggagaaactccaaaatcttccctaaggtgaggtcttgagaaaagatattaatgccatagtttgcgcctgaattttggaatgtaaccagattgttcccatccccactgcccttgatacctagattgtagatttctccccaatttaccccagccgtatcgatgttattgtgagaaatcgtgaggatattcacatcgatgaggacttgggcttgcattttttccttgaggatatcgatgtagtcttgcaccctctggatttgtgagggtgaggcggtgatggtaacaagtccagcccctttgttgatgacgatggtgctttttgtaccagattttggcggctggttgctatctccggggcgataggtgatcgctacgagttcgttttctagctcaccccaaaaattaagctcatcaatggagtagatttttgtcccgctacgcccgacattgagtttggtttgctcgctaccgattgccatcgccctttggtgggcgtcggtttggttttgtagggacattaaagatggggtttgatagagattattttgggtgtcttgggagaagatgacatcggtgttgcttgaacccacacgtgccgtggcgacataatcgatattgaacgttttggtgatgaggcgtttgattttgatatggcgttttttgatttcataactcagatctgccccatcggtaatgatttgcaagatggattcgagtttgtgggctttgaggtttaagacgggtttttgatcatcaaggatttctttggtcttgctatcggcataaatcaggctgaaatagcactcattagcgatttcttcgatgacttcacggatagatgaatcttctgctgtggcgatgtcaaatgttttgtcgttgcataaatcgttggcttgggcgcataaacacaggcaaaaaattgcaaggcatcgtttgatattgcctctgattttgcccatcattttgtctttttgtggtgagctcgggtggtgagcttgagagtttgttgggcatttttcaaaatcacagcattttgctcgatggcgatgatatggtattttgagactttttgtccgtgttgataccacttgccattgatcttggctttttggttgatgatgatttcaagcttgggggtttggagaatgctagaatcaaacatattaaaaattttttgtttagcgatatggataggggtgttcaaaaaggtctcggggatcttgttagaaatatcactagaaagctcgctggaaaataggctcgcccaaaaaagtggagctaaaaacaaagctttcataacgagtttcctagatttttgatatggatttgataagcgagggtgttttctttgaaaaataggtggaaatcttcgataaaaacaaaataattttgctccaaatagcgtagccattctgtaaaatcttggaatctaccctcaaggcaaaagagcaaatcatcgcctgtgttggtaatatctgaggtgatttgtaattgcaatttggtagcgagattttcaatcattttaagcagggcgtaattatttatcgcagcgtgcctgaatgcttgttgccaatgcacttcttgggcttgcttgtttatctcaatgtttttctcttgggggttttgagaaattttttgtagatgggagagatttttggcataagctaagcttaaaatcgcataagcttctttttgttgggtgagattatcagagatagggggcaaaagcaaaaaataaatcagggcaaatatcaagccccataatacccccaaaaggatataaagctcttttttatttttgttttggatatagctttcaaggcttttaaaaatactagaaaacattgcgaacccagatgatttcagctgaggatttttcttgatttttactgatggcttcaaagaagatttgttgttttgcatttgtccaatgcgggctattttgtagtgcgttgatggcattgatgatatttttttgcgataggctagagaggacaaaactcatcgcagcaacatcttgaaaaatatcactagtcaaacgaatatcttcgactacaatatccttgaacgcaagcattttggagaggtcagcaaggagattatagcgaggcaagtaggcaatttgggcttgatatagggcgtatagatggtcttgtagtgccgtatcttgggctttatttttctctggggcggtgctttgagaatacgtggcgatggtttggagggttgcaagattttctttggtgagtgcttcaaatcggtgtttaagataaatagaatacagaaattcagaagttgggtaaaggagcatcaacagcgtagcgcagagggttttgaccagcagatcgaatgtcttgctttgataaaatgaaatcggcgtgctggggaaaagcaggggcaaggcgttgttttgggatttggaaaaatacaagaatgccagcgtggcgatggggttttcactctcccctgtgagtgcgcttagtggcaagatgggcaaggatacatcagatgagattagctcaagggtctcgctatcttgggcataaatcacgctgggtgcgatcgaatagatagcgtggatataatcaagggctttattaatctcttggggattttgacaaaacgagtgataaacaagctcgttttgatgataaaacacaagatttttatcaaacaaaaatacactctgcgtgtgtttggtcaaatccaatcccatcggtaaaaaaatatcggggatgaggatttgatgggctgggaaatacgctaagtccaacgcatagatttgaaagactttttctgaagcgaagtcttggcacagatacacaaaacaataggaaatattgggctcaaaaatcccttcggcaacacatttggcataaagccaatctgaaagtgcggtgtttgataatggcaaggaagcattttcgattcggacttgggctttgatgagagatgtgcttttgatacaagcgatgatggtatctgttttggagggttttgtagcacgcaaatgggtatctacaaagccatctggagtggaaaaaacaacttttgtttttttgcccatcaagatcacccattactcctgcagtaaatttgaaattataaaattattacacatataaagttagatatgatttaaaatcatataaataatttcagttcttcagtgattttcgccattttatcattagcatcctctaaattttttcttgtttcttcaagcacttctttgggggcattttgaagaaatttttgattctgtagcattgaggtgagcttatggatttctttttctagcttttgtttttgcgattcgaggcgttttttgataggttctaaatcaatgccctccaaacttaggtgcgtttggcaatacaaactcacatcagaaacgcaatggctaggtttggaatctgtgatggctacttcttggactttggcaagcttagcaaggaagctttgcaggagtttttcatctttgattggtctattcggctcgatgaaagcttttgaaatctccttattcccgatgtctaaaatcatctttgagcgcctaatagagacaatagcgtctttgatgatgtcaaactcactttctagctccctatcttgcgtggtttcttctggatagggctggatcattatggatggggagttttctaggctcgaggcattgagcttgccccagaggtattcactcaaaaatggcatataggggtgcaggagtttgagcgcgtcttttagcacgctaccaagctcataaatcgcacccttatcggctttggcaaattcaataaaccagtcgcaaaattccccccacaaaaatcgatacaagatatttgccccatcattgaagcggtaggcttctagggcgtttctgacttcttttgtggcaagatttagtcgtgatttggcgtatttgcctagcggggttgtgaaatcgtgtatgctatgtttgtcttcaaagccctcttgcaatgccttttgcccgcctaattgctccaaatacatcatcaagaaattcgtagcattaaagagtttgttggcgaaattttttgagatttcaatcgccccagaagatagccgaatatcccgcccctgcgcacaaagcgtcgctagggtaaagcgcagggcatccgcgccgtatttttctatcatttccaaagggtcaatgacattgcctttggatttgctcatttttgccccattttcatctcggaccaaggcgtgcaaatagatgtctttaaagggcaattccccaagcaaggattccccgctcaaaagcatccgcgcgacccaaaaaaacaaaatatcaaatccggtgataagcgtggtattcggatagaattttttcaaatcatcgctttgccagattttatccttgccaaaatcgccattaccccatccgagcgtgctgaaagcccacagcccggagctaaaccaggtatcaaggacatcggggtcttgaatgagatttttgctcccacatttggggcattgtgatgggtgatcttcttggctggcaaatgtatgggaacattcgcaagtccaaacagggatctggtgtccccaccacagctggcgactgatacaccaatctttgagttcgcgcatccacgcattgtagttgtttttccactggggaggataaaaggaggcaagaccttgattgactttttcgatcgccccgtttgccacgctggctttgacaaaccattgttttgagatatagggttcgatgatattgccacagcggtagcatttgccgacttgattggtataatcttcgattttttcgataaagccctcatcttggagttttttgacaattttttctcgcgcttctaggcgttctagtccttgaaattcttgggcattttcattgagaatacccattttatcaaacacgacaatcgtgtctaattggtgtcttttgccgacttcatagtcattaacatcgtgagcgggggtgactttgacacagccggtcccaaatgagggatcgacataggtatcagcgatgatgggtatttctttgcctacaagcgggagcaagacgcttttgccgatagttttttggtagcgttcatcatcaggatggaccatcacggctgtatctccaaaataggtttctgggcgtgtggtagccacgatgaggcagtcgtgcgtgcctttgatggggtatttgaggtaatagagtttgccaagattttcttcgtattctacttcaatatctgagagtgcgccatcgtgggtgcaccaatttaccatatagttgtcttgaacgataagcccgtgttcataccagctcacaaaggcttttctcacggcatttttaagcccctcatccattgtaaatctcgcccgagaccacgcaggtgagatcccaagacgttccatttgtgagaaaatcaccccgccacttttttctttccattcccatactttttggataaaagcttccctgccaatagtttcttttttgattccttgtgcgaggagttgtttttcgacgatattttgcgtggcgatcccggcgtgatcaagtccgggctgatagagggtgatgtagccatccattcgcttgaaacgggtgaggatgtcttggagggtgagcgtgagggcgtgtccgatgtggaggacgccggtaacattgggcgggggcatcatcattgagaatgttttgttttctttttggatattttggttgccgctgatttcaaaataaccacgttctttgcagatttgataaatagtttcttcaatttctgtggggttgtaggatttcattgtggcatctaagcccatcgggtgtccttaaaagattggtataagttttgctttttgaattatacaaaaaagccaataattacaggagaaaatatgttatatgatttgaaagcgcctattttagggtttgaaaacatcacacaggttagatttgaaaagattgacacgctttttagcaagataagtagccctgatgggggctttgtgatgacattggtaaatccctatgctttgcgggaatattcttttagtgtgccaaaatatgtcgagttgcttttagagcttgataaggattctaatgttgaggtttattgtgtggtggtgctacaaaagaatctggaagattcgatggtgaattttttggccccattgatttttaacccgcaaaatcacaccgcagcccagatcgccctttcgatgatggattatcctgattttggtgtcaaagaaacactcaaatcttttgtcaagcaagaagtgggggcgtgatttttaggacaggtttttcaagggcgatgttatttataagacaaacgctattttaaggagtggcacggatgaatattctaatcacaggcgggggaacgggcgggcatttagcgatcgcccaagcgatgggtatagcactcaaaaacaagggtcatcaggttttttatatcggttcggtcagtgggcaggatagggattggtttgaaaattgtaatttgtttgagaaatgctattttttgaatacaaaaggcgtggtgaatcaaaaaggtttgggtattttgcactcgatttttttgcaatggactgcttggcgggaggctaggaagattcttagaacccatcaaatccaacgggtgcttagcgtggggggattttctgcggggccagcgagctttggggcgatttctttgggcgtgagcttttttatccacgaacaaaatgccatcaaaggcacgcttaataagcttttgagcccttttgctaaaaaagtttttgggagtttttcgcattcggggaaaaattatatccggacttcttatcctatccgaaatgatttttttctccattcacgcattaggcaaaaggtagaatatgtgatttttttggggggttcgcaaggggcaaaagcgatcaatgattttgcccttttgtgtgcgaaagggcttttggaaaaagggataaaaatcatccatcaatgtggcaaaaatgattttgagcgggtcaaaaatgcttatgaagcccttgggctaaaagactctatggagcaaagttctatcgagctttttgattttagatcggatttgattaatttggtctcaaaagctgatgtttgtgtcggtagggcgggcgctagcacagcttgggagctgtgtgcgaatggtcttgtggcactttttgtgccttacccctatgctgctagtgatcaccaatattataatgcgttggagttccaaaatgccggacttggggctatcgtgcgtcaaaatgagctggaggtaaagcatttgtttgattttatcgataaactcgagcaagtcggtgaagatggcgtgaaaaatatcacccaaatgagtttgggcttgcgagaaaaaatccaccccgatggggcagatgagatcgctaagcagattttggggtaaaaccccccttattttgcttttgggtatggcagaatctagccattctaaaaaaggttttatatgataaaaattttgggaatagatattggtatcacttctattggctgggctttggtcgaggcggatagggatttaagagaaaataacaagattattgattgcggggtgagattatttacccaagcagaaaaccccaaaaatggagaatctcttgcgctccctagaagagaagcgaggagtatgcgaaggatcatcaaaagaagaaaagcaaggatgtcccagatcaaaaaacttttatgcaagcattttggttttgcatttgaagtatttgtatctgatataccatccctgccaaagctttttgcaacccataaagcgtttctttctccttgggagcttagagccttagggcttgaaaggaagcttagtgatacggaatttgcacgggttcttttgcatattgccaaaagaaggggttataatgatttaagcaccatcgttgatgacaatcacgccagcgacaaggcaaaaaaagaaaaagtaattttaaattctatcaaagaaaataaaaagcaaatggaaaccaaagggtataaaaccattggcgagatgatgtttaaagaatattatggcaaagagatttcacagggttgttatgaaaatgtgcgcaacaaaggcaagcaagaagaatcgcatcaacagggggcaaaagaaaattataaacgctctatcggcaggagagagcttcaaaacgagatagaagaaatttttaaatcacaacgggaatttggcaatcaaaaagcacacaagggatttgaagatgattttaaaaagatcgctttttctcaaagagaattgaaaagttttgaaagcaaggtggggaattgtgagttttttcctgaggaaaagcgcgcttctaaatgttgttatagtgctgaagaatttatcaatctcaccaaaattatcaacaccctaaaaaatattgagcatattagtggagaaatctatccaaaagagattattaaagagattttagatagatccaaaaggcttaaaggtggtctgagttatcaaaaactccgagaaatcctcaaacttgatgaaaaaatagaatttaaagatgtaaaacttgattatattaacgataaaaagcctgaagataagatttttattaaattccaaaaatatcacgaactcaaagactatctacgtgattttgaagcggaatttacctcttggggtgcagatattttggataatatcgctcaaatcattacttttaacaaatcatcaaaaattctttctgagaaaatctccaaactccctatttcaaaaccactgcaagaaaaactcatcaataattctcttggatttagcacgaccattcgtttaagcctcaaggcacttgataggatattgccttatatgagagaggggaagcggtatgatgaagcgatattgctcgcagggcttaaaaaagatagcccaacaaataataaatgcagtcttctcccaccgctaagtgagacgggatttgcagacacgctcaatccggttgtcaatcgtgctatggctcaatatcgcaaggttatcaatgcaatcataaaaaaatacggcaaggtgcataaaatccatcttgaattcacacgtgatattggcaggaatttcaaagaaaggagcaggatttttaaagaacagcaagaaaattatcggcgcaatcaagacgctttagagatttgcaaaacatatggcttggatgaaactcaaaaaaatatcctcaaggttaaattatggatttgtcaagatgaattttgtgtctatagtggcaagaaaatcactaaagaatgccttagagacgccaatatgcttgaaatcgatcatatctacccgctttctaggagcttagatgattcacaaggcaataaggtattagtctttgctacccaaaatcaagccaaaggcgatagaaccccctatgagtggctaggcaacgatacagaaaaatgggatgaatttgaaaaaagaatccgaacgatgaaaaaactccctagaaatgtgaagaaaaaacttttcaataaaaattttgctggcaagcatattggtgatcgggcaagttttttggctagaaatctcaatgataccggctatatcaatcgcctcatcagccaatacacagcttcttatttggaatttttgcctttgagtgatattgaggatatgagcaaaaaagctggggcaaagggctcgaaaaaacatattttgacattgaatgggggtttgacaagtttattgcgacattattggggtttggaagccaaaaatagagacacccatctccatcacgcacaagatgctatcatcatcgcatttgcaaccgatgggaatatccaggcttttagcacatatctacaaacaagagagcaggcatatcttgagatgtcaaaaaaagcaaaaaatatccaagagcgtggtgataataaaaccaaaaaatcattgcaaaagcctttggaaaacttcgctacacaagtgggcgaaaaaatcaataatatttttgtttccaaagcgcctaggaggaacgttactggggcattgcacgaacagactatttatcctaaagagaagtatcttgatgtctatgggggtgcagaaggggttgaaaaagccctcaagcttgggaaaatacgccagatccatcaaggcattgtcgcaaatggggaaatggtgcgtgccgatatttttaaatccaaagataaaggaaaattttatgttgtgccaatttatacctatgatgttgccatcggcaggctacccaacaaagcaatcgtgcaaggcaaggacaaaaaaacgggtgtgattaaggattggatcgaaatggatacaaattatacattttgttttagtttgtttaaggatgatttggtgcaaatccaaacaaataaaatgtccaaaagtctttatgcttattatgcggcgacaaatgcatcgacgtctgggatgacctttcggcatcatagcaataagattttagaagaaaatgaaaaagaatttttcaaagaaaaaccaaattcagggtttttggcagatggttgtggcattcaaaatttcaaaatctttaaaaaatgtattatatccccgctaggagagatttgtgaggcaagatgggagcctagaaaagatgtgagattgaaaaccaccaaaaagaagccctaaatggcagggtttgatgaggcgtatcggtgtatttttattggcaatcctgctaaattgagtttaaaaaataatcttttttgtatcacgcaagaaaataaagatattacttttcctctgagggatattctccttgtcatctctgaaagtaagcacgttagtatcaccacaagcttgctcagcaagctcgccgataataaaattgctttttttacttgcgatgattcccatacccctaatggtatttttactccttatttggggtattacaagacatcagaaatgcttcaaaaccaaatcgcattctccaaacaaaataaagcgattttatggcaacaaatcattaaacaaaagctttataatcaggcaatgttggctacagcgttttgcccgaagcgtgggcaaaaaattttagaattatccaaagctgtggtgctaaatgatgctaaaaattttgaatctcaaggggcgattctttattttcaagccctttttggcaataaatttagtagaaaggattgcaaccctatcaatgcagcactcaattatgcttatgctattatccggggttgtgtagctagaagtctggtgagtagtggcttgttgcctgcatttggtattttccataaaaaccaattcaatgcttttaacttggctgatgatatgctagagccttatcgggtatttgctgattctttggtgtgtttgatggttgaaaaacaagagcttatagaggggtttcaaaggaaacaccggcagaatttagtcggtgttttgaacgctaagattgcttgtaaggataggcattatcctatgtatcgtgcgattacacgcagtgtgcaatctttggcgaatgtgcttaggggatttgagaaccagttggtattgccggtatttataaaggaaaattctgatggaagagaagtttatgagaattttagtgatgtttgatatgcctacccgaaccaaagaggataggaaatatgctgcaaaatttaggaaagaactcattaaagatgggtttttgatgttgcaattttcagtttatatgcgtctatgcaaaggggtagcaagtgcgcattcgcatttggatagattggatttgatattgcctccaaaagggcatatcagggggttagtattgacagaaaaacaatttgatcagatgagattgttattggggcaaaaaagtgaattagaagtgatgaatcaaccaagacagcttgtattgttttagggtttttaggggattgtaaccccgcacggaaccctataaccgtttattttaggcagttgctaaattcttctggtgtattgtagcatattctttatggttttaacccatattattccccatatttggggattttatcggggtgtattttaccatagaagaatttagcaaccgcctaaaacttatatcacccatacaaaaagggagtttgtattttaccatagaagaatttagcaaccgcctaaaactctgctggataatttggtcgctgggtatctattttaccatagaagaatttagcaaccgcctaaaacttaattcaagaatcttgctattagcgtttgattttaccatagaagaatttagcaaccgcctaaaactcataagattaggattgtttgttttgacatattttaccatagaagaatttagcaaccgcctaaaacttggggtatttgctaattttactaaaatcaattttaccatagaagaatttagcaaccgcctaaaacatcttgaggctcaaagccccacggaattgaattttaccatagaagaatttagcaaccgcctaaaacttattatcgattgccattgttttgttctccattttaccatagaagaatttagcaaccgcctaaaactaatcgtttttttatcgccatagcggagtgattttaccatagaagaatttagcaaccgcctaaaactcgaactctttagattggataacaagatttattttaccatagaagaatttagcaactgcctaaaacatgatttgtatctcaaactaaatgaggaaaattttaccatagaagaatttagcaaccgcctaaaaccaccattgcatcaaaggtctggcttgttcgattttaccatagaagaatctatttgctacaaaatgagttttagcaaaacacacataaaggtgatatactcaaagtattttgaaaaatgattttaaaggagcttcaatgcaagcaattgattgggtcggtattgttttatttgctggggtgatggtgtttttggtgtatagacttttgggtatgaagaaagattcaaaaggctgtggctgtgggggtggtgggaaatgctccaaacccaaggtttatcacacagaagataaaaagtcttgaggggctgctagattggtaagcccaaatattaaaatggctttgaaataatgccaacttggcgacgcaagccttgagggcaaatacagattccacgcttatggagtttttacgagatgttatcaggcatttttatctaggtagccccatcgcgagggtttgagcgttcatcaggcattctgtgggtgtttattgggttttatccccgtatccctgtgagatatctatccaaaaaaaatctcaagcgggtaatttttgtctaattttttgagatcaagataggcattgacgattaaaaactcgttttttgaatgcctgcttaagcgctcattgaccaaatcaatcatttcaagatccaaaagcacataaagatagcttttttcggcattttcgtttttgtctgcgaggtattcaaagagcttgagccagacatctggagaaagaaacggcttggattctctagcgagcttgaggtagtcattttgacaatagcctgcctttgtgcaagcttgggcgatactctcacgatcaagcgtggtgcggttttgtgagtaggcgataaaaagctcttttgacatttctttatccaaaaatgcttgggataattctaaagctttttggatctccttatcgctacctttttgcatcacgtggatgaaagcatatttttttagatcgatacccaagtcgctagctaggacttcaagggcaaatttgagatctttttggatcttgttgcacgtgtttttgataaaaaacgcattgtcacagcttgggtcgtattttttgaggtcttgggtattgcccagatcgatttgttcgtagatgtcaaaaagcttgtctatcttgagataggagcttttaggcgtgttgcagtcgggtttgaaatcaaatcgtgcgagtatctttgaaagcaggttaaaatgttggtttttatagatttgttttgtgaaagtttttttgttggtctgctcaatgatttgatgggtgattttttcaaaatccttgttgtcattatatttgactaaaagcccgcgtatccattcgcccagaaaaaacaccaatgacaaaatgaaaaaaaccaatatcaccatcgcaatccaaatggcaaccgggaggttgaaagactgggtttgatggggggtggagagggtgtaggtgctcgaatctagcgtatagacatagatacccactgccacgataaacaaaatggcaaagataatataatatttgaatttcattttcgattcctatttttggatttttcgtgcaactctctgcatttgatacaatatttggcgtggggtttgattttgagcctctggatgtcgatttcatcatcgcacatttcacaaatcccatatgttttgtttttgattttttgtaatgaatgaataatatcttttaattctaacccgtgtttctgtgccatcaaagattcaagctcgccttgaaggtttgctgaaacaatatcgctttgatctttgagattagtagcagtaagctccatcagattggtattggtgagatggatgttggaagtgatttcttcaagccgcttttggagcatattttcaaaaaatttaatgtttttattatccaacgcattctccttatttgtggtatgggtggtggtttatgatgctaaaagcgcgataaatctgttcgcacaaaatgagtttgacaattttgtggctgaaagtcaggggactgaggcttatagggaggcattttttcagaaatatttcttcaaacccatacgccccgccgatgaaaaaattgattttattttctttggcaaaaagcttgctgaatgcgaggctatcaagtagcttgcctgttgggtgcaaggcgatgttttttccatcagataaaaatggctctaacgctttggaataggcttgttgggcggttttttgtgagactttttgggcattattgatttgggtattcatcacatcatagatttggagggtgagcccaaattgcttgcattgcttttggtaatgcttcacaaaaacatcagaatcaagactgggtttagtgatggaatataggttgcatttcatagttaggattcagcatatgtatcaaatcgcccaacgtttttttgagttctttacgatggatgaccatatcaatgagcccgtgttcgagcagaaattcagcggtttggaagccatcaggcaagtctgccccgatggtttgcttgatgaccctagcccctgcaaagccaatcatcgccccgggttctgcgatgataagatcccctagaaatgcaaacgaggcactcacgccaccaaaagtgggatctgtaagcaaagaaataaagggcagtttggcttcagagagcttgccgagggcagcactagtttttgccatctgcatcaaagaatacgtggattcttgcattctcgctcccccgcttgtggagacgataagcagggcttgtctttttgcaatggcgcgattgatggagcggacgattttctcaccctcgacagatccgagactgccccccataaaggcaaagtcaaaaacagcaatctgcaaggggatatggttgatactcgcttcaccgcagattaccgagctaggacgccctgttttggcttcgtattttttgattctttgtttgtagctttctttatctacgaaattcaaaggatcgatggggcgtaattctttatcgtattcgatgaagctgtctgtatcgcacaaaagcgcgatccgatcattagctgagattctgaaatggtaatggcattttgggcagacatttgattgggaaaaaacttctttataatacatcagagccgagcatttagggcattttatccaatggctagaagtatctttttgcgccgatttgctttcatctctcttgagattcttcaaaaaatccgcaaaacccattttctagtcctttttgataatttttgaaatcatatcaaagatttgcttatttctacttacgagcaaaaagtcttcgcaatgatttatccatagatggcgagacaaaaataatcccgcttgcgcgtcgtattttctaatcttgccaccaaaaagcataaaattgctttcttgagcataggcaagcgagagcgcactcgccccaagggagcgaaattttatgctgtgttcaaaaagttttttggcaatatcggggttagaataggctttttcaaagataccgcattttgaaaggctctgttttggggtgatgggcgcagtagtccttgcggggatttttgtgaaaaacacgccatcgccggtgtcaaaataagcgctttgggagcagaaatttataataatggcttcttttgtctctccagagctagcacacaaagccactgaagcaccataataagggatatttgaaatgtaattatcgctcccatctaatgggtctaagataataacatcatctcccttgcctacgagatagcctgattcttcagaatcaatattggcgatagggaggagatatttggcaaagatttcttcactaagcaagtctgctccaaggctaatatccccgcccgcaccgatttgatgggcttgcatatgttcgggtttgcgttgtgataaaatttcgatgatatgttggcttgcctcaatgactgccttgataaaatcactcaaaaaatatccttggagatggcgtttcttttgcaatgaggttggcattatagtgattttattttaagcaattctttaatttaggaaaacacgtgcagggctatattttgaataccattccggtaaaaaatgaggatttgatcgcccaaatccttacgccttttgctatcaagaggctttatcgattttatggggcgaggcatagtatcgtgcatttgggcaaaaagattgattttgaagaagagggcaatggattgtttttacccaaacttaggaatgtaatacatctagggtttgcgtgggaaaataatctcgatcgctcgtatgtttggcaacgatttattaggcttttgagtaagcatttatttgatatttatgagcttgatagcttttattttgatatgcttgaagatggtgcaaaaaaaatgtttaagcaaaatcccttgcgtgttgtccttgagatgtatgcggggttgctcgattttgagggcaggggcgatagggggcaaaaatgctttgtttgtggggaaaaaatcagcgaggagattagcctggctcgggcatttttgttcgctcacccaagttgcattggtggggcgagattcccccaagatcagatcgtggaatttttggcttccaaaagcaccttgcacctagatgatgaggtggtagagaggctgtgggaaatccttatgaagggattgtgatatctgtgtaaggattttgcgaatagggatggacgattttagggtctgcgagcaagcaaacatttcggggttctttgtcttcataatcgattttactgagcaaatccctagcgatattaagcctagcggcttttttgtcattggaatcaacgataatccagggggcatagggcgtgtgcgttcttgaaaacattttttcaaacgcttcggtgtattcttcccataaactcaaggattttgaatcaatggggcttagtttccacatcttgagcggatcggttttacggcttttgatacggcgtttttgttcggcttgattgacattgagaaaatacttgaaaaccattgtgccactagaaataagcatttgttcgaggttggagacttggtagataaattgtttgtattcttcttgcgtgcaaaatcccattactttttcgacaccggcgcggttataccagctcctgtcaaaaaatacaatttccccaccagatgggagcgtgctgatatagcgggtaaaataccattgcgatttttcgatttctgtgggtttttgaagagctacgatacggcatcctctgggattgagatgttcgctcaaggctttgatcgtcccgcctttgcccgcaccatctctgccctccataatgatgacaattttttggttattttttttgacccaattttgcagtttgacaagttcgatttggagtttgatgatttcttggttgtaaaaccattctttgagttttccgttttttctgtagatgggtttttcgctgggtgcagactcggggcgggttgtgattactggtccttgctttgacattttttctcctttttatcaccttgttaatggtatataattgattatatcaaaaagagggcgtgttatgaaaaagtttttgactttcttagggattgataatgaggccagtctggtgttgtgtcagaattatgttgcgccatttgatgcgaaaatgcggattgaaaatcagaggattttgcttgagggaaaggatgcgcaaaaggtttttgaggttatccaatctatttttggcgatagggtcattgaaagcgaggatttagcaacgactatcgtagagattttgaaaaaaaaccatcaaaaaatcaccacagctgaaagttgcaccggcgggcttttggcgtatcaattcacttctgtggcgagggcttcggctgtctatgatggcgggattgtgagctatagcaatgagataaaacacaaatgtttgggggtcaaaaccgattggcttgaaacctatggggcagtcagtgagcctgtggtgcgtgatatgctaaggggggcattgcagatgtttggggcagattttgccctggcaactagtggcgtggcaggtcctagtggggggagtgtggaaaaacctgtggggacgatttatattggggtgcaaaaagcagggaatctcgctgtagttgagcggtatttgttccaaggggagcgccaagaaattcaaaaacaaagttgcgaatgtgctttggaaatgttgctgaaaaatctctaaagtttctctgaaaattttgggcgtttctttcaaaacgcttgacaaacccatataaaaaacatataatttcgctctttttgtttctcaaacgaaaataagacaagcaactaagccagatttgattttaaatttaatgcttttatgacccgttagctcagttggtagagcaattcccttttaaggaatgggccgttggttcgaatccaacacgggtcaccataggtttaaaatatagaagtggccccttcatctagcggttaggataccaccctttcacggtggctacaggggttcgagtcccctaggggtcaccacttcttatccttgatttccccgacattgttactttagaatgtccgaattggtcgcttagctcagttggtagagcgctacccttacaaggtagatgtcacaagttcgagccttgtagcgaccaccattaggatttggagcggtagttcagctggttagaatacctgcctgtcacgcagggggtcgcgggttcgagccccgtccgctccgccacttcattatcttttattaggcaacatcttacgttttttaattttctttttatggttttgaccccttcatctagtggccaaggataccaccctttctaggtgggaacgggagttcaaatcttccaggggtcgccacattattttgggcattccaaaaacaaatcaaaatggctctcattccgcaattcccttttggtatcgagatcaatgataacttctcgcttttgatagagtgtgcctgaaagctgttttttgatagcgatcttacaacccttgatgtcaaatacctgcgggagttcatcaataagaatctggtattttgtcggtgagatctttttgagcgggtatttttgatagggggcgatggcagaataccgatcgatggatttttgggcgtatttgtattcataaatcttgccatcaacgttcgtaatctgggtaaaagagtccttgagcgcgaatgtttgcacctgctgtttggtctcatacaccgcccctgccataaattgttccaatgcttttgaatggatatttaagaaaagcttttcttcttctctttctaatgccatctcatcttttttgggttcataaaattcttcttgcgtgaatgtcatattttttggtttggttttttctttgaggaaagtttgtgattctttagggtctgataatgccctatttgggttgtgtggttttttggattctgtcaatagagaggatggggcttcactagatggggttatttccacaggggcgtctttgataggaaaatcaatcgtttcattttggatggcaggttgcgaggtcgggaggtttgggaattggctggctggatttggcgtgttttgaacttcttctccatatataaggtttgtaaggataggaatgaaaataaataccaataaaacctttttcattaaaaaactcctctaattttcaaagttttggttatgattgcattactcaatcatcttagaacaaatcctaaagattataagaaaaatatcattaaagagaagcaaattgatgaaaaaaattgcgattttgggcaaacccaacgttggaaaaagttctttatttaatcgcttagctaaagagcggattgccatcacatctgaaatctctggaacaacacgagatgtgaatcaaaaagccatctttttggagggcaacgaggtccaaatctgtgataccggtgggcttgatagta

SEQ ID NO: 4489 - DNA, 15126 bp, synthetic construct
  misc_feature 1..15126: note = Synthetic
  source 1..15126: mol_type = other DNA
aatttttcttctttttgagtcttttcatctttaaaatgaatggttacattttgatttaaatatgccatttctttgaatcgtttgatcaaaatatcttgatcaaactccaaaatttccatgatctcaccgtcaggaaaaaattctatagtggttccgtgttctttggttgtaccgataacttctaaaggagtttgaggaatgcctttagcaaattcttgacgataaatatttccattttttttgatagtcattatcaaatgtcgtgaaagagcattaacaacgctcacacctacaccgtgtaatcctcctgagaccttataagtgtctttatcaaactttcccccagcatgtaaaactgtgagtacaactgtggcagcaggaagattttcagtaggatgcatatccacagggatacccctaccattatcctcaataatagcactgccttcttgtgtgagtgttattttaatattatcacaatatcctgccattgcctcatctatagagttatcaacgacttcataaatcatatgatgcagaccattgatatttgtatccccaatatacatacctggtctttttctaactgcttcaagtcctttgaggacttttatattgcttgcaccatattcctttttattttcttccatttttgctccgtgatattaaaatatgattggcatcacaatcgttgaaaagtttttatcttttaaaacaaaaggattattggaatcatttaaacataaaacgaattcagattcttctgtttgagagaaaaaatcaagtatatattttgaatttgccccaatacttatttcagcatctattttcgtttccagttctatttgtgtgtttgcagttctagaactttcattactgatagcttcaaataatatttcattaggtctgataatgatttttatgttattacaaagattgactttcttgattgacttttctatgatttctttagggagtttgatttcatttttgaaatttttagggataatcttttcataatcaggatatttaccattgatgagtttagtataaaacatatattgaggtgtttttaagatgatttgagactcactataatagatttcaaaatcatcatagaaaagctttaaaatttctgtggttgcttttttgggaatgataatagaaagattatctacagattgagtttcatatttcactactgcaagtcttctagtatctgttgctacgaaattataagaataatctttaatatctaaaaaggctccattgagctccattttttgattatttgtttcaatagcaggattgatttttttaatggaagtgataaattttgaagtatcgatattaagttttttatagttaggaagttctggaaatattggaaattcagcagcattaaacattgactctttgtatttagtttttccttgcttaacatagaaaaagtcattgtctgtctctaatataatttctccatcttcaagctttttaacaatatctaaaatcattctaccatttacagttgcatttccatcagattcttttttgatattatctattttagcttctatgccaatttcataatctgttgctcttaatagaagttttgaatcaatgcattcaaaataaatatgagatgtgatttgtgaagaatcctttttatctaaaaatgcttgaaaatttgtcaaggttatttctaaaatacttttgcttacgattaatttcattagatctccttaaatatttataaattttaatagcattagtagatttcagtgaataagtgaaatctatcttaaaatgaccattttaaggctatttataatgtgaaacattattatcattgttttcacaacttttcacatcttccttgcgttattgtatctaaaattttgctttttacatcgttttatcgtcttgctcactttggattttctttttcatttcatctatcatcatttttgtgttgatattttcagtaatttcggttgtaatcatcttcatggccttgcttacagaactgtgatctttcatatttaggaattgtgcaagatgaggcattgagtttggagtaagagttcttcctaaataaataactatccttctagcattagcaatggttttatttcttgattttgatttgatttcagaaggttttatattgagttcttttgaaacagttttgataatattttctaaagtgatgttttcaaggttttctttttgagtatctttgatagcgttttttgccattgtcaaagagatattttgtccaatgatagaagcttgagcattcagctttagaataattccttcaatctgacgaacattattgatatttgaagccaaataattgataatttctttatcaatttctatttgattgagacgacatttttgaatgatgatagcaattttagtttcaagacctggaggttgtatatctgctatcattccccattcaaatctggattttaatctctcttctagacctagtatttgtttaggggttttatcactagtcattactatttgactttttttactgtgaagttcattgaaagtatgaaaaaattcttcttgtattttttcttttccaccaaaaaactgcacatcatcaatgagaagataatcacaattacgatatttatctcggaatctatccatcgtgttattttgaatacgtgttaaaaaatcattcaaaaattgctctgctgtgacataaataacggttttatttttttcagagacactatttcctatggcatttaaaatatgtgtttttcctaaacccgtgcccccatatatccatacggggttataagcttcagcttttttttcagatattttttttgctatttcatatgcgaatttatttgattctcctactataaaggaatcaaaagtataagagggattcaaaatattttttacttggggtttgtttccaggtgtttttaaacttttcacatctttcttttgtgattccacaattattcttatttctggcttaatttttcggtaaatttcaaaaagatgtgcaatttgttcgctgtattttgttttgatccaatttgcaatgtatatatttggaactataaacacgactaagtccgattttgaggcattttcatcgtatttcatttttgatatataggtcgaatattcaacctctgtaatctcttttttaagctcatttaatatattattttctatcattgtttgttccatttaacatcatttcacaatgtgaaaagtttagtgaataatagtaaaaaaaaggtataaagtagattaaaaaagagaatttatgaatattttaggaattgatccaggtagtaggaattgtgggtatgcgattatccatttatctaatggcaaactatctttagctgaggcaggtattattaaaataaaagagcgaatattgcaagatcaaatattggagtttgtcgaagggattgatttggttttaaaatctcatgaaattaatgaggttgctattgaagatatgttttatgcctataatccaaaatctgttattaaattggctcaatttcgaggagctttgagcctaaaaatacttcaagaattaggaaatttttctgagtacactccattacaggtaaaaaaagctctcacaggaaatggaaaagcggataaaaatcaagtggcatttatggtgaaaaaaattttgggaatcaaaggagaaataaaacctcttgatataacagatgctattgctattgctatcacgcactctcaaagaatcaagaatttaaaaaaatcataaccttttttcccactcaaaagcacttttgatgattacagataaattattatttttaggttcccattctgtaagggattttattttgtcattgttagctataagttcagcaggatctccaggtcttctaggtgagatctcaaccttaaagtctgtttgcgatatttttttagtcatttcaatcacttcttttacactatatccctcagaatatccaacattaaaaacttctgatttttgattttttttcagataattgtaagcttgtaaatgtgcatttgctaaatcggtgatatgtatataatcacgaatacaagtaccatctttagtgggataatcatctccaaaaatagaaattttttctctttttcctaaagcacattcacaagcaattttgattaaatgagtggcatttttatttctttgtccaagctcgggtaaagaagaatcactttgtgtgtttgcacctgctacattgaagtatctcagtgcgatgtagttaaaatcataggctttacttgaatcttctagtatcttttcactcatcattttagatgccccataaggattaataggatctaaagaggtggattcatttacaggaataagtctcatgccaggctctccataaactgctgctgtggaagagaatataaaatttttgattttgtatttgatgcacatagaaatcaaatgaattgtattagcagtattgttgctgtaatacaggagtggatttgtgatagattcagatacaatcaatgaagcaccaaagtgcaaaacacaatcaaatgtgttcttgctaaatatggtttctaaagttgatatatcccccaaatttgcatttattagattgactctatttttgaattgattttgaagatatttaaaattttcaataaaaccagtgcttagattatctaagatactgatttcacaagatgtgttttttaaaaattctaatgctgtatttgagcctatataaccacttccacctgtgaataaaagatgcatttgagtactccttatgtttttgctagattgattatatcaaactatatttattctcaaaaaagatgaatgatgaaaataaaatatatttttgactcgctttaatattacttggttataatttttggaaaattttaataaggaaataattatggaagatgtatttgataccaagagtttgacaatgtctgttcttgtgacccctagtatgtcaaattttagcggtgtgatgcacggaggtgagttgttaaaaatgcttgatggagttgcttatgcttgtgctactagatattgtggtgtaggtgtggttactttgagtgtggatagcgtgattttcaaacatcctattcctattggtgctttgattacatttttggcaagcgttaattatacaggcagaacaagctgtgaagtaggaatcaaagttatcagtgaagatataaaaaataaatttgttactcattgtaacagttgttatttcacaatggtggctgtagttgatggaaaaacagttcctgttccaccacttcaaccagtcactccagcagaaaaacgaagatatgagaaagccatagaaagaagaaatgctagacttgggaagtgatgatatggcttattctaaactgtatagattgataaaatctttaacttcttgggcaatactatgattgccataaaattttatattcaaaatctcttcaaggctttgttcagataattcaataattcctcttatttgtacatttttattcttgaaagatattttgatgtaatcaatgagcgtttttatgataatgcctgcatcttttttttgtgaaacttttagattctccagcacataactttctttgatgaaacaatcaaaggtataaagataatatttaatcgttgaaatacttttatttttaataaattttttatctatgcccactccaaaaagcatatctttgttttgtgtgatgaggatgctttgtatgtattcttgcagaattgacacgccatttttttgatgtttgatcttgtcctctaaagtcaagataaaatttaaaatatgatctaaatcgctatcaaattttttcacttctaaatgagtcttttctagtaagtttttcatatttgcaagctcagaagtttttagatttatttggctttcaagttgctgtatgtaagatttttgtttatcgaattttttttctagtgcttcaagttggtttttattcatagagaaatccattttttattgccaaattcattgcattgaggtagctttgagtatttggttcagatttgtaggctatatcataagccactccgtgatcaacggatactctaaatatcggaatatttaaggttatatttacactctcataaaaatagagtgcttttagtggtgctaaacccacatcatgatacatgcttacaaaaaaactatatttttttctgtttgatgggctaaaagcagtatcaggaggaatcggacctataaaaatttccttaccaatgattttattaacatcttcaatggcttgatagattttttcatcttcatctcctatgattccaccatctccacaatgaggatttattcccaagacaagggcattttttaattttaaattttgatataaagtgagcaaaaagcttattagtttttgagtattgatgtgagaactcactgattttaaaggaatatgatcagtaaaaagtgcaacaaacattttttcacaacccagcatcattatggtgtcttttttataacgtttggcaagaacttcagtgtgacctatctcagatacattcgctaagttccaggcttttttgttgataggtagggtgcaaataccatgaacttcatttttatcggcaagttcacaagcttttataaagctttcatagctgtatctgccactttgggaattaatctgagcgggtattatttcaggaatattttgtttggggggtaaaaattccatatcttttggcattttaactttgagaatatcacaagctttttcaaagatttcttgatgagcacaataaaggggatgacagatttttttaatatttgaatgctcaattagggcgatatgaatccctatgccattgatgtctccaatagaaacagcgattttcttcacttgataagctttatcatatcagaaatagccactcctaatccgacaaaaacagctcttgcgatgatgctttgcccgatattgagttcgccaataggtttgatttttgcaatttcactgacattattgtagttcagtccatgcccagcaaaaacacccaaagacatctcctttgcaagcgttgcacaatcaaaaatttctttgatagattcttcaagcttaaattttagagtttttctatctaaatcatacgattgtattgtatttttagttctagaaagatttgaatgtagcattaaatctagatttgcatattttccagtatggaattccaccccatcaacccccaaatcttttgatatgagtgtggcttccttggtaggctcaataaacacagcaacttcaatgtcatttttttgaaattctttgatgatattttttaatcccaaatgccctacatctaatccgccttctgtagtgatttcctctcttttttctggaactagggtgattttatgaggcttttgttcgcacaagaattcgattattttttcatcacaagcacactctatattcacgggtaaaaagcttgattgaatgatttttgtgacatcatcctcattaatatgtcgacggtcttctcttaagtggatagtgatttggttagcacctgaatttttagcaataaaaatggcctctaaagggtcaggatcattgatttttctagcttccctgagtacggcgatgtgatcaatatttaatcctaatttcattgagtgcctccatactgaaaaaaaaatttgaaattttgcctaaacatattataatagagaattaacgattttaggagactttatgccaacaaaacgactcaatggttctgaaatgcttatagaggccttaaggatggagggtgtaaaagttatttttggctatccaggtggagcagttttgaatatttatgatgaaatatacaaacaaaatcattttaaacatattctcactcgtcatgaacaaggtgctattcacgccgctgatggttatgccagagctagtggagaagtaggtgtggctatcattacttcaggaccaggctttacaaatgctgtaacggggattgcaacagcttatacagactcgattcctttggtggttatcagtggtcaggttccaatctctcaaattgggactgatgcgtttcaagagattgatgctgtaggtatctcacgcccttgcacaaaacataattttttagtcaaaaatatcgctgaattgcctaaaattttaaaagaagcattttatattgctagaagcggaagacctggacctattttggtggatctaccaaaagatatcagtgcgacttatggagattttgattatccatctgaggtttctcttaggacttataagcctactatgaaaggaaattcaagacagattaaaaaagtcatagaaggacttaaaaatgcaaaaaaacctttattttatatcggtggaggagcagtaatttcttctagtgcagaagtgattagaaaactcatagaaaaaactcaaattccttttttagaaaccttgatggcaagagggattgtacctgatgatcatcccctttttcttggaatggtaggaatgcatgggagttatgctgcaaatatggcgatgtgtgagtgcgattttcttatttgcgttggagcaagatttgatgatcgtgtgactgggaaagtaagtgaatttgccaaacatgccaaaattgttcatattgatattgatccaagttcaattgggaagattattgatgtcaattttcctgtagttggagacataaagagtgtgtgtgaggatattttagaattactccaaaatgatgattaccaaccaggcatgataaaagaatggtcagaacacttgaataaatacaaaaaactccatccgctcaaatataaagatagcgatgaggttcttaaacctcaatgggtgattgaaaaaattggaaaaatacttggagatagagcaattatcgtcacagatgtggggcaacatcaaatgtgggcagcacaatactatccatttagtttttctaggcagtttgtcacaagtggaggacttggaacgatggggtttggattacccgctagtatgggagcgaaacttgccttagcagataaagtagttgtgaatataactggagatgggtcgatattgatgaatatacaggagttaatgacctgcgtagaagaaaaaatttctgtgattaatgttattttgaataacaactatttgggaatggttaggcaatggcagagctttttttatgaaagtcgattttcacatacagatttatctttgcaaccagattttatcaaactcatagaagcctttggtggcaaaggttatcgtgttaaaaccaaagatgagtttgaaaaagcatttcaagaagcaatggattcaaatatggtttgtatgcttgatgtggttattgatagaatggagcatgttttgccaatggttccaggtggggcagcattgaataaaatgatattggaataaggatagggctatggaaaaacgaagaattatctctgtgaatgttatcaatgagcacggcgttctatccagaatatcaggtctttttgcaggaagaggttataatatcgagtctttgaccgtcgctccgattccagataccgatctttctagagtgacaattgtcactgatggtgatgaaagggtattagagcaaatagttaaacagttacacaaactgattccagttttgagtgtggtagaaaatgatgattttttggaaagggagatggcacttgtgaagattcctattgaagaaaatcttgcagatatagaggttctttcaagggcatacaatggccatattgtgaatgcaaatgagaaatatgtgattgttgctgttactgacaagccttatcgtatttctagctttattaaagctatcaaaaaatttaatcccaaggaaattgcaagaagtggcgttgtggctttggagagatattgattacgaaggtatatgatgaatagtatgataagagtcttaggtttagatattgggatttcatcaattgggtggagtttggttgaagtggatccaaaggttcagggggtgggcgaaatcattgcttgtggtgttagactttttgctcaagcagaaaatccaaaagatggaaagtctttagccttgcctagaagagaagcaagaggtgcaagaagggcaaacaaaagaaaaagagctaggatcaaacagatcaaaatactactttcaaaacactttaatgttgatttgaaagacattgtttcagagggcgaatttctcccaaatatttttacaactagcaaagaatttatttctccttgggaattaagatctcaaggccttgatagaaaactaaatgatgaagagtttattagggtacttttgcacattgcaaaaagacgaggctataataattctaatcaaaatcaaaaaaatgagaaggatggaaaggttattttagagtctatcaagtccaatacagaagagatgcacagacttggttataggactattggcgaaatgatgtgtaaagaacatttttctaaggaaatatcaagaggaatatttgaaaatgttagaaataaggccaaaaaagagtccaaagattcagaaggttctaaaccttcttatgttcgttgtgtgggcaggaaagatttacaagaagagataaaaatcttgtttgattctcaaagaaaatttggcaataagggtgcaacagatgagctagaagaatcatataataaaatagctttttatcaacgtgatttaaagagttttgaatcaatggttggaaaatgtgagttttatcccgaagaaaaaagagcttcaaaatgctgttatagtgccgaagaatttatcaatcttacaaagattattaatactttggcacatattacagaaaagacaaaagaagttttttccaaggaaatcattgaactcatacttgctagagcaaaaagcgtaaaaaaaggactcagctacaaagaactgcgaaagattttaaaacttgaagatcatccttcaataatattcagaggcattgattatactaaaaaagatatcgaaaagaacactttcatagagtttccaaagtttcatgaacttagaggatatttgagtgattttgaggaagaatttgactctttagatatcaaaacgcttgatgaaattgcaaacatcatcgcatttaataaatctcaaaagatactaaaggagaaattctctaagcttccaatttcaaaatctatgcaggaaaggctaatccttaatcaactgggctttgataagacgatttctttgagtttgaaggtgctttataaattaattcctttgatgaaagaaggaaagcgatattatgaagccacaaaagaagcggggcttttggagttttcatcaaaggatgttaaaaaaggatttttgcccccgcttattgatactgattttaaggatacgttgaatcctgtcgtgaatcgagcagtttcccaatatagaaaggttgtgaatgctgttataaaaaaatatggaagattgcataaaattcacatcgaatttgcacgcgatataagtaaaaatttcaacgaacgtaaaaaaatagaaatagagcaaaataaaaatagagatctcaataatgaggcaaaaagattatgtgaaagtatcggattagatcccaatggaaggaatattctgaaattaaaactatggaaacaacaagatgagttctgtatttatagtggggataaaataacaatccaagatctaaaagaagaaaataagcttcagattgatcatatctacccactttcaagaagcttggatgattctcaaaacaataaagtattggtattcactacacaaaatcagctaaaagggaataaaactccctatgaatggataggttcaaataaggaaaaatgggaagatttacgaaatagaatcaatgcgatgaaaagattgcctagaaatgttggaaagaaaattatgaatacagcttttgtggataaaagcataggttcaagaagtgagtttttgtctcgtaatctagttgatactggctatatcaatagactcataggtcaatacacatcgaaatatttagaatttttacctttaggtaaatcagaagatacctccgcaaagtctgggagcaagggctcaaagaagcacatcttgaccgttagtggtgaactcactagcatactcaggcattattgggggattgattctaagaacagggagacccacttgcatcattttcaggattctttaattattgcacttgctacagatgctaatattcaatctctgagtaattatttaaaatcaaaagaagagagatataaagactctaaagaaaaagcaaaagacattcaagagaatttacaaaaatacaaaaaacctgtagtagaaccactcatagattttcgattaaagctagaagaagcgataaaagcgatttttgtatcaagagctcctagaagaagcgttacgggagccctacatgcacagacaatattcaaacgcgaggaaaaatggaaggaatatggggggggagaaggcgtcaatagggcacttgaattgggaaaaataagagaaataaatggtggtatagtaacaaatggcgatatggttcgagtcgatatttttaaatctaaaaataaaggaaaatatcatgtggtgcccatctatacttatgattttgccataggtagattgcccaataaggctatcgtatcaggtaaaaataagctaggggttatcaaagattggctagaaatggatgaaaattttgaattctgttttagtcttttcaaagatgatttggtatgcatccagacaaaaaaaatgcatgaaagcgtctttgcttactatgtaggcacaacttcaagcacaggtactctgacttttaggcatcatagcaattgtatttctgatgatgaaaaggaattttttaggacatctagttcttctggatttttagctcagaattatgggatacaagatttgaaggtgttcaaaaaatgttccgtatctgttcttggagagataagtgaagtgccttttgaggccagaaaagacattagatttaaaacaaccaagaaatgatcttgagtgggtggatttgatgaggcttatcaaacgatttttattacaaatccagccaaattaagtcttaaaaatactcatttctgtatcattcaaggggatcaagaaataaccttgccccttagagacatcttgatgattgtttgtgaaaccaatcaagtcagcatcacagctagtttattgagcaaactagctgatcataaaatagccttttttacttgtgatgaatcacatattccaaatggtgtttttacgccttatttgggttattataaaatttctgagacgcttcaaacacaaatcaaactatctaaacagataaaagctattttgtggcaacaaattatcaaacaaaaactttataatcaaagtaagcttgcaaatgatttttcccctcaaaatgctgaaaaaattctaaaactatctaaaagcgtgatgctcaatgactctaaaaattttgaagcacaaggggcaatattttattttcaagcactttttggagtggattttgtgagaaaaagttttgatcccattaattctgctctaaattatggttatgcaatcttgagaggttgtgttgcaaggaatttagttggaagtgggtttttacccgcattgggtatatttcatagaaaccaattcaattcctttaatcttgccgatgatcttatagagccttatcgtgtatttgtcgattctttggtgcttttaatgatagaaagaggctctcttaaagaagggtttgaaatccatcatcgccaaaaattagtggggattttgggtgccaaagttttgtgcaaggataaatattatccgatgtatagagccataactcgcactatatggtctttgggaaatattttaaaaggaacccaagatcacttgttgttgccaatatttaatagagagaattcaaatggaagagaagtttatgagagttttagtgatgtttgatatgccaacgcatactaaagaagatagaaaaaattccgcaaagttcagaaaagaactcataaaagatgggtttataatgttgcaattttcggtgtatgttcgtatttgcaagggtgtggctagtgcaaattcacatttagatagacttgatttgattctacctgccaaaggaaatattagggcactgatattgactgaaaaacaatttgaccatatgaggttattgctaggaagaaaaagtgaattagaagaagcaaggaaaccaagacagcttgtattgttttaagatatttttgtagttattttgatatattttagggtttttaggggattgtaaccccgcacggaacccaataaccgtttattctaggcagttcttaaatcttctgatggaattttagcatattttaatgctatttatccttaaaattcccacaatagacgggaaatcaagagggtctattttagcatgagaagatttaagaactgcctaaaacttgaagacaaaaatctctctagcaatgctaattttagcatgagaagatttaagaactgcctaaaacttaacaccaatgctcaaagaaacattatttaattttagcatgagaagatttaagaactgcctaaaacagttctatagcaattctgaaggtattcttgattttagcatgagaagatttaagaactgcctaaaactttcgttttcgataaaaatgtataaataaaattttagcatgagaagatttaagaactgcctaaaacatggaatgctccaggcacagcctatattaaattttagcatgagaagatttaagaactgcctaaaacctatatttgaagatgtcaggaaattaagcaattttagcataagaagatttaagaactgcctaaaactaatatttcacataattttcagtgggtgtcattttaccataagaacttttaagaactcctattggtgtttataataaaagtgatttgttttcaaaacaaaagattcaagaattccaaacacaatacgcaaaaaaatatttagagaagctatctaaagaaatcaatat

SEQ ID NO: 4490 - DNA, 13826 bp, synthetic construct
  misc_feature 1..13826: note = Synthetic
  source 1..13826: mol_type = other DNA
tttcaagcgattgtttgggtggcgccctagttggcattctatggtgcttgggcgcaaaagtggtggggtgatgacgcacagataataccgccccatcacgcgatttttaagctgctcagatagccggatatgggcgtggttgtttttagcaatcaagatagccccactcgtgtctttatcgagcctatggacaatcccataacgctcttgatggctgatatcagagagggcaaagcccttggatttgagccaatcaactaaagtcgcttctttgacgctaggggctttgtggataatgagatgggggggtttgttgaggagtaaaatatcggtatcttcatagataatatcgatatccatttgaggtatgggcggtgtgtgctgctgtgtgaggggaggtgggggcaatagagtgatacaatcgccatttttgagcttcagcccacctttttggacgatttgaccatttaaagtgactaaagaacttttgatccagccaagcacttgactcttagaaatctcaagctcttgagataaaaacccgtctaggcgcggataaaaatctttgatttgaaatgtttttttcatacagcatatccgtctaaaatttgataaaattcccaaataccaaaaaggcaagacccaatgattgataggcggattttaacacattttgattttttactcctttttctgatcttgcctatcattggtatttcgttttttctgatccacgaagccaatgaagccttgagtttcaagcagctgatttatatcatatcgggattttttctgttttggattgtgttttttatcccttttaggagtctttctaagagcgtgggggtgttttattggatttgtattttattgcttttgattacagatttttatggaacaaccaagctaggtgcacagcgatggatcacgatcccaggtatcggagtgtctttgcagcctagtgagcctgtgaaaatcgctattttattgatgttagctaatatcatctaccacaacccgccgccaagatggggctatggctggaaagattttttaaaaattagcttttatatcctcctgccctttttgctcatactcaaacagcctgatttaggcacagctttggttgttgtcatcatgggatttgggattttgtttttagtgggagtgaattataaaatttggctttcgattttgatcaccattttagtggcctcgccattgatttatagctctttgcacgattatcaacgcaaacgcatacacgactttgtggctgaaaagcccagctaccatgtgcagcaatccatcatcactatcggctcaggggggctgctaggcaaatccaagaaaaactccacccaaacacagctcaaattcctccccatcgctacaagcgattttatatttgcttattatgtggagcgctttggctttatgggtgcgattgtcttgattgggctttatatcgggctgattttgcatatcctttcattttcattgctcgattctaaggactatcgcttgaaagtcattgcaggggggattgcgattttgatttttgtgtatgtgggggtcaatatcgctatgactataggtcttgcccctgttgtgggcatacctctgcctgtatttagctatggggggagtagttttatcacctttgttgtgttgtttgcaatccttgaaaacctgcttgcctttaggtttaattttcgctacaattccaatcccttcagaaatatcaacaaaaaaggacccttagctcagctggttagagcgctcggctcataaccgatcggtcgcaggttcgagtcctgcaaggtccaccactccttaaatcttttctcaatttttcttgtatatttagatttttatccaataaaacaaggcacaaaaactccaaagctattttaatgtgttgggatatttgtggggttttgcttagattttataaaatttatgcagtattttagagtatctaaagaggcgagagggcgaaagaatcgaactttccagcatccagacacctagacgctctttggatttgaagtccaaggcacgcaccagctatgcttgccccccatttgacaaaacttaaaagcccttgtattataattgcatttattttaaattcccttaaaaggacacttgctttgagagaagccctatcccaactccccaaaatcgacaagctcctcaaagagccaagattccaaaacaaaaacccctctttactcaaaagacttgcccaagagctcatagaaagcctgcgccaaggtctgtgccaaggccagcccctcccatcatatgcagaaatcctagcaaaaatagatcgtgcttattgcgctcttttgaccccaagctctaaaccccttatcaacgccacagggattatcctccagaccaacctagggcgcagcatattctcccccaagctattagagaaaatcacgccccttttgagtggatacaacaaccttgaatacaatctagccacaggcgagcgcggagagaggtatgcgagtatccaaaagctcttgtgcgcgttactgggctgtgaagatgtgcttgttgtcaataacaacgcaagcgctgtcttactcatcaccaatacctttgccaaagacaaagaagtcatcatctctcggggggagctgattgaaatcggcgggagctttcgtattcctgaagtgattatttctgcaggtgcgcaccttaaagaagttggcacgaccaataaaacttatctgcgcgactatcaaaacgccatcacacaagactctgccctcatcatcaaagcccatcaaagcaatttcaagcaaatcggttttgtgcaagaagtctgttttgaggatctaagcaagctagcccaagcacaccatttgattgattattatgatgttggtagtggctatatcacccccattgatggtgtcaatgaagcctctttgattgcaattgctgctaaaaatcctagtttggtgagctttagcggggataagctcttaggggggcctcaagcagggattatctttggtaaaaaacatctcatcgaccaactcaaaaaaaaccatcttttgcgcgctttgcgtgtggataaattcactattttcgcactcagcgctaccttgcaagcctacatagagggcgatttggagatgatacccacccagcgcatgctccatgagcccttagagagcctgcgccaaaaagcagagcaactagcccaatcgctcaatacgctctctggcatgcaatgtgtgctgacacctttgggatctatggcaggtggaggggctttgccacaagaagaattcccatcatatgggattgctttgagtcatatgcatatcaaaacccaagccctcaatgaaaaaatacggcaaaatggcctgatcgctagaatccaaaatgacaaaatcctccttgatatgcgctgcttagagccccatcatcttaacgcaatcaaacagatttttcttgaggttcttaatgcaaaatgatctcatcatcggtctaggcgggcatatcgaccacggcaaaactagccttatcaaggcgctcaatggctttgatggcgatgaaaaacctgaagaaaaacaaagaggtatcaccctagatattagcttttcccatctctacctccctcccaaacaaacagaagacaaaacagaaaacaaaaatgctagaaatatcgcattgatcgatgtcccagggcacgataaactcatcaaaaatatgatcgcgggctcttttggaatcgatgctttgctgcttgtagtgggagcaaatgagggtttgaaaccccaaagtatcgaacatctccaaatcgctgatatgctagctatccccttagccatcgtagtcatcactaaaatcgacctccaaaacacaccatctgtgctagcaaaactccaaaacgatatccaaaaagagtttgaaaaactccatcatattaagctatttgccatctctccttttagtgtctatgagcctgctacgcacgcaaaactcattgatttactctatgccctccctaaagtccaaagacccctagcccctttctttcgctattacatcgatcgggcttttagcattacaggagcagggactatcaccactggaagcgtgctgagtgggacaatgaataaaaatgactctgtatatatctgcgagcttgatacacaagcaggtattaaaagtatcgaaaaccatcacacatttatcgatacagccacgccaagccatcgcattgccctcaatctcaaaggcgtgagtgcttctgtgctcaagcgtgggtatttgctgagtcaaaagggctatatcaggggatttgatgaaattgatgttgtcatctatcctttggtagaaatgtctttacacaatctagttgtgcagttttttatcggcacgaagcgctgcaatgctaaaatctcctccctccaacccctccttgaactcgcgcaaaaatcccacacgccccaacccaacagaccctacatactcgcaagcctcaaaacagatgaaaaaatattcagcatttttggtgaaagatttatcctcaggatacaagataaaacaatcggcggtggggaagtgctaaaccctatcactgaagtgatgaaaaaaaagcaaaaatacacttattgcaacttcttgctccaaagggattttaaaagcgctttttacttttgtgcttgcgtgcataaaaaaggctttggtctcatcagctctgcgcaacgtttcagtctcacacaaaaagaagctatccaaatcgcgcaaaatatccctgatatttacctagacacccaagaattagtcatctaccacccccaaacttttgaaaatatcaaagatgacatactcaagactttcagcaaaaataaaaacgcactgctctcaagccatagtatccaccaaaagctcaaatgggcttcgatcaacttgattcaaaaagccctagattccctagaatatgaaggtttcatcagcaaaaaggataatctctatctctccaagcaaaacaatatcaaaaacatcgatgaatatttgcaagacacgctctatcaaacgattctatcccaagggctcacccccctagccccgtataatatctatgatatgctggctattgataccaaaagtgctgataaagccctcaaagccctctgtggaaacaaaaagctcatacgcctccagcacaatctattcatcgcgcaatctattctcaaaagcctgcatacccaaatgcgggagtggatacaaacttatggctatatcgatatgggagtgcttaaaaatcatctgcctttgagccgaaaatatctcattgcttatttggatagcctagacgcctttgatgatatccaaaacactcaaggcaaaaggactttcaaatacaaaggaaaagtatgcgattagactttttacaaaatccccccacacaaaaacaccccaaccaactactcatcgcaccctcctatcccaatccctcgcccatcaatccgagcgagcttgctagcttgcaaaatgattctaaagccctagctgccctctttggtggggatatgagcgtgccatttggatttttgtgcgcacattggctagagctactcacgcgtatcagcaaaacccataaaatcgcttatgcaatctcctcccaccagcaaggctatgcagctatcaagcttcttgataagcccatttataagctaatccctgataaacaaagtgggctcatcacctccaaatccctcttagaagctatcgcgcaaggctgcacttgcttgattgtcccctttgtcaatgaagatattctcacccaaaaccccatcaaagacctcaaagccaccctccaaaagcacacaaaaaatgctattttcatcactgatatcagctatgccttgagtttgaatctccctatccctgatatcatcgactcccacacattgctgcttatcaatggggaatccctagggcttttgcgctctcatggggctttgattgctaaagatttcatcgcacctgaaatattccccaaaacactcagcacccccaagctatttgccgctctccaaacaagtattcgctccctagccccaagcccccaagacaccaaagagattttttacaccacactccaatccctcatcaaaacagacatagggctttttgcccctctagcccatacactgcctaatgccctgcctttaagattttcttctatcaaggccagaaacctcttgcaagccctgcttttagaaaatatctatggtatcaatggcgcacaatgcctttatggcttgtttgctccctcttttgtcctccaagaaatgggctatagcgagctagaatctcgagagctcctcagcgtgagctacacacaaactcccgattttgacaaactctgcaaaaccatagcatactgctattcccaactcagagtgctagggatttaaggggtatttaaagtcttgagagcctaaatcaagccattttgatacagccgataaaattcctgcgcactccgaccgctccgattccccttgatacctgcataattaagcgctggcattttaagggcttcaaactcctctacgctagcacacatacttgcaaggatagaaagatactcctctgcccccaaggcatacacgcccatagaaagcccaaagcgatcactcaaagagagcaattcgtcccacacatcattttgatggatttcttgcgtattttcatattcagccacaagatggcgccgattagaagtcgcatacaccagcacattatcgggcttcttttctaaagacccttctaagatacttttgagaggtttatagctctgatctcttgcttcaaaagaaagatcatcacaatacaccacaaaacaaaaagcatgcgtgcgcaaatcatcaatcaaaaaaggcaagacccataaatcccccttgtctatctccaccacacgcaaaggcgtatcgagctcatagagatagcgcgtaaaaactgctttgaccattgagcttttaccacatcccctagctccccagataagggcatttgacgcagcctttctgcggcaaaacgcttcggtatttttctccaaagtagcaatttctttgtctagccccaagagctttttagcatccactctgtcaaaatcagtgattttgtgcaggtaacctccattgtaattacggaatatacaagccttgctaatactccaatcatattcaaaattcatcgcaccactcctatgcttttaatctcaatgcgcccctctttggagatattcttcataactacctttaaaatcgatgatttttgcaccctctgggctagggactagctcgatgatacgattagcatacgcatcgatgagctctctatcatgactcacacaaatcacacaaccactaaatttataaagcgcctcgcctaacgcaatgatagattcaagatctaaatgattcgttggctcatcaagcaccaaaaaattccccccctcaagcattagctttgatagcaccatacgatgtttttctcccccactcaaagcatcgatatttttttcttgctcctccccgctaaaaagcatacgaccaagactattacggatttctgagggctcgattttcttatcaaacccgcgcaaccactcatacaagctctccttgcccttgatctcttcgctcacattttgagggaaatatcccctttgcacagtcgccccccaagacacacgcccgctatctgcactcagctcttctatgagtatcttacacaatgtgcttttacccacgccattagggcctatcaaggcgattttatccccaggcattaccttaaggctgacattttggagcacacacaccccatcatagcccttagatatcccctcacactctaaggcttcattaccgatcgtgcgtttgggcttgaatacaatgctcggatcgcgcctgcttgaaactgccaaactctctatattgagtttctcaagctgcttttgccgagaggtcgcttgcttggctttgctagcattagcagaaaatcgtgcgataaaagtttctagctcttctttttccttgagttttttgttgcgctcagcttcttggcgcttgctaaggagtgttgaggcgatataccaatcatcataattcccgctaaactctcgcactgtgtgaaaatccatatccaaaatatgcgtgcacactgcgttcaaaaaatgcctatcgtggctgatgacgaccattgtcccctcgtggcgcttgagattttcttcaagccaagcaatcgagtgcagatccaagttatttgtcggttcatcaagcagcaaaatatcgggcttagggaaaagcacttgcgcgagcaaaatcttaaacttatcccctccggtgagtgagcgcatcaaatcataatgcctttcttgttcaaatcctaaatcttctaaaatcttttcaatcaccacttcgtattcatacatcgggtcttcttcagcacagataatctctaactccccaagccgctcattgacctttgtatcgctcaaatccccatttgcatagagttgctctttttctttgatggctttataaagtcgttgattccctagcaaaacagcatcttttaagctcaaatcttcaaaagcatattgatcttgcccaagcacccccaatcgcaaacctgattctatcaccacctccccactgctaggctcatacataccactgagtattttcaaaaatgtgcttttgcccgctccattagccccgatgagaccataacgtttgtttttatctagcttgatattgacattttcaaataactttttagtcgcatatcgcattgtgagattgatggtttgtagcattggataattcctttagagtattgatttttttatcctattttacccaaactcctcccagaatatattataaaacgccatataaaatcaaagtgagttgacacttaaaatcaaagtgacacgctctgcttttgttttatgtggcaaatcatgacttaaacttaactgaaactaactatcccctcctaagaaaagagttttaaaagtatttttggatttgattgattgttttatttgcttaagagtttggagactttttcaaaaaaacttttttattcttttctttcaaaaaggggtttaaccacccctaacacaatgggtgggttaagaccttagccccgaaaaaactcttttggattgcaaaatccttttgcttacgcattaaggggctaaagggggctgacttagcgaagcgccccctaaaccccctttacccctgcacgcaaaggcaaatgcagaaaggtaagggcagaaaggcgaaaacctcggatggctctattggctcgcccttgcgtggtgttaaaagagggatacaagattgcagtagtgcttttcccctcttttaactagcaaggaggttgcgagcttcccctccttatttgccgaaaaaagagttttttcggggctaaggaggggttaggggtggataaaccccttttttgaaaaagaggaaacaaaagccttttttattttgttaaaagaaaagcaagggcgagcaaaggcacagaaaataaaggttttcagcattttgtatttgtgttttcagcatttgccttttgcatagacaaagcccatttatcactcgcattgatggcgtgccctagggaattgacattttgccttagagatacctgtctggccaatactaatagattgtagagggtgtgcatagctatcaagggcttcttttattttaaaaagaccattagatgctttttgggtgtgtttttgggtttgaactagtgtgttgtttaggtcgtttaatttgcctgtttcagtgttaaacgaaatcttgacaccgatattctttcccgttataactacctaatatctatatattgtaggggatttgagtgcaaagagtttctattttttgtcgtaaaaaatttgatggaggttttgatggggactatcaagattctagggtttgatatcggtatcacttcgataggttggggattgattgaagtagaagatggtgtgcgtaaagatgggcagaatagggactcagggaagattattgattgtggagtgagattattcaaaaaagcagagggcgataaaggagcatctttggcgttgcccaggagaaatgcaagaaatgtgcgcaagatcttcaaacgaaaaagggccagaatagcacaactcaagaatctactagccaaaagtcttggtatcaatgctcaggattttttgccccaaggcaaccatctccccaagctctttacaacaaataaaaatttcctttccccttgggaattgagggctttggggcttgagagggtgttgggagatgtggaatttgcaagggtgctaatccatatcgcaaaaagacggggttataacgacttacagatgattgagccagaagaatcagaggactcacaagataaagaaaaaaacgaagaagaaaagaaaaagaagcaagaagagcaggctatgcttgcttccatcaggaagaatcaagagtatatgcaaaactcaggctatcgaacaattggtgagatgatgtgcaaggaattttatggcaaggaaatctctaagggccactaccaaaatgtccgcaacaaaggcgggagcgaggagcaagagggaaaaaagaaagacaagaaaaagaatcaagataagttcatgtgctccattggcaggagagagcttcaagacgaagttaggattttatttgccacacaaagagagcttggcaatcaaaaagcaacgcaagccttgcaagatgagtttgaaaaaattgccttttttgtgcgagagcccaagggctttgtcgtagggaaatgtacatttttcaaagaagaaaatcgagcctcaaaatgctgctatagtgctgaagaatttatcaatactactagcattatcaatctcttaaaaaagctcaagaatactacaggtgagtgtcgatttgatgtatctcctgagctgatagggcaaatcttacaagaggctaaggccactaaaacgggcttgagttataaaaaattgcgtaaaatcttagagcttgatgaaagggtgaagtttcaagcaagagggctagattatactaagaaagatccagaaaataagatttttatcaaatttgaaaaataccataaactcaaggattatttgagtgactttgcagaggaatttgagtcattacagcgagatgttgttgataggattgcaaatattatagcatccaatagatcccaaaatatcctcaaacaagagctccaagacctccctatctctgaaggtatgcgagaaaagctcgtttttaatccattgaatttcaaagaaacaatcaatttgagcctaaaggcattgggggagattttgcctttgatgttagagggcaagcgctatgatgaagctatcaaagaagctcctttggaccatcatagcactcaggacctagaaaaagatcaagaagagttgcctgcacttgagcacactgagtttgccaatagcctcaatcctgttgtcaatcgtgcgattgcccaataccgcaaggttctcaaagccattatcaaaaagcacgggtatatacataaaatccatatagaatttactcgtgaagtgggcaagagctttgaagaaagagataagatcaataagcagcaagagcaaaacgataagcgcaatcaagaagcccaaaagcgatgtcaagagatgggattagaacccaataagagcaatcttttgaaggtgaaactatggcttttgcaaggagagttttgcctttatagtggtgagaaaattaaaattgagcattttaaagaccccaaacttttacaaatcgatcacatctatccgctttcaaggagctttgatgattctttgggtaataaggtcttggtgtttgcaaaacaaaatcaagacaaaaagaatcgcactgtgtatgagtggatcggtgatgataaagacaaatgggatactttgtataagagaatctgcgcgataaaaactctcccagaggctgtgaaaaaaaagattttgaatacgaactttaaggataggaatattggagatcgcatgggctttttagaacgcaatctcaatgacacagcccatatcaatcgccttgttgtgggatatacaagcaaatatttaaaatttttgcccttgagcgaagatgaggatatgacactaaaagctgggagcaagggctcaaagaggcatatcatcgtgctatcagggagtttgacaagtatgctcagacattactggggactagggagcaaagacagagatacccatctccatcacgcagaagatgctctgattatagcgtttgcgacccctagaaatatcaaggcatttgcagattatatgagtcttagagaaaaggggtatcagaaagccaaagaagaagcagaaactttgaggcaaagtagtgattataagacaaaaaaacagcttgcgatacctatggacaaattccgcgatcaagtcaatcaggcagtagaaaaaatatttgtttcttgggcatctaggaggaaagtttctggggcactccatgaagcaactatacgcaagccagaggcatattttaaagcatatggagggcaagagggtgtgaatagagccttgaagctagggaagatacgaagtgttaatggagggattgtagataatggtgaaatggtgcgagcagatatttttaagtcaaaagatgagggcaaatattatgtcgtgccgatctatacctatgatgttgcagtgggtaagctacccaataaggcagtggtgagtggaaagaataaagaaaatgtaattaaagattggctggagatggatgggaactatgagttttgttttagtttatttaaagacgatctcatagagatccagaaaaaagaaatgccccatagtgtttatgcctactatgcagggatagattcaagcactgctagcttaacagccaaacaccatagcaatcatctcaaagaggaggagaaaggttttttcaaatccgataaatcaggagcgataattggaagtggtatccaaaatcttaaggtattcaaaagatatattgtatttgcactaggagagatcactcaagcagagtttgaacccagaaaaggtatctgtctgaaaacaacaaaaaggtagcccctgatggcaggattcgatgaggcttatcggagtatctttattgccaatcctgctcaattgagtcttaaaaacgataatttttgtatcactcaaggaggcaaagacatcaccttacccttaagggatattgcaacaatcatttgtgaaagccctcaagtgagtatcacagcaagtttgctcagtaggcttgctgattgtaagattgcactttttacctgcgatgcatcgcacaccccaaatggagtatttaccccttatctagggtattacaaggcatctgaaatgttgcagtttcagctcaaggtatccaagcagactcaagcgattttatggcaggaaattatcaagcaaaagctctacaatcaagcaatgctagcacaagatttctgtcctcaagatgcacaaaaaatcctcgaactctctaaaaaagtcacactcaatgattctaaaaatctcgaagcacaaggggcgattatttattttcagactctttttggcaggggatttactcgcaaagagcccacccccatcaatgctgccctcaactatggttatgcaatcatcagaggttctatagcaaggagtctagtgagtagtgggcttttgcctactttggggatttttc

SEQ ID NO: 4491 - DNA, 20923 bp, synthetic construct
  source 1..20923: mol_type = other DNA
  misc_feature 1..20923: note = Synthetic
atcgagaatatcgtcacttctctcctttacaggctgataaatcaactagatgtacataggctggttgaagacaatttaaaaagttatgatgagcagcatatttcaaatattattaaaggcgcgacgaacgaacaacttctctatatacagtatctgggagccgtgttaggcgtaataggcggatttgtaatctgggaaccccttttgagtgttcttgtattaggttcattgacaggcactattttactgctggatagctttctcctgtatcaaaaacaacgtgtttaagcctacaagcttaaaatgatgtgttttaagttgataaacttaaaaaaaagccccatattactgcaaacaaaccgtaacccaactccgatttatatctatggctatggtctatgcagtgctaacaggcgatatcgtcggttcctcccgcttagaggccagagaacagttagtgttaaaggattctctgaagcaatcgtttaaacgcgtgagagatatgtatcccgatacaggcccactgccttctttcgatgtattcagaggcgacagctttcagggggtgcttgacgatgctgtgtacgcacttgaaacgagcctgctaatcagggctaatcttagaaaggaccaaccgccagatcaagaggtgaattgggatgcgcgtattgcaattggcattggagagatagattatctccctgataacgtctcagagggcgacgggccggcttaccggagctcagggcccgtactagatcgcctaaagaaagatatcaggctggaaatacacactccctggcaggaagtaaatgatgaactaaacacggaatgtgcgttactggatgctttgattgccggctggacgcccccccaggccgaggctgttgtaatgctgcttgagggtaaagaccggaaacagattggccgggagcttaaaatatctcaggcggctgtgcactaccgggttaaaggatcggggtggtttgctgttgaaaagtttataaataggtatcatactatcataacgaaaaatatcaattaaccaatgcaaggttgttacgttctgatcctggcctgctcaaacctgacaggttttgagccggttgccgatataatgtaacagccctgacgtaactaacgggggacggcttttgattatgggattttctctattgcttcgcgtgataattgcccacctgctggcagatttttttctgcagccatatacctgggtaagcgataaaaggctgcatcatataaaatccaggcacctgtattaccacattgctatagtaggcctgttgacgtacttgttaatgctggattggcgtgcatgggagcttccgctttttataaccgtaacacactttgttatcgactggtggaagtctacccgaaaggatacgatgggtgtttttgtggcagaccaggcggctcacatgctgatgattgtaaccggctggcttattttttcggagaatctgccgaatagctctgattttattttcgttacgttccgtgaatccggtttctggattgtacttaccggttatctgctggtattacgtcctatagggtttttgattgaaaaagctaccagccaatggaggaatgaacttaccagcgaaaaggatgaagtatcggggctgacaaatgccggaacctggattggttacctggagcgtgtcatcattcttacattcattctactgcaagagtacagcgctatcggtttccttattgcggccaaatctgttttcagatttagcggaggccttaaggataatcacgaacgcaagcatgcagagtatattcttattggcacgcttatcagcttttctttggctattttgacaggtataggcgctttgagcctgctggcagacggataggaatcagagccgccggccgccggacaaaagatgtgggatagggaaagtaagtaactctgcaattcacaattctttatccggcggctattggcttgtcagtttttaaccgcgcctctgtgcagatattcttcataaagctgggtatgcctgcttaccataggaattttatacccgcgtatgaatacctgttcaatagttgtcaatggctcaaagggatcaccgtcgctgatgatcagattggcctgtttgcctgtttcaatgctgcccagcctgtcatctacaccaaaaatttctgcggggttaatggtgacggcttttagtgcctcctccttacctaatccatatgctgcggcatagcctgcgtgatagggcaggttgcgcacattttctgtttccccggtggcaatggctacttttaccccggccttatgtaataatcccggattttggtagggccgctgataattgtcataatccctgaccggtgtataaagagtagaaacaagacagggaagccccgcttcggcaatttcttcagccactctccatccctcttccactccggcaagaataaacttcgcccccttatgctctcgggtccactttataacatcgagaatatcgttagcccgttctacagagatgatgacaggaatatcgcctgctattacttcacgcatggcgtctaattgccggttctgatcgggcttggttttcccggatgagttctcttcgtactcgttcatcatcttgttatagaatcccgcctttttccagtattcgttgagctcttttatattcttctgatattcttccttaatcttttcaggttttcggtcatcccatcccccctgtttatacgcgctgggccagtttatatgcaaggcggctttggcacggaccgccatggaatcaggagtgtaaccgtagaggtcaataagggtagcttttcctgatattcgccccgatacgggcagcgatataacatgtgtaaccccattgactcgtgtgaccggtatagcgacgctgcccgggttaatagcggtaaacgccagcacatgtggattgtactcacccagttcggcttggtcgttggtaacgggtacggcacttatttccagcaggccaagcagcgttcccgaatccataagtcccgggtatacatgcttgcccgaggcatctatgtgtgtataatcggctgttattttagcgttcttccccacataagaaatcttttcgccgtcgataagtacaactccgccttcaataacgccactatttacggtgtgaatggttgcattggtaatggcaaatttgccgaactccgccttctcagtgatctgtgctttagccggttctaccgttatgaccagagaaaggcagcttaacagaataattgataaatacgtatgcattgtttctgattctttactgatttttattaatagctgccctgctgtatgctcattccctcttcgccaaaccggactatcgctccctgcaaacaggaatcctcatatttctcccgctcataccagcgcctggctggttcttcatagtcggcttcagggtctattttcaaacgcatatcgtcgtcatcacgctcacggtcgaagtattttttaccgtcgataaatgtcttctcacacatactatacacagaaagcggatgaccactccatatcgccacatcaccatgtttgccctcttcaacacttccaaccctgttatcaatacccagctgaatagccgggtttatggttatcatcttcagggcctcctctacagaagtgcctccgtagtgtacggttttagccgcctcatgattgagatggcggataagttcgccgctgtcggagttaatactgttggtaataccgttggcattgagaatagaagcattgtaggcggttgaataatacacttcgaacttataagcccaccagtcggagaataccgaagtatgggccccgttttttctaagttcaggcgccaccttaaaagcttcattggcatgctgaaaggtatagccttcaattccatagtcttcaaaaacgcgcatcagcattaatatctcgtcagcgcgataggaatggcagtgtaccagaattttaccatctattatatcggccagtacttccagcctgaggttcctggcaacaggcaacggaggtattccttttgggcggttgtcgtactctttttttgctttgagatacgcctcccgacggcgcttataatcaagagccgcatcaaaatgttcacggattacctgctctactcccatgcgtgttcgcggctgaacgccgaagccctgcccgtgtacgcgggtgggattctcccccagcgcaaatttgatggtctgtggcgctccctcaaacggcagctcttccagtccggcgccatacctaagctttagggtttcattgcggcccccgataacgttagcggaaccatgcatcaggttgatggtagtcactcctccggccagagcccaatagatgttgatatcattgggattgacagactcttccattgttacttctgccgtaacaggatgcgtccactcgttgatgtgcacacctgcaatgtgggaatgggcatcgatgatacccggcataacatatttgccggttgcatccacagtttcaacaccatccggagcaaccagcccctgccctatttcagttatgatgcctcgttctatgagcacatccgtattctccatctcaccgttggtgattgtgaggacggtgccatgtttaataagtacagaacccttttcctgggcgtgccctgaaagaaatgtacccagcagtgcatacatcaacgcaactattatcctcatattcattcagctttatcctctttttcagatgttgtaatttcaaattcagacagcttgccacccgacacggaatacaacgcctgcgcctctgcttccgtaaaaggcctggtaaagactgtaaagctggcgacatgcccttgttttagatcaccggttttatctcctattcccaagatatcggctgtgtgctgcgttagcatagccaaaatctggttttcactcaatccgccttcatccataagaatctgaatgtgctttttcagatcctctattttcattccgttagatgcgtatccaaccttaacacccgcttctataaggcgttgaatattggtgatgcgagcctgataagcctgaagctggcgttcccggaacctgcgcatctcttcagtcacttcggcttcatcttcgccttctctctcttttactctccagccgggctcttcgggaaaatcaacactggcaagtacaggaatattccgcttccttagctcttcagcctgttggaacccctctttaccggaaaccaaaaccacgttaaaatccagttcatccttcagccggaacagacgggaaatatgttctttggtatctgctttaaagaacaatggctgctctttatccatcgccgggtacagcgcttccagtacctcatctctggccggtacagggtaaccggaagagacagaggcataataggccgactgctccctcagtgccgcggcatcgtaccatagctgccggaaccgggccatcactcccattagtgtagcaggataggcgccgttcccaaaactgccgggagcttgctcaaaagaagcagacaagccgatcccctcccggataaggtacgctccggtatctttcccgttgacaaaaaaaagatctatctgccccggcaacatttgtcctttaagtcccagcgcagcagttgtaaatccgtgcttccgagccttcttaaagctatcggctttagccaaaagcttattgggttggcggtgcggctgtatacccgcccgttcatatccgggattgccgggtgcctcgggtttagaatatttcgccggtaaatccgggctggcccataatgccaggccatcaataaaacccggatacacgtagaggctgtctcccccgtcaatgacataagcatcaaaaggtatagagacgtccgagcctatggcttcgataataccattgcgccatacaatggtgccggtttctatggtcttgccttctgcagtatgtatcgtcacattatccagggcccgggcaggcatggattgcgaccatcccgcaagcggtatcattataaacagaatcataccgagaatggaatcgcgaaatagcttcatagatatattcctgtggatgttgagattatgaatgaattaagaaataatattagtctttctaaaataaatagataaaaaaatgaaactgttgaatagagcacgtgtaacgcagattgtaaggatgctcacagatattaatctagacatttcattacgtacaaggatagagtttaactaaaagaactaattaaaaaatctctgcaaatctgcgaatatcggccggatcagtgccaaccgcgatctgttatataagctatacctgaatgactccggtcttgaattcttcaatacggggattgtgatttgcacagtggatggcatgagaaatacgatctctggtctctatcgggttgataatttcatctatccatagccgggccgctgcatagcgaacatcggtttggcggctgtaccgatcgctgatttctgttaagatacgttctttctcttcttcgctaatcttctttcctttcttctccagagccgatacccgtatctgtgttagtacgtttgctgcctgcgaaccacccataacggcaatttttgctgaaggccaggcataaataaaacgaggatcgtatgcacgcccacacatggcatagtttcctgccccgtagctgttgcctatgacaatggtaattttgggcaccgtactattggccacggcattaaccattttggctccgtctttaataataccgccgtgttcactgcgcctgccaatcataaatcctgtcacatcctgcaaaaagactatcggcacctttttttggttacagttcataataaagcgtgcggctttgtcggcgctatcagaatagatcactccgcctatttgcatctctccctgccggtttttaacgaccatgcgttgattggctacaatacccacgctccacccgtctagccgcgcatagcctgtaatcagggtttgtccgtacccttttttgtattccgtaaaactgtctttatctatgagacattccagaactctgtgcatattatacggcttggtacggtcttctggcaggatatccagtatatccacgggatctgtagcaggctttttcgactctgtacggttgaaaccagccttgcctgaagggccaaacttacttacgaggtcacggatggtatgaatgcaggtttcatcatcttccattttgtagtcggtaaccccgcttatctctgtatgagtggtggcccctcccagggtttcgttatcgatgttttcaccgatggccgcttttaccagatagcttccggccaggaaaacacttccggttccgtcaacgatgagagcctcgtcactcataatgggaaggtaagctcctcctgccacacagctgcccatgatggcggcaatctgaggtattcctttagcgctaatgacagcgttattcctgaatatgcgtccgaagtgctctttatccgggaaaatttcgtcctgcataggcaggtacacaccggccgaatcaaccaggtagatcagaggcaggcgattttctatggcaatctcctgggccctcaggtttttctttgctgtaatgggaaaccatgccccggctttgacagtggcatcattggctatgatcatacaagtctgtccggcaattttgccaatacccgttatcactcctcccgcgggacatccgccttcatcgtcgtacatttcgtatccggcccaaaggcccaattcataaaatctgcaatcgtcatcggttaacaggctgatgcgttcccgggccgttagcttacctttctgatgttcgttgtcgattcgtttttgtccgcctcctttttttattttctgtttcgtaatattcagctctctgataatagctttcagcggggaaagggaactattggcaacgctttctgaattcataagattggcgaagttttaaaagtaataggtttcaatttccaagcgtttatcaaataacgggcgctaaagtgtgtcggtcatgaacatgtggcgtggatttggtccgcaccaagtcgcccttacattcatgttctcaggctaatgctccgcacaccagaaggttctcgaaaggaatgatgatagcacagttgcaagattcttattataatgattaaactttaatttaaaaatccattctgttgtgaataagataacaaaaatcaaatggcttgctatctcgggtttgatctttagcttcttgctatcatcggatgtatgggctcagagacggatcaattatcaaagccttgccaatcagcaacgcaaacagaatgtgtatttcgatcactttaccttgcccggcagccaggatagcaccgtccggtttgtcagtaccttccaactggctcattcttttctgccttttagaaagacgaatgaatttggggatgatgaacaattttacagtattgtttcgctcagtatggaactattcagggcagaagaacgggtaaacagatccagatggaacagaatcagagttgaaggccttgaatcggtgcaaagagctttttggaaggatacggcctatgccgaaaattatcagcaaacccaatccaataatgcttttattggcggatatatgcaggccgaactaaggccggggctttacaactacttgcttcaactgaacagggatgaacaatcggaagaagaaacttcaagtgtgcgccaggcctttatttctccttacggcaaacagcctaatggcaatgttatattcgtttctgatgtagatagcgagtctgccccttcctccctggaattgctgacctttggaaataatgtgctttacggcaaagatttttatgcttttgtccttctgcctgaatatgaacctcaggccgcctattcctaccagattcaccgggtagagaacctggagcaagatactaccataagagatcaggtgctggagcgcagactcacagaaaaccagttcctgacaaaggtaaagcctgttcttgacgataaaaaaggaagcccatcgatcagcataacggaacagcaacagggttttaattatgcactatttaaagttcccaacagtgagcttcccaatgccgtctaccagatcagggtgtttaaagagggacaaaagcgcccggttgcccagcgtgtgttccgctcgctctggcttgaaatgcctgtcagcctcctgaacctcgatgtcgccactgatatgttgcgtttcatagaaagcagagataccatcagagatcttcaaagcggctccagggctgaacgtgaagaaaagttcagaacctactggaaggccaaagaccccactccagaaacggaatacaatgaacttatggccgaatactaccgccgaatcgattatgcttacgaacactttaccacattcaacacggcgggttatgagagcgatcaggggcagatatatattaaatacggtccgcctcaaaaggtggaacggaaattcccgcccggagaggccgcagttgaaatatggacctacgggccctctcagcagtttgttttcagggcaaccagcggatttggagatttcaggctggtaagcggatgagggagggcagctgacagccgtcagctttcagctatccgttcaaaaaccacctcatcggaatactgaaccgatactgacaaatagtgaaggtgtgggtgcacaaggaaaagtagcgtaaaatatcgcagatttttgaaacagggcccatctgatctgccatcccctgaggggcaaaaagttgcatttctgaaattttagcttaatttaaataaataaaaaaagccccaccgaagcggggctaaaggtttttcacctacggcatatagccttattgtgataagatcagatggaatcttatggtactattctagttaaatatttcgggaatggcaactttaaattaaaaaaacaggggactttcttatggtgagaatactaggcctggatttggggactaattctattggatgggcggtggtggataaaagtagcgatacttaccaactcatagaaaaaggagtgcatatcttttccgagggagtaaagcttgaaaaaggcaatgaaaaatcaaaagcagccgaacgtacaagttttaggagcgcccgaagattgaagtttcggcgaaaaatgcgaaaatatgagactctaaaagttctgatcgagagcaagatgtgtccattagggattgaggaattggaactctggagaaattccgtagatccaaatactggtaagaagcaatctttcaaacgatatccaaaaaataaagaattccttaactggcttaatactgacgaggataccaataagaacccgtacttttttcgggacaagttttcaaggactaagtacaattggcaagacaaccagaatgctgcttatgaattaggcagggcgttctatcacatggcacaacgcagagggttcgccagcaaccgtaaagatcaggatggcgaggatcaaattgaaattttaagaagtgatttatttgaggcattagaaggctgggaagagctggctacttccaaagaattgcacgataattttgaagtaatactatctaattatgcagatagtactgatcctaaagtaaaacgcatcatccgagaagtcagaagacagttcaaagagaaaaacttgcttatccatgagatagtaaaaaatctaaaatccaccttaaaagaccgaagaaatttaggccctgtcaaacaaaatatccatgagttaacagataaaatcaaagcggctggttgtgaaactctgggtcagtatttttatctcctgtacaagaaagatcgacataacattgaaaataaaatacgcacccgctatacagacagagaggaacactataaaactgagttcgataccatttgcaaaaaacagaacataccaaaaactaccgtcagtaaattaagaaaagcgatcttctttcaacgtcctctgaagtcccaaaagggactggttggcaagtgctcctttgaagtaaacaagcccagatgtcccgtttcacatccttcttttgaagagtacaggatgtggtcatttataaataacattaaaataaaaacccctgaggatgaggagttaagggtcctgactgaatcagaaaagcaagctattcttcccaaattttaccgaattagcaaacccaattttcagtttcaggatatagctgacgagcttctgcctaagggccactatgcttattttagaagcagagaagccagagaagcaaattgtctgatcaattataggcctgacacaacagtcagcggttgtcccacaacggctgctttaatgagcatctttggcagaaaatgggaagacaaggctgcatggagaaaaaagcttacccaaagttggagagtgaagactaagaagaacggtgagagaaaaactcagtcagaaatcatcaatgatttctggcacgcgctgttcaatgccgatctggtaggtgataaaaaggatctaattggcaaatcacgacaagaaaagctagaagaatttgctaaaaaaaataccacgctgactgacgatcaagtaagatcttttagtaagatcagatcactcaaatcggaatacgcacgtctgagccttaatgccattcacaaaatacttccctggcttagacagggacttatttattctcatgctgtattcatggcaaacatgccaaaagtggtagataaggatatatggaaagatgaagaaaacaggatagaaatcaaaaatgggataaataatattctggaatctcatgctattgaaaacaagctcgccctcatcaccaatggggagctaaaaagcgctcgtgatgctcatgaaacctattctaaagagaatgaaccggtataccgccacttaattgaaaatcgactaaaagaggcttttgggacaagtagctggaaggacctggataataaaggcacaatcctcgagaagactttccatgaattcatatctcaattccagaaaaatatgggtaaaggctcgttcttaaaagtaaaacgtattgacgaaaaggtaatagcatttctcaaaggagataatgaaaatggtgttgtttattgtaacaatgatgaccgcctgaaggatctttaccatccctctgatatcgagcgctaccagccggttccgttaaaagaaaaaggacggatacttatgcaaaatggcgaaccattgatggggctgggtagcccggtgattgctgctattaagaatcctatggcaatgcgaactttacatcaactccgtaaactggtaaatgctttgattaaggaaggaattatagatgagagaactaagattcgcatagaacttgccagagaattaaacgatgcaaataagcgtgcagctattaaaaagtatcaggttgaacgcgaaaaacaacgggagtattaccggcaaatgatccgagagttatacaaaaaggaaaccaaacgcgatattaaccccacagatgatgatatactgaaatttcagttttggattgaacaagacccagaccatcagcctccgataactgaacaggaagtattaaagtaccagttatggagcgaacagcagcatcgctgtatctacacgggtaacaccatcggaattgcagattttattggacccgatcctaagtatgacattgagcatacgattccgcgaagtgcttcctttgataactctcaaatgaataagactctttgtgagagaaaatttaatcgggagataaaaggcgacaaaattccatttcaactttccaactacaatgaaattctaacacgaattgaaccctggaaaaataaatttgaagagttagataagcagattcaaatccttcgaaggaggtcaagggcggcaaccacaaaggaacaaaaagacaaaatcatacaagagcgtcattacctgacccttcaccgtgattattggaaaggtaaatatgagcgatttacgctagaagaaataaaagcaggctttaaaaacagtcaaaaaatagatacaggcataatcacaaagtatgcaagagaatttctggggtcattgtttaagaacagaagcggcaatccaaatgtgtattctgtaaatggcgaaatggttgctgcatttagaaaggcatggggattgcaggaaagctacaaagatgaattcggacaaactcactacaaagaaaaggaccgaagtaatcatgtgcatcattgcattgatgccattaccattgcatgcatggccaaagaaaaatacgatgaaatggctcatgcctggaaacttgaagaaaaggagaagtttaacgctgtccgtgaactgttagaagaaagtaaaccatggcagactttcgcccaggatttaaaaagaattgaggaagaggttttagttgtacatcaatctaaagataatgtaccaaagcagacaaaaaagaaactcagaaaaagaggaagaatacagtacagagataaagctaaaaaccaacccatataccagcaaggtgataccgtaagaggttcattgcataaagaaacgttttatggggcggtcaagcagcctgagaaagtaaatggtaaaatactctttaacgaaagcaacaaaatggtcctgcagaaggataaaaaaacaggagaagatgccatctattacgtagtgagaaaaaaactttcagatctcagcgatgcagatctgaaaaagattgtagatgacagagtaagagaaatagccatcgaagcgcgtaaagaagagaaaaagctcaaaaaggaaatagatgctatcaaaaagaaaatcagaaaggctgatgaagaacaagaaagtgagttgaaagctcaaattaaaaatattgagtacaaaattgctaatgacctttatgtcattccacctaaagaaggtaaaagccaatatacgccaataaaaaaagtacgaattaatgccaagctagcagaacccctgaaagattttaaaaagcacagagatacctcaagacatacccacaagcaatggtattacgtacaaaatgatacaaactattgtctcgttttatatgaaagcgatgacagaaagaaaagagccgcagaaatcattaagcttatggatgccgcacattattttaagtcaagtaatggagaacgggaatatcctctgattgagcctgaaagaaaaggaatgaaaatcagaggctttctcaaacccgacacattagtattattttatgaacgcaatcctgaagaaatttgggagcttgatgaaagcgagataagaaaccgtttgtattatgttaggaaaacggcaaagaatgggcaaaccaccttccagttccatcaggaagcaaggaatgacgaaagcctgaaagaagattaccgaaaggaacatggtaaagaaccgccaaaatcattgaccaatggagagtcaggcgttgatttcgacaggctaccgattcctaaacttctattaagtcctataaatatgaggctacttattgaaggagtggatttcaaaatctctcaccttggaaaagttgaaaggatatgagtgagaagaagccatataaaaaggatgaacaaaacaaatcgagggtagatgaacctgagatagcctatagcattgagagtagaagtaaaacgatcaccatttctactcttgaagagctggaagaattaaaccgagtacatacgcgtaacctcagtccacccgaacgcatggagtacctgcgaaaattaaatgaaaacatcttcggcttcgacctttcccggcaacaggctgttctgcgcaaaggtaatattatcataaggagaaagtcatgaagtttttacatcccgcctttgttgaagtactcaagacgcttattgattatcatgtcgaattcttactgattggcggatatgctgtcaattatcacggctttggaaggcctaccggagatatggacttatggttaaggcctgataatgctaataaacaaagatgcctggccgcatttcaagcacttaactacagcagagaaagcattgaaagtataaatacactaaattttgaaaaagcgcaggtgttttttatcggtgaagttccactgcgtattgactttttaacaaaagtaaacatagtggattttgaagatgcctggaagaaaaagaacttcttatcactggatgagttagacattcctgttattgactatgaacatttagtgctcaccaaaatttctacaggccggactcgggacaaactcgatcttgaagaactccagaaagtccgaaggcacaaaaacagaaaataacgcatggtgctatgctcaaaaaaacgctgtttttcaataacgcctgtcatctgaataccaaatacaaccagttggtcatcaccaataaacaaacaggggagcggaatcagcgtcctatcgaagatctgggctatgtagtactgaatcatccgcaaataacctttacccagtcggtcatccagcagctggcggctaataacgccgcggtcatcttttgtgatgaaaagcaccaccccgcttctatgttgtttcatctggattcccatcaaacgcagacggaacacttcagggcacaagtcgaggcatcagaaccactcaaaaagcagctttggaaacagaccattaaagccaagatcagaaatcaggcggccgtactcgattttgcagaccgggatggagaggcgctccgttatatggcccgaaaagtcagaagtggagacgccgataaccaggaggcccgggcggcccgcttttactggcccatgctgttcggcgaggactttctgcggaagcgattcggcaacccgccaaacaacctgctcaattatggttatgccgtacttcgggcagccgtcgcccgcgcccttaccggctcgggcctgctccctactctcggtattcatcaccgcaataaatacaacgcgtactgcctggccgatgatgtcatggagccgtaccggccatatgtagatcagcttgtatgggaattaagcgaagcgggacaggctgaagaggagttatctgcaggactcaaatccgaactcctgaaaatcctttcatgcgacgttataattaaccggaaaaaacgtcccttgatggttgggttatcacaaaccacggcctctcttgcccggtgttttaaaggggaagcacgaaaaataacgtatccggtgttatgaaccattcacgcttaaacgcttatcagatcatgtggcttttcgtattcttcgacctgccggttactaccaaaacggaacggagggctgcaaccgggttcagaaaaaaacttctaaaagacggatttaccatgatgcagtattccgtctacacccgtcactgtgccagcagggagagcgcccaggtacatgtaaagagggtcaaaagctttgtgccggccaaaggacatgtaagcattctctccgtaacagataaacaatacgggcgtattctaaacttttggggcgtcaaaaccacgcctatggacaagcccccgcctcagcttgaaatgttctgagcatactgcaggatataaaaaaagcggtattgacagagcactgaatgctccttcaccgctttttttaataaaatattattgcctaagttgctggataccagaaggttataatgccaaccaatatccttaatcccatctaaagatcaaaccacaacataaaaacatcctgaatcccgttttcggatatgctttgtattgttttgtcgatcaaccggcctctccgcaaatattattttttaacgtaataagatattgaaataagctgtcggagccttaccttaatggtattaaagtgacgtgagctccagataagaaacctggagaggccggaggagggtcaggttataaggatcgttctctatatcttgaagtcacacggaagtgatatttttgaaaaagtatgccattacgtatagctatcagcataggagatgttaacggaataggtccggaagttgtattaaagacgttgactgatttaaacttaacaggtatcacccccgttatcctgagctccggagaggtggtctctttttattcggatttactgaacgtgcctgttccctttcattcggttaaaaaccatcatgaaattaaagacggcgtcatcaatgtagtggagagctacaacggcaaggagtgttcgatcaatccgggtgaattgtccaggaaaggtggcaaatgcgccatgctggctgttgaaaagggcatcaagctttgcctcaaaggcgcagctgatgcactggtaacagctcccatatccaaagaagccgtgaatctggccggctacaatatacccggacacacggaattcctggctgataaaaccggatgcagagactatatgatgatgttggttaatgacggattgcgggtagggctggccacgatacatgtgcctttgtctaaagtagtgtctcacctgtcggaggcttctgtgctgcggtatatccgcatcatgcataagtccctgaccgaggattttggcattgaagagcctgagattgccgttcttgggctgaatccccatgccggcgatggcggcgttatcggaaatgaggagataacgatgattgcccctgccctgcagaaagccaggtttaatgatataaatgtaagtgggccatttccggcagacggtttttttggaaacagacaatatgaaaactatgacggaattctggccatgtatcacgaccaggggctggtgccgtttaaaacactctcatttggtaagggagtgaacgttactgcagggctccctatcatacgcacttctcccgaccacggtacggcctttgatatcgcagggaaaaacaaggcggacccgtcttcttttcgacaggcattgaacctggctgctaaactcgccggaattcgcaaacaacaaactacctgatgcatattagagaaatggctaccttaaaggaaggccaataaaacacaaatacacgaaaaagtttacactagggccgtctggagatgcagggtatatagtgtaaggtggaagcgggcgccttggtcttatacccatgcctcgaggataaatctggtaaaagacggatggccagaataaggccacccgacacagaaccctttagtgttttggtgctttcgtggcctcctccatgcacgaaccaataatatgactagcatgaacagcattaaacaaccggaatacagcaagctggctgaggtctacgacgacctgatggaagaggtagactatgagctgtgggcgaatttcattgatgatatcatgcagatccatcaccccgaccctcaaacgattctcgagctggcctgcggtaccggctctctctccttctcgctggacgaactgctgtgttatgaaataatagctaccgacagatcgccagacatgatccgaaaggcacatcagaaggccatccggtacaacgccaatgttcaattccaggtgatgaactttttgaacatcagcctggaaaaaaaatttgatgtggtgttgttgttattcgacagcatcaactacctgcaggagccggaagatattcttcggctgcttgacgaagtgaaaaaggtacttcatccccagggcctgtttgtgtttgattttaccacgccccggaattcgatacaagcaataaaatacttacataacgaagaaggatattcacaaaataactaccgtttttttcgtaaaagctggtacgatgcgaaggaaaggatccattataacgagtttgatatagaggagctgggcagtgattatgaatcggtgctaaagcgctattctgaaactcaccgccagcgtatctacactctgaaagaaatgcttgacattattggtaaaacgaactataacatacttgcaatgtatgacggctttgaactggtagatgccagtgaaagcagcttaagaataaccatggtgctaacatgtccctgaatccagtaatagaacttaacaatataaccgttacttatggccaccggctgattttggatcatgtcaatttcagccttgggaatggagagtttgcctatctcatcggccataccggagccggaaagagctccttcctgaaacttatttatcgggacctgaaacccgataccggcaccgtgcgcgtagccgacatggatgtcacatccctcagtaataaacaggttccctatctgcgaagacgcctgggcatcgtttttcaggatttccacctcctccccgatcgttccgtctatgaaaatgtcgctttttccctggcggtgacgggtcagaagaaaagttttatcaagcaacgcgtactggaagtactgggcatggtggggctgagccacaagcgtcaaagtatgccgggcgatctctccggcggagaacagcagcgtgtggtcattgcccgggccctggctaatgagccgcgtatcatgctcgccgacgaaccgaccgggaacctggatccccaggcctcggcttcgatcatggagctgcttaaacaaatcaataacagaggtatgtcggtgcttatggtcacccacgactacaacaccgtccggcagtatccctaccggaccctcaggctgacaaacggccggctggaagaaataacttctaaagagttgtaatctatgtggcgtttaggtgttattgctgccaggaggcacagggtataaggcaaaagccggattcctgctttctgctttactgatactcataccagattcatttcatgatgtcgttatatgtgaatagtgccccttgctaaggggaagatagatggttatctggctctgttacttatccggtctcccgtcttccgtctttggtaagcggccggttctgtcagggcactataaaatggaatcggtataaatacgcaaatactcacacatgaacattaccgagcgcacccgaagagtcagagaagaagccctgcgcctgggctttgacgcctgtggctttgccagagcaggccgtctcgaggcggaggaacgccgtctggaagaatggctgaatcagggtcgacatggcaccatgcgctggatggaaaaccacttcgataagcgggtggatcccaccaggctggttccgggatctaaatcggttgtctcggtcataggaagctactatcatcccgatcaccagcgccaacagcaagagccggacaaacccaaaataagcaaatatgcccaggggcgcgattaccacaaggtctacaaaaaaaaactgaagcagctgtttgcctttaccaaagaactgctgggtgaactcaacgggagggtcttcgtggattcggcccccgtgctggataaagcctgggcagtcaaatccgggttgggctgggtaggaaaaaattcaaatatcctgaataagaatattggctcctttttctttatcggagagatgatagtagatgtcgaatttgtgtatagcacacaggtgactgatcactgcggtacctgcacccgctgcatcgacgcctgccccactaacgccatctatgaaccctatcgcgtcgatgccaataaatgtatttcatatctcactatagaacttaaagaacaaattccggaagagtatcagaaaaaaataggcgaatggatgtacggatgtgatatttgccaggatgtgtgtccctggaaccggaatgccaaatatggttctatggaagatctatatccccgcccaaagctactcgatcacgatatcaacttttggaaggagctggataacgagcagtacgactctctgtttgaaggcagtgctatacgccgcgccaaattcgagaagtttaaaatgactaccgcagtggtggcagggaatttagtagaaagtagaaagtagaaagtagaaagtagaaagtagaaagtagaaagtaga

SEQ ID NO: 4492 - DNA, 23423 bp, synthetic construct
  misc_feature 1..23423: note = Synthetic
  source 1..23423: mol_type = other DNA
tcgacacctcccacgaggaggaatgggagaccgattatcagcgccagctgctggcctgggccttggaaaagattcaacccgagttcaacccgcgcatttggcaggtctttgaggccaccgctttgctagacaaaccacctgaagaagtggctagcgaattcggcatgtcgaaaaacgcggttgccgtggccaaatcccgtgtcctgcaacgcttgcgcgaaaaggtgacctccgtcgatgcggagcagtgggaacaggatctgacaaataatcgaaatctttcgaaatcgaaagccgcggactgactagaggaagttgacccgccccatgcctgaccccgcccgcccccctgacgacgccacaattgatgcctggctggcgggaaacctatcccacgaggagtcggaggggctggagaaatactttgccgaaaatcctcccccggaggaaaaggttccggccgcgctgagcgagatagcggcgaccaccaccccgcccgaagaggtctcccagttgatgaagctgctgcgcaccatcggcccctccccgctgccaccggtcaggcccgggatctggaaagaaatcctcacccccagcgaggtcgaaggcgtgctgggcaccctcggtccctacgaagtgaccgatgtcattgccaccggaggcatgggcatcgtctttcgcgcccgcgacccggttctgaagcgcattgccgccctcaaggccctctcccccgacctggccggcaacgccaccgcccgcgagcggttcttgcgggaagcccgcgcggcagcggcactggagcacgacaacattctccccctctacagcgtccacaatgatcccagcccgtggtttgcgatgcgctatgtgagcggcgggaacctgcaggatgccttggatcgcaaggaagactttccgctcccccgcctgaaaagcatcgccctgcaagcagcctcagccttggccgccgcccatcaggccggcattgtccaccgcgacatcaagccggctaacatcatgctggaggaaaacagcgaacgcatctgggtctgtgactttggcatcgcccgcagcatcaccgatccctctctgacctatcagggcagcgtggcgggcacccctctctacatgtcgccagagcaggccgtgggcgaactgctggatggccgcagcgatctcttttcgctgggttcagtcctctatcactgtgccaccggtcgctttcctttcgctggcgaaaccagtgctgcagtgctgaaaaatgtcgccaagagcgagccaccccatccccgggtgctcaattcgaggctccccacctggtttgcgcgacttttggaaaagcttttggaaaaagaccccgcagagcgtttccccaatgccgaaaccctcatcgcggccttggaatccgagcgcgccccgattggaaaaaagaaggcgagacgacgacgtatcctactctcccttgctactatcactctagtagctttcggcctgctccaggtcccgcaggtccgcgaccaaaccaaccgcgctctggtgattctctccggagaaagcttcaccatcagagggcaactgggaacccacaaaacgctttcgggcgcgatccaagccgccgccccgaacgccacggtcgaactccaccgcagcgaggtgattcccgtcaacatcatcaccattccagcaggaaagcctctcgccatccgcgcggtccacggagcccgtcccgtgctggccaacacggggccgaatgcccacctcaagtccttttccccactttttctggaagggctgacttttcaaccaaaaaaaatggagcgcacctcgcccggttgcctctctctggtgggcgaacgtcacctcatccgcaactgcaccttcattgcgtccaccgcgcccatgaacgtcaattccgccgctcgtccagcagtcatccaatcgtccaatgggtcgctggtgcgggtgaaggactgccgcttccaattatccgaggcctcggtcgcctcggtatgggatcgccgcccccatgacaccaaccccgaacccagccgcatcctcttcaccgactccctgctcaccggctcgcgcgctctcaccataacccgggtggactcgaactgtggggtcgacctcggattcgagcgctgcctcgtttcgaccgatgcggtcatcatggaccactggaacgctcacctgaaacgcgttcgcatccgttcaaaagccaccaccttcgcaccccagcacgccttcatctgggcggcccgagaatcaccaaccgccgcagctgaattgatccagtggaacagcgagaacgacatctttcggctcggtgcagctttctattccaaggcaatcgttctacctaaaccaaccaaagggactctggtgactctgcgttcgatgtggacgcgcaaggccaaaggaagctttcgcaagagtcgcgacctcgagtttgcctttcctggcaacgaacctgatttcgccgctctgaccaccgcgctgaatgaggaggcgcctcccgcggccctcaaggccattgaagagctggcaccctgatttttgggcaagggctgagatttttcataaaaaggaagaaatcctgaaatcgggggaggactgcgggctagaggaggacaacaccttctttcatttcgccgcattccgaaagtgagagggccaacaacctcacaacgaccatgaaaaagctcctccagttcctcaccagcctgttcgtcgccttgctgacgcagcaggcccacgcggtccccaatatcatcatcgaaggtagtgatggtattggttggccaaacatcagtgacaatgacctcaaccccaatcaggtcgtcactgacttcgatagagagttctgcaacgagtccaaggaccgaacctatcgcatccgcaataccggaaaccaaaccctcacggttttcgtaaacggcaatagcccgagcagcacctcttcccagtttagtttcccgggttttccttccagcaacttcacgattgctgccggttcacaacgggtattcaccatccgctacacccccctcacccacggaacgcgccagacaacaatccgcatcgatagcaatgatcccgatgcggagagtgtctacaccttcgcggtggagggcgagggccgctgtggagaggcttcggtctattacaaccccacctcaggtggcgacttgctcactctcgacggtgacagcaccccatcgacatcagcgggcacgaatttcggctcggtatcggtgggctcggatattgagcgggacttctacatccggaactccagcgccgcgcccgatgtgctgcgcatccgcaatcctcggctcaccggtagcggggccgctcacttccaaatcgtcagcctgggaacttccaacctgggagtgggcaacaaccggaactttcagattcgtttcgccccgacaagcgcgggaaccaagacggcctcctttgtcttcgacaataacgacgtgggcgaaagtccttacaatttcaccatcaccggagtcggcaccgcctttcccgaaatttccctggagggaaagcgcgaccaatttggcaccaccttcgaccccatcaccgatggccagagcgttcccaacagcgcggacggaaccctctttgacaacactgcggtaggcagctcccgcgactccgtgatccgcatccacaacaccggcaacgcgaccctgactttgcagaaccgctccatcacgggaaccggcgcagcccacttcggcacggtcggattttccacggcaagcattccggcgggaggctctcgcgatttcgatatccgcttcaccccactggaggccgggacccactccgcgaccttttcctttggcaacaatgactccaacgagaaccccttcaacttcaccattcgcggcgtgggagaagctcccgaaatccgcatctcgggccgtccgaacgtgggcaccggaggctatgacaacatcgccgatggcgagactacggttcgaacttcggaaggaacagacttcggcagcgtccgggtgagcagtggctccaacaccaatgaattcaaaatcaccaacgacggaaacgatggcctcaacctctccaatccccgcatcacaggcagcggcgcgtcgcacttctccttcaccggagtcaactcggccttcaacatcgccgccggcaacgaccgcgagttcaccatcaccttcaatccctcctcgttgggaaccaagaacgcgaccttcctcgtggacagcaacgatcccgatgaacaaacctacagcttcgccctgcggggaatcggctttggcattcctgaaatccgggtgcaggggcgccgcgatgtcaccggaactttcctaacagaaatcttcgacaacgacacctccccccgcagcacggacggcaccctctttgccaataccgacgtgggcagcacctacaacatgctggttcgggttcacaacgatggcgacgacaccctctcgattggcagtcgcggcttctccggcaccgacgccaatcagttcaatacggcgggctttcccaccaatggttccatcgcgcctggtgggagtgtggacttccagattcgctttaccccgacttctttcggcacgaagaacgccaccttcaccttcgccaatggcgactccaatgagaaccctttcaactttgccattcaagcaacggcggaagctcccgagattcaagtcgccggtcacctgccgggtgaggctttcctcgatatcgcggatggcgacaccacccctcgcgaagcggatggaacggacttcggcgaagccaatgtcaccggcgtgggcaatgaagcccagcgcgagttccgggtctccaacctggggaacgtcaatctgaatattgaaagcggaacgaccatcaccggtcccgccgcaggcgactacagcatctccggcctcttcgccggcaacccctttgtcaatattggcgagggcaagacccagaacttcgtcatcaccttcgacccctctaccacgggagtgcgcaatgccacggtctctatcgctaacaacgacccggacgaagatccctacacctttgccctcactggggttggaatcggttcccccgaaatccgggtgcagggccgccgcgatgtaattggcaccaccctgaccgagatcaatgacggcgataccactccccgctcgaacgacggcactctctttgcggataccgaagtgggcgacacctacgaaatgctggtgcgccttcacaatgatggtgatggcgtcctgaatctgggaaaccgcagcttctcgggctcgggtgcctcccagttcaataccgtgggctttcccgccaacgggaccttggcgcccggggacagaatcgacttcaatatccgcttcacccccacctcattcgggaccaagaccgctgtcttctccttcggaaatgatgactccgatgagaaccccttcaacttcaccatcgagggtaatgccgaggcttccgagatcgaggtcctgggccgcggagtggcgagtcagttcgggcccatcctcgacggcgacaatacgcctcgggttgccgatggcaccgactttgacaccacccgggtcggcttcgatgagacctatcagttccgcatcgacaactccggcaacaaggtgctgcgcatcaccagtcgccaattcattggcgataccgagaacgaattctcggtcagcggcctgctccccatcactggagttcgcaccattcagcccggtgagtcccacttcttcaacatcaccttcgagccgaacaatgtgggggtggaaaacgtgatcttcgagctccgcaacgatgaccccgacgaggatccctacaccttctccatgcgaggcgaaggcatcggcgaccccgagattcgcgttcgcggactcacctccaccggactcccctttgacatcagcgacaatgacctcgaccccaatcaggatgtcacccaattcggcaccgtgaccctcggccaaaccaagacccgcaactaccgggtcgtcaacgacggcactgacaccctcagcatcagctccatagtcagcagcgagcccgagtttacgatcagcggcttgtccgccaatatcccggtgggtggtagcgatgacttcaccatcaccttcacccccaccagcacggacgaagtcgaaaccatcatcaccattcgctcaaacgaccccaccggacgcgacccctacacctttgccctcgtgggcacgggtgaagggcccgagatggaagttcgtggcggaggctcgaccttcagcgagctcattagcgacggcgacagcactccccggagcgcggatggaaccctcttcggcgaagtgaaccccaatggcggctccctcatcgtccccttccaaatccgcaacaccggcaccaccaacctggtcatcaacgacaagagcgtgcttggcgaccatgccagcgacttcaccatccgcagcctgtcgaccagtccgctgaatgtcaccatcgcgccagggggaacccgcgagttcgaagtcgagttcgaccctaccgacacaggaacccgcaatgccgtcatcgtgctggaaagcaatgatgcggatgaagatccctattccttcgcggtgagaggtatcggacaagaccctggtcttctgcccgaaatccgggtggtctccaatgccggcggtctgctcattgccaacggcgacagctcgccccgtctttccgacggcaccgacttcggcaccttgaccgtgggagaggccagcgcgacccagagctttgtgattcacaatgacggtgatgcggacttggaaatctacggtctcaccgtgaacaatgcagtgtatacaaacaccactccggcgaccattcctcccggccagcagcgtcccttcaacgtgaccttgagcaccgacctgagcggagtgcaggatggcgtagtctccatctttagcaacgacaccaccgcctcatcctacaccttctccatcacggcagagattgaggaagcaactggcgcgctcgcgattaccgggttcgatatcaacgggaacgacgccagtgtgacctttacctcaattccgggcgaaacctatagcatcaagaaaagcacaacgctggaggcaaacagctgggtcactgttcctggcttcggaaacatcaccggctccaattccccgcagacgatcaatttgcccaatattatcaacctccccaccgaccccaaagcgttcttccgcctcgagaagaacctttaaaacgcacgtccccctttcgaaggcaatccaaatgccgtctccgggaaaccggaggcggcttttttctttcgaagcagcagcctcagttgaagtccgccttcagcacgatgcgatgggcgggcttgtctttctccaatttgtcgaaagcctcgttgatctcggacatcggcatgacctccaccttgggcgcgatatggtgacgagcggaaaactcgaccatgcgggcggtgattccgggactgcccactggcgaggcgctgatggatttctgaccttgaatgagggcaaagacactcgactccaccttgggagcggcacccaccaaatgtagggttccctgcggacgcagcgcggcaacgtatttttcccaatccaactccacgttcacggtggaaagaatcaggtcatagctccccgccaccttatcgagttgagaatcgtcgcgcgagttgacgaagtgatgagcccccagttcgcgggcctgatcttccttgtccggactggttgaaaaagcggtcacctcgcaaccccacttattgagaaactgcaaggccatgtggccaagtcccccaatccccaccaccgccacgcggtccatgggagaaatattgttctgcacgatggggttaaagaccgtgatgcccccgcagaagagcggacctgcagcctccgaatcgacaccatccggcaatggaatcgcccacagggcctccgcgcgcacggattcggcaaagcctcccgcacggccgacgatggtgcctttggaatcggcgcacagattctgatgaccacccaagcacggctgacaagtcccacaggatcccgcgagccagcccaagcccacccgttggcccacctccaggtgagcgacagactctcccttcgcgctcactcgccccaccacctcatgcccgggaacgatcgggtaacccgtcatctcccagtgattcttaagcatactcacgtcactatggcagaggccgcagtagtccacgtcgatgtcgacctcattcggccccagttctcccagttcccagtctcggatggacagttttccttcggctgaatcggcggcgtatgcttggtatttcatatccccacccctcgacctgctttttcaccccgtcaagcagaaggaaacgctttcgctacagcttccccattgacgagcgtcttcccttacccttgcatctcgcaatgaaagcgtccctagccttactttcttttctcgcattgagtgcctcgctgcccgcgattacgaacggtccagatagctttgggtattccgtgactgattccagcgaacccgacggtcccgccttccatttcatcgacatttccaccaccggaagccgaatcttttttcaaggcactggtgacgaaggcgcgcaaaccgtgcaaatccccgctggcttccccttctatggcgagactctttctgcgattcgagtttccacaaatggctatctttccagcgacctgagtgacaccggaggagactacaacaaccgcccctcagtcccctttcgagtctttagcggaggtggatctcgcatctatgctctacacgatgatctggtagtcgatgagttcggagatttccctggccctgcgggaggagtcttctcgcagagttttgccaatctccccgaacaccccttcaaaagcgacaccgcagtcaccattattcagtggcaaaacgcgtttcacttcacgggactagggtcaggtaagttcacctttcaagccttactattcgctgatggaagcatctatctttcttaccccgaatctgatggaactttgcagtcgagccgagtcacagtgggcatccaaaatgcagccgcgacggtgggcgtgcttcattcagccaatgccactggcgcaatcatcgctccgcaggccatcgccttcacctatgaagaacccgtcccgcccttggtgatcactgactttgcagtaatcgatgcggcgagtggtgaagcttctctcacattcgagtccacaatcggaagcgcctatgtgatcgaaagctccccgactttggatttcgaaaatcccaccaccacagtcaacatcccagccagcgaggtcacgaccgaactcaccacgaagaccttcatcgcaacggaaaacagagacttcatcagagttcgcgaagtccccacttcttaaaggtctaaaatttttggtctaaggataccagttcgcagccaaggttgaattgcttcagcttcgacgacttccatgcccaagcgacttgtcgaaaactgatttcacgaatgcgcagcaaggattccaagccaatccttacacatactgtcttttccaataaagctcttcatcaaatgcgctgaactcttcttaaggagtagattagatcgaacttgattgccagctccctatcgaccgtaactagttcgaatagagaatcctccgaattgacgccttccatgcaggcccgctctcctttctgagtgaacaaaccaagggatcttgtaactcattaatttgaagcaagctaaaagaaaacagtcaattgaaagctttgcctaaataagctaaggagcttcttgaaatacattagcatatctatcggaaacaaaaaaaaggcgggatactccgtagagcattgcccgctaaatctgattattgctacgaaaagaacaacaagcagtgatcaattacctcgttcagttaaggctttattctttcccttgtcaagttagagtccctgttagatgaaaaattataccctcggactcgacatgggcgtcgcctcccttggttgggcatgcctctccatagaagaaaagacaatcgactctggtgttcgtatcttccctgctggcatggaaaaagaacgagatgcttacacctccaagaatctcaagcgccggagcaaacgtacagctcgccgccgaggttcccgcaaggcgaagcgcaagcaactgattcgacagattctcatagagttgcagtggatccccagtgaagaatgcgctcttcaagactgggaaaatctcgatccctatgagcttcgtcaccgcgccatcaacgaaaaaatcactctccccgaatttgctcgcgtcatcctccatctcaaccaacgtcgcggcttcctctcacttcgcaaagctgaactcgatgccgccgagggcgacgacaagaaagaactcgaaggactattgggcaatatctcccgcttacaaacgcaaatagacgaagccaaacacgagaccctcggcaaccacctctatcaactccgaaagaaagaaggcggcgagcacggcaataccattcgactccgagcgcggcacatccatcgccacatgctccatcatgagttttccctcatatggagggagcaagccaagcaccatcccgaactcaccgataccctccgctacggaagccacggcccacaagatgaccccaccgccgtcaccaaacccattccccgcaataaaaccgaatctctcctacaacaattcggcctcgaaaacctcaccttttttcagcgtcgcgtctattggcccctgtcctccatcggccattgcgaactcgaaccagacgaactccgcgccccagtcgctgatcgccgctttcaagagtttcgcatgcttcaagaactcaacaaccttcgctaccttgaccaatccagccccggcaaaccccaagagcgcaaactcaatgatggagagcggcaagttgccatcacctatctctcgaccacccaaaagcccaccctcaaagctctcaaaaagaaaatcaccaagctcccagatagccccgaggaagcccacatcaccttcaacctcgaagccaacaaccgcgaaaacatctccggcctccccaccgaaaacaaactcgccaacaccctcaaatccacttggcccaaactcgacgaagcgggcaagaaccgcatcgtcgaaattctcaccctacccgacgactccaattcaggcaaagtcatccaacgcactgatgacgagactcgcgaactcctcgaacaagtccccacgctttcccacgacgacattgacaaactcctcaagacctccctccccaccggctacggccacctctctgtcgtcgcgctagaaaagatgcttccccacatgcgcgaaggaaaactctatcagggaaagaaggacgaagaccatctctctgcccgccacctcgctggctatccccgacgtgacgagacctctagtaaatccttcgatatccttcctcacctgacccagctcacaaatcccagtgacacctcacactacgaaccccattttccacatctcaacaaccctctcgtcctccgcgccctgcacgagctccgcaaagtcgtcaacgccatcattcgcaagcacggcaaaccaaccgccattcaccttgaaatggcccgcgacctcaagatgtctgccaagaaacgtgaggaacacgccaagaaaaccaagcagcacgaaaaagaacgcacccgagccaaaaacgaactcgccaaatacaatgtcgcccctacacgtgacgccatcctcctcttccgcctttgggaagaacaaaacaaaacctgcatctactcgggcgagcccatcagcgtgcaagaccttttgggcggaaatgttgacatcgaccacatctacccccgccgcgccaatgacgactcttacctcaacaaggtcgtctgctttaccgagcaaaacaggctcaagggagaccgcctccctagcgagtggctgggcgaaggttccaccgaattcgaagcccttgcccagcgcgcccaagaccttccctaccccaaacgcaaacgtctacttgcggacaaactccccgatggattcgccgagcgcgacgccgtcgatactgcctacatgacccgtgtcgcccgacactacctctccaccctttttcctaagaaagaggaacaccgaatcttctgcaccaagggcagacatacagctctcctctgccgtcattggcagctcaacgatctcctccgccatgacctcctcgatctcaagaaccgcgacgaccaccgccaccacgccctcgacgcaatcgtcatcgccgcttgcgatcgctctcttttgcagaaagtgaccaaggaacttaaatacgaaaaccactggaaagacaaacaagacgaagaatccaaagaaaaaattcgtatctaccgactcaaaccccagctcgaaaacctagtctccccctggcccgagttccgagtcgcagccgccgcctcactcgacgcaatctgggtctctcatcggcccaaccgaaaagtctccggccctcttcacgaagagacaaattacggttctacgagtgaaccgggtattcttgttagacgcaagagactcgccaccctctccgacggcgaaatcgcaaaaatccgtgatgtgtcagtagctcatgtcgttcagcaatatctcgaacaagagaaaattctctaccccgaagacttcggtaaaaagatggatgacgatgtgcgggctcattttgagaaacaccaaacccttaccgagagcgacattcacgccctcgaaactgacaaccgcagattgaaaggagacctcctcaataaactcaaaaagaaaaatcctctccaagatgccgaactgggaaaaatcaccctccccaacaataaaggaggcgaagccattcccatcaagaaagtccgcctgcttatccccaacaaagctgccgtccccctccggcccgacggcaacgccaaagaactcatcatccccggcaacacccaccacgttgctatcttctcccttggcgacggcaaaagccacttcgaacccgttaccctcctagaagccagccgccggaagcgaaacggagaggacatcgtccaaaagcactatcccaatatgcccccggaagccgagttccgcttccacctaacttataatgattcaatcacatcggaaacaaacaacgaaactcgactgttcattttcaagggtattcattccatccagctaactgtgaagtttgtccatcactgcgatgcgagacaaaataatcaaaaggacccaataacaggaagagcagtaagtattcaaaagaccagctcaccgaacagatttgaagataattttcccaatgcccgcaaagtaatagtcctcccttctggagaaattcgagacgtcaactgagcgctagaaatggtcaaacacacccttgaaatctcccagcggcctgttcgtctctcccttcgtcaccagcaactcgtcatcaagcttcctaacgatgaaggcgaacgcaccttcgcctgcgaagatatcggggttctcattctccagcaccccgccatctcgctctcttccgctattctccatgccctccttgaatccggggccgttgtcgttatctgcaacgacaaacatctccccgccggactcctcctccccaccctaacccacaccgagctggtcccccgcatgatggctcaactccaagccgacctccccgcccgcaaacaagcgtggaaagccatcgtccgcgctaaaatcaccgcccaagccagcctcctagaggaccccttccgcaaaaaactccacaccctcactcaagctgtcaaatccggcgactccgaaaaccacgaagcccaagccgcccgcatctactggcctgcccttttccccgaccgatatcaagaaggcgacaaacgcgaccccgccagcgaatcccgcttcaacgccctccttaactacggctacgccattatgcgcgctgccacagcccgcgccctcgtatcagctgggctccaacccgctctcggcgtcttccaccacaaacgcgacaaccccttctgcctcgccgacgacctcatggaacccctgcgtcccctcgtcgattacactgttaaacaaatcctcgccagtgaagaggacattccatccgccctaacccctggaaatcgaaaagcccttctcagcctccttacccacaccgtcaccctcaacgggcaaaccggccccctcatggccgcccttccccgctacatcaacagcttccaccgcttactcacccgcgaaagccaaaccctccactctccagtattcgagccccaatggcctgacgaccccttctaattatggaactctcagcctaccgaaccatgtggatcattgtcctcttcgacctccctaccgacacagcgaaagcgaaaaaacaatatcagcgcttccgcaaggaccttctcgaagacggtttctccatgatgcaatactccgtctattatcgccactgcgccagcaaggaaaacaccgaagtccacctcgaacgcatccgctcttgtgtgccacccgacggcgaagtccgcgtctgtcaattcaccgacaaacaattctcccgcatggaagtctatttcggaaaacgcagaattaggaccgaagacgagccagcacagctcgaaatgttctagcgaaaaatctcggaaccgactcaatataagttaattccgagattaagatggtaattgatcactgcctgcagtcaatccgcagcggttttaaagtccttaataatctgccgcgcatggtaattgatcactgcctgcagtcaatccgcagcataactccccacttgctccaatcgataggtatggtaattgatcactgcctgcagtcaatccgcagcgcgctcgtcttccgacttgtgggcgtgggtatggtaattgatcactgcctgcagtcaatccgcagcgagcgagcggtaagggttcaccgtctcgtcatggtaattgatcactgcctgcagtcaatccgcagcgcaggggtttgaggagagtcactttcgagcatggtaattgatcactgcctgcagtcaatccgcagcagctcttcgatgatcaccgaaatattatgcatggtaattgatcactgcctgcagtcaatccgcagcaagataggctagaacatggtcccaccgataatggtaattgatcactgcctgcagtcaatccgcagccctaattggtgttcggttaaagtaatcgctatggtaattgatcactgcctgcagtcaatccgcagcgggccctgctagatcaagactgcattagttatggtaattgatcactgcctgcagtcaatccgcagcagcggtcggattgcgtctctatgcgcgggaatggtaattgatcactgcctgcagtcaatccgcagcacggcggccttgtcgagggtttcggtgaccatggtaattgatcactgcctgcagtcaatccgcagcgacgacgctgtgtcctcccatcacccaggcatggtaattgatcactgcctgcagtcaatccgcagcgctcgcggtcttcacgctttcggcgctgttatggtaattgatcactgcctgcagtcaatccgcagctcgtcgtccaggatgacgggaaggccgtaaatggtaattgatcactgcctgcagtcaatccgcagccaggtttgaataacgaatcaattccgtccaatggtaattgatcactgcctgcagtcaatcccgcggacctcgtgaactcgatagaaaaattgccattcgcagtttttaggcccccactaagggaataatcacctcttctaatcctccttccgagaaactaacaatcctgctcgccatcgatccccagcacgtcaaaaaaggcgggccagattttgcggaagagggagtttttcccgccgcgggaaagctgttcggcgacgagctccacctttccgtcagggtctgcaggagcgacttggctcagggagtgatgcggtgcgtggagctccaggctgagatggctatcggcggccttgcggctcacttccacggtagtcttgccatcagttagcgagactagagaaagcggcgcatacgactcttcggtctcccactcgacgacgatttcgcggccatctttggcggcaaacacaaatcgagtttcatcccgcgatacgaatgcccaaccggcctgggttgccagccacgcaagggtcaaccaagcgctcgtccagtgaccaggctgccctgcaattttcactgagttgactttctcgagcatctcctgagccaaaggatcgtcgaacaaaccggcaatccccaaacggaaatgataggtccgggtccaggccaagtcctgcaccgccatctggcagcgcgagtcctccaccgcatcgcgcagacgagcaaagcccgctggcacatccgaccactcggcggagtcgacgatgaagcggctagtgagacgatagagcctttcctcaaacaagtccgagagctcaccctgccaccagaagaccaatggcaaatcactattcagattggagaagagcgtgttgcgcatccggccgatggcctttcccttcaagcggaaagaaagctgttcgcagcagacggtcttgcgcccgtgcgcgaggtgacaatgggccgtcacccaggcctcgatctgtgacttgggagcgtcccgttgcatctccacgagaatagcccgacaggcatgctcgcgagtgagcgcgaagatcgcttccgagttctcttccagagcaccggcctgctcggaatagatcgcaaagttcatcaaagaggcattggtggcggcttcatccgcctcccaaatcttcttcagctccttaccgatggagccgacttccactggctgtccaaggttagcactcatggtctacagtctcctccattctcttccctcgcgacccagcatctcgtcggcctccttcggcccccagctgcctgcggtgaactcggtcatgggcggcttgttgtcgctctcgtgccaagcacgctcgatgtggtcgacgaagcgccaggcctcctccacctcatcccgacgggcaaacaaggtagcatcgccagccatggcgtctaacagaagacgctcgtaagcctcggggctgctttttccaaagctggaagagtagtggaaatccatcttcaccggctccatgcgcaccgccgcgccgggcagcttggaattcatgcgcagggaaattccctcatccggttgaatccgaatcacgagaacattcgctcccggcacaccgccaggcacggcattgaagaggacaccggggacgtctttgaagtggatggaaatttcagtagccttcttgggcaaacgcttgcccatgcgcacatagaacggcaccccgctccatcgccaggtgtcgagcatgaccttcaccgccacgtaggcctcggtctcgctctcgggattgacccggtcttcctcgcgataaccgggaacctcttccccgttgatgtagcctttcacatactgcccgcgcaccacgttctccgctaccttctcgggagtgtcccactgacgcatcgagcggaaaaccttcactttctcatcacgaactccgtccgcgctcaggtcggtcggaggctccatcgcgaccaggctcagcaattgcaagaggtggttctgcaccatatcgcggagagcgccggacttgtcataatagcctccacgccccccctccatgccgaagtgctcggcgcaagtgatctggacgtggtccacgtagctggagttccaaagcggctcgaaaatggcattggcgaagcgcagcaccataatgttctgggccgtttctttgccaaggtagtggtcgatgcgataggtgtccttttcctgaaaagtcgcgttgaccacttcgttgaggtgttgggctgtcgcgaggtcggtgccaaagggcttctccacgatcacccgtgaccagccgccctccttggcttcattgagaccagcccctttcaggctttccaaaatatcatcgaagaactccggggcactcgcgacgtagaagagccggttgcccttgcctcccctctcgctatcgatggcgtcaagccgctccgccaatcccttgtaaccttcctggtcggtgaactcgctgcagtgatactcgatggattccgcgaacttagcccagacttccgggtcatgcccgctgcgcgagacctccttgttgatcttctccaggctttcacggaaaaactcattcgaccaatcgcgacgggcaaaaccgacgatgcgaactcccggcggcaactcgccatcgactgccaaattataaagcgctggaatcaacttacggtggttcagatcgccggtcgcgccaaagatcacaaccgtgcaggcgtccgcacgcaaccgtgccaccaaatcatctcgaaaaggattactcacagccctcttctttcaataaatcaccgcccgatcaaaacccaaatgaaccaatcgagcccacattgaccattaatttcattcatccttgaaaaatagtcccatgaaccggctattccgcaggtagttttcgccgtggccgcagctctacaacttggcggccccccagagcttggaatacttttcgcagtgaatgattacgctcttgtatttggagaggtcgacattcgccggcaaggcgtagctctggtcacccttggtggttttcaacttggcaaccaggagagaaccttgggtcgcgtttcgggagctcaggtctgcaaccgtgcgcttcgagagaaaaatcttcaggtctggcgcagtcgcggtcttgaagtccttgagcacaaggactttcttcccaccctgttctttgatcgaccaggttccgttgatggtgttcgccttcttggtccaaacgcctgactggccgaaggcaatgccgatggaaaaagcgagtgcgagaagcgagagagcgaaagtcctgagtggtgaagttgtcattgggtgttccttgtttcagtgggacgtgcctacccttgatactattccctctttctcgaatattcaacgaatcccgcgtaagacagcccgcaaaggccccggatatccctcgatagtcttgctatgatccgtggggtccaggaattcggggagagactggaacttcatccactccgtcccccgctgctcctcaacagtcgtcaccgagacgtcgagcacttcgacttcccggaatcccacccgcttcatcatgcgggccaagagctccacactggggagaaaccagacattgcgcatctgggcatagcgcccctcgggcagcagcacagtattctcgtcgccctctacaaccagggtctccaacaccagttcaccgcccttcacgagcgtgtcacgcagggcttcgagatgctccacgggcgacttgcgatgatagagaactcccatggaaaaagtgctgtcaaagcacccgagcttggcaggcaggtcttcaatccccagcggcagcaccccaaggggcaaatcctctccgccaaaatggcgtgcggccaggaactggcagccaaagagcatggaggggtcaattcccagtgccagcgatgctccctcgtccagcattcgccagagatgatatccattgccgcatccgacatccaaaatccgtcgctcatttacgggagaaattttctcccgcaaacgctcccacttccaatccgagcgccactcggtatcaacgaacaagtcaccgaactcaaacggccctttgcgccagggcgagagcttcattaaaacctccttgagttcaccggcatcagcctgggtcaagaaatggagccgtccatcccgcagctcgtagccgaggccttcgaagcgctgcaattctttcaaaaccgctcgccacctcggcaggtccccatgaccttcaccagagtattgccgcgaaacctggacgcgtagagacgagagccagttctgctgccccattcgtgccaactccttccaaacacccggaaactcaatgctctccccactctcagctccagcagtcgccgctttatcccccgtgatgacctcacacaccaaggccggactttcccccaagcgatagtggaatctcaacgactcaccggcagacaaatcccccttttcaatctcaagctcccgcggactcgtgagaccagacgcataatctgaaagcacatgctttccgaaagtctgaatccgcgtaaagagctttggctgcttgttgcccagctcgcaggtcggcaactggacttccgcagcgggcaaagtcccgccctccaaggaacgccaactggccaatgagtcgcgattgagcttaaagacggcgccaacctcgacacggtcccgcgactcattctcccccgcgaatgcaatctcacgcacaaggtctacaaacttcaactcgatcgaaatctcttctggaacaaagagtgcccggggcgcctgtcgaaagagatggcgaaagatggccacctgcggttcagccttcaggcaagcctgcatggtctcggacacgatcacgtcagggacccaactactagaaacctcgtagttcaagacatcccccaacacgtagtccactaccgactcatcaaaccccagcccctccacggtctgtcgggccgattccaaagcttcttcgctgatatcagcaaacacaaactgacaaacctctgcaccaaaaaccgagagcaagggcacgaccaaagttccaaagggaccacacccggcgtaaagcaccttcaccggcctcccacccgccgtgtcgccagccgcgataacagcctcgtgaacccctcgaatgaagacgaccgtgcgggcataatcctccacacacatcgcagccatgaccggagaaacagccaggccctcggaagtccagttctccccttcaacgatatcatcccgctgcgtgaattgacctccagccaccagcctgaagacctccaaaacctcgagaatcagcggccgcaaggtgtaaaccggaacgtcttcatccaagattgtggaagtcagcgcgcgaagcttctgagagagttcagtcatctgctttcctcggtaaaagaaaagagggctttcaacaagaacacaatgaccaccctcaaaagcggcgagctctttcaccgccaacatctgcgactactaggaatccagtagttcggagatcgtttcggccgggagcaggtaggtaatgacccgtcccgcacgcgcgagcacgatgcccaacatgcgaccgttctggtcgacgacaggcagccccgtttccgagggagagatggtcatatcggtctgcaggacgctcggaaagcggtcgcgaatcctgctcagcccccgctcatccatcgtattcatcatccgttcgcgctgactggtgaagtcaggcatgaactggcgcggcttcaaagtcgccaccaattcgagaggaccggtgcgacggcgcacgtccagacgcacctcctgattggccccaattcggctgagaaccgtttgcagctccttaaccccgccgatctgacgtccattgaccgccacgatgacatcttccacttgcacaccggcttcctcggcagcgctgcctctttccacgctctgcaccaaagttcctccgctgttataggcggggtccaggcccacaccgagaaatcctcgagcactttccagaaggctcctcttcgccactgagactactccaatcccctccggaatcccatcgggccgcaccgccgcaatcaaagtccccgccactgccggagcaccaagcaaaccgatgggccgcaaattgatatccgcaggcagcttgaacacgaccaagtcatgggcggcaaaaatctcgagcacctcgagcgagaactcacggccatcggagtcgacccccgccagccccttggccctcttcacttcactccatttcgccaagacccggttcccttcccatacagtgccgaagcccacttgccgcccgttcgcgaaaattctcaccaccccatttcccagctcgtcggtcacctcctcgaacgccccaaaaagttccgcagcctgcctatttaaattcgcctgtccctgctccgttacaaagggcagagcgctgacccgccccagcttgactcgcgtgatgagctcttcctgcccccgcagaaattccaagaccacttcatcccccgcgtcgaggttgcggagatactccttcagacttgctccactgacaggaacgccattgacactccgaatgatgtctccagcccgcagacctcccttttccgccgccgaatccgccagcaccgcatccaacacaacattgcgtccatgcgaatcgctattgaacatcacgcccagcacgggagttccttcatcgaggctgggcggtggcaataacgtgccccacctgtctccggatttcagccgctcccaatcggccaggaatccgctgatccccgcgtgggtattagtctgcacatcctccccaatccacgagtgaatgcccacgacctttccttccaaatcaaataagggtcccccggaatctcccccgaagagcacgcaatcgctgccgatgaagtagtcgatactttttgagatgattctcccaaatcgaaccggagccgcgcgcaaggcatcatagccggaagggtggcccaccgccacaacccattccccggggcgaatggtcgcggaactacccaagggcgaaaacgtccagggaccaggccctaacagctggagcattgccgcatcctgcttgcggtggattcccaagactttggcgcgagcttcctcgccatcgtcaaaaaggatagagacctctttggccacttcgccagtatccagattggtcaccacgtgacctgcggtgaggaccaatccgtccgccgaaaccactaccccgctgcccgtggaccccatcgctccgacctccaccgtggattgtcgggcacgctcgaccacaggcaaaatggcagcctgcaagtcgcgcaaaaccacctcgccgagagcaacgctgcagctcaggaaaagggtcagcagggaaagaattctcattgcttaatttcgcttcggttttgcaaccgtcaaccccgcccgctatcgcaatttggcagccaaggcaggattcagcacgaagctccccttaccactgcttttcaccgcaccgccttcgggaacggtgtattcgaatacagcgggaatcttcacgccaggcttctccgacatcagatagacacgaatggtcaatggctccttccccgtcgaaccaggaaggctcttcaccacatattcaacttcgttgtttccgggactagcccctccgataacgacctcggcctgctgggtattggccagcacgtgtcgactccggcgattgacctgcaccgtgacttcgcgtcccgggcagtaggcatacaccttggcga

SEQ ID NO: 4493 - DNA, 23366 bp, synthetic construct
  variation 13900..15179: note = note, n is a, c, g, or t
  misc_feature 1..23366: note = Synthetic
  source 1..23366: mol_type = other DNA
ccagagaaatagctggagtgagatcccagcatcacgcttcaggaatcaacagacgttaaacagcgtacttacacacgacgtatggcccgctattggaaagaaaagctcgataccaccaagcacagagatttcatgagtacagtacatattgatggaatgcccctatatccacctcgagacaacctgttagataaatgggtttacttcgcagaagccgacggccatcagctccaatttatctctcgcgatcaagtccaagaggcactggactacttctcacttaagatccatgcctcgaccatgcatgaaggcatcgatctcgagcactattggcagtattggcacgagagactccccaaaggaatgcatagtcaacgcagcaagaaaatctggatccccacattgcagaaactcctatcggccattgatacagataaggttcaaactcgcttgtcttgaccgctctcattacgagcttgtcccagaagaagatcgccgtaatctagcagacaggctcaatggccatatccattaacccaatctaacaaagaaccaacccatgagcaaagaacgtcaatgcccctgctgtggatcagccaagctggagcctggaaaagtccagtccagcggcaaagtttatttccgcccggagaacaccaagttcctcacactcggcaccaatgatgtagaactctctgccaacctctgcatggactgcggctacgtgatgctcatcggtgacatgagaaaagccaacaagctcctcaacaagtcccaggcgcactagaaaacttgcgcagagaatagtatccccatggccacgtcacccttcattcacattcactcacgaaagttccctattcaaccagaggaagcagatgaatcagtgaatgagggtatctacgggaaagctctcgcagactatcttgccgaacagttgagaaccagaggctaccaagtacctttcacttgtggcgaggactggggatggtgggtcgaaatcctaggacagccctactcgttaggctgttgtgtgtacggtgcctctgacgcagacgaaaatccagaactctgcgtgaaaatcagccgcgatcctgaacggaagtggagcattctaaagttccgcatgatcgatacccacgctcgtgtaggaaagctccaagaggacttgaaggcaatattcacagcagaccccgatgtcaaaatgattgggctaagcgaagaattcccactctggcaataaggcaggcctgaatactttctacttcccgctgaaccctccccttaggagcccctctagctcaaagggacacaccaatcagcaagtttcacatcatgacaccttcaccacttaagcttctcatcattaccctcttatccatcagcctgtgcaaggcggacgacatcaataaggcaaacaatctagcacgtgaatactgccagaaggaatttgcctacatggggagctatggagagcgggactccagagtggttcatggaaagatgtacctgcacagaatgctcgaactcaatgacgccaagctcaatgcttactacgccaagcactgcatcaatcaggaaatcagaatgtaccagaatttcctcagcaccaaaaaagcgtggaaaaatgcaaatatgaccgtggaacagcagaaagattttacgctgatcctcgagaagctccaacgagacttggctatcatcgagaaacactatccaacggactacgacgtgttcgataaattgcccaagccacctttccctaaattatctccagagaaatagaagtaaaagaagacggcaccgccctctggtacgtgtacctgaattactagctcccgacctccatgtgcttctggccttcctccacccctccagggtggtatgggtgggggtgacctgttcccggggtggcgctctcttcgctcgctgaccccgcgctaccctccatcacccctccggggtgtaagcccgcaggctagccacaatcagtcatcagtaatcaccaattagtaatgccccgcaggggctccatcgtgccagcaatcattcccaatctgcgtaatctgtggctaaatttgtttcatcaggcgggcctttatcctacccgctttttcctccacactccccgcaggggctccatctaaccagccttccgttccttctgtgaattccgtggtggaatccgtttcatccagcccttactcgcgcaattcgtggttagaaattccctcgtcaaatccccacccaccacgcacactcctttgcagatcatagcatcatcattcaccttaaaacacctaacatgaaaaacctactgactattgccgccttgttgtccctaagctgctctctccacgccaaggagctgaaagcaaaaccctttcctagctctgacctagcttcctacctcaatctctacgcagcctcttttgaactgacagcatccggtaagcaagaatcattcggatcacggatcgtggtctatctggatggcaaagagatcgcctcaagcactctcagccaagacgggactggtgcggggaaacgcgccaagcaggagtactcgatcgtgctggaagacaacgaggaaggcatcaaattctggattcagcacaataacgctagccgtcgcggcctcttagaaattcctaagaagcatcgcccagacacgtttctccccactcccgccattaacaaggacggtagcatcaccttcgctgtaaaagacactgacaatggcttcaacgatgaagacatggcaccaagcacaggccatctcgtcatcgtactggagaccaaggaaagccatgaatagatgcctggaagccaaatccccagccaccacgcacattccacaccatgctgtctgaggatgaaaaatggttcgctgtcagcctgcgtttcgtaggggatggcctggaccccaccaagctggaagccctgcttggcatggcgcccaccacggtaagaatagccgggcagaaatggagcgggaagcaaggccgcagctatggccccgcccgcaccaatatctggagctaccgctcacccacccccagccatctgggattcgaggagcaaatccagtccctgctccagaatctctcccattgccaggatgccatccgccagcttgcccagtctgaccaggtggaggctgagatcttctgcagctacagcagcggcagtggccagggcggcgataccctcagcacccagaccctcgcccaactggcaggcctaggcctctcactcggcctggatctctacccgcccgatagcgagcaagtcacccaggacgatgctctctaacatttctaccactccacccatgcaaaagacattaccatacacgatggcaagcatgctttgctgcgtggccttgctcactctaacaggatgtaaccagaacaaaacgtcttctcaaaccgaggtgagccagaaacacatttctccagagaacctctttcgtgaccggattgaaaatgatcataaaatcgtatttgcggatacattaatggttggagctggaggttcaaacttcgatagtatcgagttcttgttctatcccggctcaaaagtcataatgaaatcttatgcatatagcattgtggaccattcgggtacttaccagctagatcaaaatcaggaactgaccattcacatccctaaaatagatatccctaccttggttctagcctacgataaagaccgactgatcctaaagcgcaaagacgggctaagagaattcaagggatactggaacatataccccgaagccatcgagaagctctttcctctcgaagaacagcctagagacacacaataagactcaagccttcctccacccaagcgcccgttgggcttgttattggttaatgcttatttgttaatggtccagccagatgaaacctccgcgacccgcgtagagatgcccttaagaccatcatgctaggtttcatccagcccgtattcgtgagattcgtgcgattcgtggtaaacaaggcgtcttaggtgttacgttttagatgttaggagatcgactagccagaatcagtcatcaccaatcagtaatgccccgcaggggcctaccccaacggggttccggaacttagccaggggttgcgagccataggatcgctacccctggaactcattccaaatacaatacgaccccaacgcgggtcgcgcatgcttcatctagccgggctccatcagcaagggcttcatccagcccgattcgtgaaattcgtgcgattcgtggtaagagaaaaatacccaccaacagccgcttcatcgtactggactgcatacttcacactgaacactccccgcaggggccaaccttctggtacttccgtatattccgtggtagaaaatgcttcatctagcagcctttttcctcttcaaagataacaccatgaagccctatctgattctcctcctctgcctcatcctaaccagcgccgcgcactgccagcaggcgcagtcctatcaccaggcccagcacggcttcaacggcggcctccaccgcgtgatcgacctcagccgtcaggacggattcgtgcaggccaaaacgctggatgatctttccaagctggctcacaaggtacccggagccatcggcttcaccgcgcatccggattttgagaaaggcgtgcgctatgcccatgccatcctctggtacgaccgcctctcccggaccaatcaatcctggccgctctacctcttcgaccaagaagaagcgcggaagcagcccggtgacgacgccagcaagagatcccaggcagccgcggaagatgccatcatcagcgaactcctcgtcgcccagcaagccatcaacaagaccgggcaggacggtatcatcctcacagggaaagaacatgtcaccagcgtgctcgcctatgccatcgtgcggctcggcgggaagatccggcatcacgggcgcttcggagcggcctgcaccggatgccgcagcgtggtccccggcggcaatacccagcattgcggcaaggccatccaagggatcgaacactggagctgctgcggccaagccaaacagaaaacattctgcaagtactgggaactcagatacaagacctacctcgaaaccagccccaaaccataggccagactaagagcaaatcactctagcctgcctttttcctttctccttcatccatctcacttcaacaatccatctatgcctcaagactacgaactcaccccgcaggaaaacagctacatcagccacctgcgttccttcgccgccgtggccgactggcgcatgaccgcgctcgatagcactggcgtggaattcacccgcaagaagacctactccaactccaccctcattgttggtggcattctcctcctcgccgcaggtatcggccttctcctgcttatctggggcatcttcgaatacctctgcaagagtgacgagatcctcttcatccccatgcaggacatccgggaaaaatcggtcgataccgacaagttcaagtggaagtgagccccgctactcaaaacatggataccccagaaactatcacacttgagtacgaagctacgcagactcttgtcaataaatccgcctctcgattcgtctggcgaaaggctgggccttggttaattatctttgccttggtcgcgctgggatgcctgtcagctctgatcatgggtggacgtgactggtacctctttgtggggttgatcgttcctgcctattatatcttcggatggagcaggtactactacctggccgatacaaacttcgcggttatgactgaccgtcaagtcaccatccagctcaccgaggaacatctcaccttccatacctctcagcaccaatcgacaatcaaatgggagctaatcaccggcgtctggaagtttcgcgatgtctggctccttttcacctacgacatggaccactacacgatgattcccaccacgatcctcaacaatgagacaatccagttcatcgagtccaagataaaatgaggatcatccgactcatacatgtttcacaccaacatcatgcatccacgttacaaggaatggttagtctatctctttgaacacccggtcaccgatcctgcctggcactgggatctggacgccccggaatttgacggtagcaatgaggactttgccattttgatcggcgatacttttacccatagcggcacagacctactaccctatagcgatgcacaggtaaaccaaggtctctggttcctgttatctacagcctgttcagactatttctttgctctgaagtctgcagaagttccccttgagacacgacttgcctccatccgctctattatcaggctatatcaggactgctttatgcggcgttgttcgcgcacgctcagccatcttgatcaagaatcccagagtcccctcaatgccatatgctacatgttctgggatatcaatgcacttggttacacaggcgatgtagccgaatcccgggagacagatgactgtattttctccgtgctcgcacagacactccagctcgatcacccggcgtgccaggaagccgccatccatggctacggtgaactcagctgctactatccagagcgctgcatgaaagcgatggacaactatctcgctggcgagatcgacagccccgaactacgcagctatgcggagcgcgcccgcacaggtgacattctctaagaatccggctgaccaaactccacaataataatctagaagcctacgaccagcacacctttcccctaaaccacccacccgggtggtttttttatgcccgggttctatcccaaagggagcacgatccttcctccacccaagcgcccgttgggcttgttattagttaatgcttattcgttaatggcctgccagatgataccttcgcgacccgcgcagggatgcttttaagaccatcatactgggtttcatctaccccgtattcgtgcgattcgtggtaaacaaggcgtcttaggtgttacgtttaagatgttaggagatcgactagccacaatcagtcatcagtaatcaccaatcagtaatgccccgcaggggcctaccccaacggggttccgcaacttagccaggggttgcgagccccagggtcgctacccctggaacccgtccaaaaaagaacacgaccccaacggggtcgcgcatgcttcatctagctgggtttcatctatcccgtattcgtgagattagcgccattcgtggtaagagaaatatacccaccaacagcccgttccatcgtgccagcaatcattcctaatctgcgtaatctgtggccagaaaagtttcatcgtattagactacatacttcaaacttcccactgaacactccccgcaggggctccatctagcccgcacaggtgacattctctaagaatccggctgcgccacgcgtttctcctcatgaaccgtgactcagctaggtaacatgaaaccactcatcttccgtctctccctggtagcgatcggggtcgctctaggactctacctgtccacctggtaccagcgttatccggcctacagccacggtagcgtcacgcatttctgtagctgcatcgaggagaatccggagtaccagaatgaagtgctcgacatcacctaccagatcaacgctgccattgatcagaaaacaatagctttcgccagtgagcatggaatctccgctaccgactttcgggcccgcatcattccccacggcaatggcaactatgagaaagtcctctggtgctctaaccgcactgacaaagtctacgagctcctgcccgcctacggggaactcatccaagaatgcttccaaccacacgacgccttcatggaaaaaatccacgccgaaaaattccagtactaagccatctaacaaacaacaccaaacgaccacccgtacaagcgcccgttgggcttgttattagttaatgcttattcgttaatggtcctgccagatgaaacctgagcgacccgcgcagggatgcttttaagaccatcatgctgggctccaactagcccgattcgtgagattcgtgcgattcgtggtaaagaaagctacccatcgacagcccgctccatctagcaggaaatccattcctaatctgcgtaatctgtggccagaaaagttccatcaagcaggcctgaatactttctacttcacactgaacactccccgcaggggctccatctaaccagcctttctgtcacttccgtgtattctgtggtggaatccgtttcatccagccggaatcagtcatcagtaatcaccaattagtaatgaccccgcaggggctccatcaatcacagggcgtggccatgcccgtttgctgagcggcctgtacgccttgcaggatgtcctcggctagcacccggtctagcgagagctctggcaggtctgccgggtcaaagaaggcgatctcggagatttccgtattctccagcgcttcaccacccgtgaccttggccgtgaagaagagcttgtagatgctcaccggatatttcggctgatagggatgcctgtcacgatccttcagggcatagagacgccctacctccacctggtagccggactcttccagtacctcccgggtgatgccctcgatgggcgattcattctggtccgcccacccgcctggcaatgtccagcggccgcatgcccgctccctcaccagcaacaccttgccatcctttaccacgcaggcgcgcagatccaccttcggggtggcgtagccttcctccggaaagaaaaacttctcgatctgctccgtggaggcatcgctctccatgccataaagctgagtagcgatttctaacaatctttcgtagcgctcacggtcataggcatcccgtgtgtagtggagccccgtctgtgcgatcgcacggatctccctgatcagttcatgtagcatcctattctccgttctaacaaatatggttgagtcatctaaagtcttagggtttacgtgtgaagtcccaactagccaggttccatcccgcccgtattcgtgagattcgtgccattcgtggtaaagaaagcttcatcaagcaggactttatccttcccgctttttcctccacactccccgcaggggttccatctaaccagcctttctgtcacttccgtatattctgtggtaaaatccgtttcatcatgctgcccaatgactcatgacccttgaccgatgacgagcccttgggctcctcatttcctgcggctggacaccacgcggtaggcacgcaccttgcgctccacctccagctcatcggtgtaggtgaaggaaccatcctccagcacccaggcgcctacctcatcgccatcgacgatcggtccccagtcgccacggatcagcaccggctgctcgtactcagtggagaaggaccagcgggttcccacctgcttggcacggccgaaggcattcgtctcataagtgggcacctccacgccgggactcatccagcacaggatgccctgatcaaagctacgcagcactttcagctggcagggcatcttctcacgctgctcctgctcggacagctccttggcgatgcgtttctccagccgctggtcgagaatcagctgcttcctctccttgcccgcctcgttgtaggcattcagcgcggcggagatctgtttctgtttttcctgctgctgcttgcggtaggcctctgccttggccgcatcaaagccgcccagctgcttctgcagctcctccggcagcttctcgtagcccaccttggccatgccctccgcatgcatcagcgtgatgccatccggactcaccttcgtcaccgtcaccgagcgatagcctttgccatccttcagagtcaacaaatcaaacttctgcggctctgcctgcaacggcaacaagcccagccctatcagcggaattacaaaacgaaacatgcgccaaggtaactccagaaaaagccgatttcaacaccgtagatccgaacaggctgttcgcttccccatgcttggaacaagtactccctaaaaatgagcaaaaaaaaggcgggatgctccgtagaacagcgcccgctaaatctgattattgctacgaaaagaacaacaaacagtgatcagttaccaaacgcagaatatgcttggacagccgcggggtcaacctataaatgttctaacatgaatccttccaaatatactctcgggctggatatgggtgtcgcatctatcggctgggcagtagtctctcaagaagacaaatttatcgactgcggtgtacgtgtctttcctgcaggtctagacaacttcaactcagccaaggaaaagcacccgaatatggacaggcgcagcgctcgtgggatgcgccgccgtatccgccgcaaagccgagaggaaaaagctcatcaaagggattcttcaacagctgggctggatgcccaaggaccccgtagcccttgaccagtggatggccatggatgtctatgaactccgttcccgtgccattcatgagcagattagcctcgatgagctaggccgtatcatcctccacctgaatcagcgccgtggcttcctctccctgcgcaaggccgaggaagacagcagtgacaaggagacgcagggcatgcttggggagatcaaagaattccagaaagagatcgatagtagcggcgcccagactgtcggcaattatctctaccagatctatcagaaagaaggcatccacacgagcctcagaaacaggaacaacaacagacggctgaaccgctccatgctctaccatgagttcgacctcatctggaatacccagcaggcctactacccggataccctgacggagcagctacgctacggcagcctgggtaagaaggaaaagccgaccaaggtagtcaaacctgttccgctagaggacggcaggaacctactagaccaattcggtatcgagaacctcaccttcttccagcgcaaggtctactggccagccggttccatcggtcaatgcgaacttgagcctgaggaaaagcgggcccccgttgcagacagacgtttccaggagttccgcatgcttcaggaggtcaataacctccgtgtcctggatgactctaacccgcgccatcctgaggaaagaaaactcactcctgaagagcgcaatgcaaccatcgcctacttgactgggaagaaagaagtcaccttcgatgcgctgaagaaacacctctgcaagcaccgcgcgctccaggcatccctacctgattcccccgcccagctaaagttcaacctcgaggcgggaggcagaaccaaaatttccgccacccccacagaccataccctgagcgcccgaaaaacgctggctaaggattggaatgccctgccggaggacacaaagaaccgcattgtagaaatactgaccgctcctgcggccacggatgatgacatagcagaaaatctgtcgactctctcagaacttacagatgatcagcgcgacaaactcctgagaaccgtccttccttccggctattgcaatctctccgtcgtggccctagaaaaactccttccccatatgcggcaaggcaaggtctacatggccaaggatcagtcggactccgccctccacgccgctggctataagcggcgtgacgaagaacagacctccaccttcgacctgttgcccaacttcgcacaactgaccgaccctaaaagcagcttctacgatcctcaccaggtcatcatcaacaacccggtagtcctgcgctccctcaccgagctgcgcaagattgtcaacggcctcatccgcaagtacggcaagccgcacaagatccacctggaaatggcccgctcgctcaaaatgagccccaagcagcgctccgaacaccagaagagaaacagacaacacgagaaggaacgggatgccgcccgcaaagacatcgaaaagctgggcatcatccctaacaacgatgccatcattctctaccgcctctggaaagaacaggacaagctctgtgtctactcagggaaacccatcagcatttcccagctcttcaatggcgaggtggatatcgaccacatctaccccttctcgcagtcggcagacaactcgctgtctaacaaggtagtctgcctgtcacaggaaaaccgggacaaggggcagcgcctgccctatacttggctggcccatagcgatcctgaaaagtatgaagccgccctccagcgggccaagaaacttcccggcggcaagtacaagcgcttcatcgcccagcagatacccgagggcttcgttaaccgggacctcaatgacaccgcctggatggccaaggccgcccgccagtatctctcccacctctttgagcgcccccaccacatcctctgtaccaaggggaaccacacctccaccctgcgaaaccagtgggagctgcactccctgctgcgtcatgacgaactggacctcaagaaccgggacgaccaccgccaccacgcgctggatgccatcgtcatcgcactctgtacccaggaccgcatccaggaaatcacccgcaagctcaagcacgagctgaaagtcaaggaagcacgggaagaaggcaaacgcgtcttccacttccgtgccgagggagagaggctggaaatcccctggcataacttccgcctggatgtcgccgaaaggctcaattccatctgggtatctcaccgccctagcagaaaagtctccggcgcactacacaaggagaccaactacggtaagaccgccgagggcaaacttgtcctcagaaaacccgtccagtccctcagtaaaaaagaagtggaaggcatctgtgacgatactatccgggatattgtgagaagctatatccatgaagccggcggagacctggccgcgctcaaagccatctcggcagacgccccgctcaccatgccctccggcatcccgatcagaaaagtgcgtaccgccattccctacgcccacatcacgattcgccccggcagcccgcatgagacacacgtgcagtccgcctccacccaccacctcgccatcttcagcctgggagaggggaaattccacttcgagccagtcaccctctatgaggccacccgccgccagcgccaccgcgagcccctggtccagaaaagctacgctgacatgccgcccgaagctgaattcctcttccacctctgctccggagactccatcttggcagagatagacggcacggatcagttgtttgtctttaacaccatggccacctccacaggccaagtctggttcgcccatcacaccgacgccgctcaagggcacaaagacccggatacaggccaatctctgctccgttcctgcatgcctggtagttttgctaaaaaattcccaaatgcccgtaaagtcaccgttctccccaccggggaaatccgagacgcttgattgaaatattcagtaaaaaggggacgtggccatgaaatccacgccccctcaggtaactgatcactgcttgcggtcaatccgcagctacacgtacctattattgctgatgatcaataaccagtaagtgtgtaggtaatttgacattaaataccttcttttcaagaaacaatttaaaccatacacgtaccttttgtttgacgtaaataaacatcctgctataagcaatttatgtaccgattattatgctataggagggacggatcggttcaagctctcccctacccctcccaggaccaccagtgagcggctctaattctagctagaaccgctcacgggatcaaagagccaaaaatagactcaagcctccgcaaaaaatgctcacaacatatccttgcgggggcttttatcattacacaagtagacctaatagcaagccatagctacgagacagtgataggttaccatctcgatcggatccccgtccgctgccgcgctgctgcggattgaccgcaagcagtgatcagttaccatcannnnnnnnnnnnnnnnnnnnnnnnnnnnnnnnnnnnnnnnnnnnnnnnnnnnnnnnnnnnnnnnnnnnnnnnnnnnnnnnnnnnnnnnnnnnnnnnnnnnnnnnnnnnnnnnnnnnnnnnnnnnnnnnnnnnnnnnnnnnnnnnnnnnnnnnnnnnnnnnnnnnnnnnnnnnnnnnnnnnnnnnnnnnnnnnnnnnnnnnnnnnnnnnnnnnnnnnnnnnnnnnnnnnnnnnnnnnnnnnnnnnnnnnnnnnnnnnnnnnnnnnnnnnnnnnnnnnnnnnnnnnnnnnnnnnnnnnnnnnnnnnnnnnnnnnnnnnnnnnnnnnnnnnnnnnnnnnnnnnnnnnnnnnnnnnnnnnnnnnnnnnnnnnnnnnnnnnnnnnnnnnnnnnnnnnnnnnnnnnnnnnnnnnnnnnnnnnnnnnnnnnnnnnnnnnnnnnnnnnnnnnnnnnnnnnnnnnnnnnnnnnnnnnnnnnnnnnnnnnnnnnnnnnnnnnnnnnnnnnnnnnnnnnnnnnnnnnnnnnnnnnnnnnnnnnnnnnnnnnnnnnnnnnnnnnnnnnnnnnnnnnnnnnnnnnnnnnnnnnnnnnnnnnnnnnnnnnnnnnnnnnnnnnnnnnnnnnnnnnnnnnnnnnnnnnnnnnnnnnnnnnnnnnnnnnnnnnnnnnnnnnnnnnnnnnnnnnnnnnnnnnnnnnnnnnnnnnnnnnnnnnnnnnnnnnnnnnnnnnnnnnnnnnnnnnnnnnnnnnnnnnnnnnnnnnnnnnnnnnnnnnnnnnnnnnnnnnnnnnnnnnnnnnnnnnnnnnnnnnnnnnnnnnnnnnnnnnnnnnnnnnnnnnnnnnnnnnnnnnnnnnnnnnnnnnnnnnnnnnnnnnnnnnnnnnnnnnnnnnnnnnnnnnnnnnnnnnnnnnnnnnnnnnnnnnnnnnnnnnnnnnnnnnnnnnnnnnnnnnnnnnnnnnnnnnnnnnnnnnnnnnnnnnnnnnnnnnnnnnnnnnnnnnnnnnnnnnnnnnnnnnnnnnnnnnnnnnnnnnnnnnnnnnnnnnnnnnnnnnnnnnnnnnnnnnnnnnnnnnnnnnnnnnnnnnnnnnnnnnnnnnnnnnnnnnnnnnnnnnnnnnnnnnnnnnnnnnnnnnnnnnnnnnnnnnnnnnnnnnnnnnnnnnnnnnnnnnnnnnnnnnnnnnnnnnnnnnnnnnnnnnnnnnnnnnnnnnnnnnnnnnnnnnnnnnnnnnnnnnnnnnnnnnnnnnnnnnnnnnnnnnnnnnnnnnnnnnnnnnnnnnnnnnnnnnnnnnnnnnatacagtgagatagggttgttcgcacacaacaaaaaaagctcaaaggaggcaagcatttcgcctagccccctcgttttctccaccagataacaccactacatacttactcttagacacttgcatcaccataaaagatcatgctaggatgccgggctttgattaaacatacactggaaatatccgagcgcccggcaagtgtcagcctgcgcaatcaccagctgcttatccgtgccggtgaactggagcgccgctatgcctgcgaggacgttggcgtgctgatcctagaacatccgggtatcaccatcagcgcggcagcggtcaatgaactgctgaccgagggtgcggtggtgcttttctgcggggccaaccacctgcctacgggtatgctcctgcctaccatcacgcataccgagctggtgccgcgcatgatgaaccaactccaggcggaccagcccagccgcaaacggctctggaaggaaatcgtccgctccaagatccaggcccaggccgccaatgtgactgagccctacaagcggaagcttggccatctggccagcaaggtgaaatccggcgacccggaaaaccgcgaagcccaggccgccaaaatctactggccagcctacttccccgatcagtatggagcaggaatggcgcgggattataactgcagctcattctttaactcagctctgaactacgggtatgccatcatgcgcgctgctgtggccagggctctggtctctgcgggcctactccccgcgctgggagtcttccataaaagacgggataacccctactgcctggcagatgatgtgatggagcctctgcgcccgattgtcgataccagggtgaaagaacttctccaggatacggcgcatggtgatacacagcctaacagtctggagaaagaacaccgtgccgcactcctgagtctcttgtcagagcgggtcacttgtggggacttcgaaggtccactcatggtggcactcccccgctacatcagcagcttctaccggatgctgaccaaagaagcctataccctactccccccctaccaatgctcatctcacactaccgatgtatgtggctagttgtcctgtttgatctccccgtagatacgcctaaagcccgtaaacaatatacggacttccgcaaggacttgctgggagacgggttcgacatgatgcagtattccgtctactaccgccactgtgccagccaggaaaacgccctggttcacatcaagcgcatccgccacatcgtcccacctgacggcgaagtacgcatcatgcaatttacggacaaacagttcgagcgcatggaagttttcttcggccagcgcagagtcagaaccgaggaagccccggcgcagctggaaatgttctgagtgtttttgttagaacaaactattacgaacttggcctcaacactcctgtttggctttgaccagctgtttcattcacctagtttattatcgatcaccaatctaggattacggtgaatctagccagctttgctatgaagatgcgcgccattccaatctgtctcttgcttacatcccaggccttgctggcgcgtttgccggaaaacctgccacaagccaatacgcgacctgtagagggtagcagacaggaagcggctatcgataccgagacgccactgccaaaactcgtctcacggctggagggcgagtggcagctcgtgagtaccgggaagatgtacttgataggctacaccaatgacatgtattccatcgcagcgcatggtgagaaggcactctcagaattaaacaagctgatcaagaacaccaaaagcgccaaggctaagtcgggagcgatactctgcatccacctgataggcatcgagagtacggtgagcggcagatttgcggaggattttaataacgagatggcgcgccagactctactggcactggcggatgacaatgagttcgggcccatggcgatcaatctgctcgcccgtgatccctggaaaagcgatctgccgactctcgtccggatcttgaagaaacatgaaaagccaaatccggcgctgattcacgctctcttccgctatgtccgcgagggcttcccctttcgcgaggacatcgatgaaaagctggaccagattccagtctacttcgagacaagcgaaggtaaaaagcgtttgggcgtgctcaccaccgtattacgagagaagccagacgatgatcctaagatcatcaataagatgaagcggccagactatgtcattcagtgggacgacacactaaccaatcgtatcgtgcgccgctacacgccagctcccgattcccccatcctctctgagatcaaattcggaaagatcgagaatgtactcagccaatttttacgattgagcagggaaaaggtgggtgttttcagctactgcggccagctggagccctactgtcactacgtagagcaaggcgcaatcatcatcgtagatgacagtgtcgcgcgcaagcgctggatcagtcacttcgacaagcatccaccagctccacagccatgatggctctaacacgtgatcattcgtgaaggttaaacgacaccgagctcagagttccctgcccgaaaaaacctctaaccatcgggggattcttccttagtactccgtaacccaagatgaaccggaaacccaaggacatgaaactcatcaccctgccgctgctactgactctcctcccgctctgggctgaagaaccaaaggcggaagccaagagagatccccaggacccatccaacttcccgctgacaagccagatgtggcaacaattcctatttcagcagcctcttccattctacctttgaatgccttaacttccttattccccagggagccatgtaaatggccaaggctagcagccccagccagcccagagtttgcatctgtaccggaaaaagatgatgcaatgcccacagacctccgggggtcgtaacaactccggctacttttatccagttatcgttcgtcataacatgcttgacgcgggccttcatgtgggcaccggagtattttttctctctcttttgatctttcatcctacagggagcaggcatgtcaaacggctccgagtacgcccgtagctgacttttaaagtgtcgccagccaatacttctggatgcctcctcagatcattttaaaatggcacgatttagaaatcgtgccataatcgtgccacattaggtcataatcatgccatctcagccaccagacgatgaattgcaggttatccttgaagttgtggcttcagctccgcacgggatttccataggagaattgttggaaaatagccgactcgatctcaaacgacggacattacagcgccgaatagattatctctgcgatcaaggcctccttgagccacggggagagggacgaggccgccgctatttggttccggcggttacggtcgacaatacagttccggcagcaaaagcatccacagtggaccgcggctggctcggccctgaatccactgaaataagaagactggtttcccttccacccagcaaacgccagcctgtcgggtacgacccatcgtttctggaatcctaccagcctaacgttacattctatcttcctcagaagacccgttcacaccttgtcgagataggacaagtcggtatcacggacttgccagcaggcacctatcttcgccagattctggatcgactgctaatcgatctttcctggaactcaagccgacttgaaggcaacacctattccctgctagaaacccagcgcctgctggaactgggcgaatcagcggatggcaaggccacccaggaagcccagatgattctcaaccacaaggaagccatcgagatgctagcagagcagtccgaagaaataggcttcaaccgctacaccgtgtgcaacctccacgcccttctatccaacaacctgctcagtgatccggctgcctgcgggagaatacgttcccgtcctgtcggcatttccggcacggtcttccatcccctggaagttccccaacagatagaagaatatttccagctcattttggacaaggccgaggccataaaagacccttttgagacagcatttttcgtgatggtgcagttgccttatctccaagctttcgaggacgtcaataaacgagtctcccgcctggctgccaacatcccaatgatcaagtacaacttctgccccctgtcctttgtcgatatagaagcagacgactatattaacgctctgatcggtgtctatgagcttcagcgcatcgaataccttcgagatgtttttgtctgggcctacgagcgctcagctctacgttacaatgcggtacgccagtctcttggagatcccgacccatttcggctgaaatatcgttcccagatcggacgtttcgtgcgtgagatcgtgcaatcgtcactcgatgcgagcgaggccatccggtggattcagcagcatgccacgacagaaatcccggaggaagactatacacaattcatcgaaaccgtggaaaccgaactactcagcctgcacgagggaaacattgcccgcttccgactacgtccgggagaattcgccaactggatgtccaagcaaataagagcataacactcttagctctcctggattctgctgcgggcagttaccatgtaggatgacgtcaactcaaattcaatcttgctgcgggttgaccgcaagcagtgatcagttacttcgacaagcatcctccatctccacagccatgaaggtcctaacacgtgatcatgcctgaagctcaagcgacaccgagctcagagttccctactcaaaaaaaatcctctaaccatcgaggggttcttccttagtaccccgtaacccgagactaaagattaacccaaggacatgatacgcatcaccctgccgctgctactgactctcctcccgctctgtgctgaagaacagaaggcggaagccaagacaaatccccaggacccgaacgtgcgccctgctggcgaggtggtactgcagttcgagcaccgtatcgagattccccagatcaagcgcttcaagagcgaggacggcgtgctcgagctcttccccggcgataccgtccatctggaattccagagcaaggagggcaaactggtcgaccccaaggtggtggccaaggtcacccatcccaagcgcaccatcagcttctccatgacgcaggacaaggacatgacctgcctctcccgcagcacgcagatccagcagaccgtggccttcgactgcatccaccgccagctcggcagcgaagacttctactccacccagctcattcccaccgagaaaggcctcgcctctttcgacagctggtccaataccgtctggatgctccgcctcaccaacttcgagatcaccgacaaatccgcccaagacgtctacgaagaaaagatcaagaaacgcgaagaggcaaagaaggagtgagcgcggatgcggtgatgaatagatcaccctgcatgcctagctgatccagatcaccaccttgtcgacctgctgccaggtctggcccaggtactcgaagaggtagatgatgccgtctccggcgtcgatgagggcttgtttgccgtctttactgaagccgccccggctgaaatgctggagaccgctcccgctgcgtttgatggtgatgccatgctgcgccgccatgttctcactgccccgatgcatcgggacaggttcattgcgctggaggaagctctggtaggtctcccgcttgaggtccggcatcttgtcccggagggtttcccaggggaattcggtggccagcttcgagctgcacgaatgtctcggagccttccagtagacctcgcgcttgagtttgaaggcatcacagaagccagcgatcagcgcgtagtcctgcgcgtcaaaactggaggcgtagtgatgctccgtgccgcaggacttgcagcgctcgctcatcacggccaccggcttctctatctccgtctgcaggccctcaggcgaggcacaggaagcgaggacgagggcgaggatggataggtgtttcatctcattctttggttttggcgggtggggtaatcgtcacctgctcgcctttcacgctcacttgtgaaccactgacaggcagcgggtaggttttaccaagacaggaaaacttgccgtctttgatgaagaagatgacatctgctaggccgatcaccaccgtcccatcctccgtagtatctctgaaagagccgccgctgatagggtctgtcaggacaaagcttaccccagctacggtatcggtatgatttccaagatacttcctgggaatgaaggggatggctttctcggcgggcttggctggcttgccattgattttcaccatgtctttgctgaattccagagtcttgatctcctccattttagccacactgcgcctgttgacgtaggccacgcctcctgacacgacaaaacaataatcccggtactgcacctcaaaagccgtgtagatgacattgtcatcagcatcagtctcagagcgattaccacctgcctcgatgtcatcgagatacgtcacttcgatcgcacccgtctcaaagaccatttccttggcatgtaacgatccatgccaaaggccacacatcagcaccagagctgctattttctccatcatcattttctatcaagttcctgtttaagcactaaaacgaatccctgtatccttagcccatcttccagtgccctgaaagctttttgatcacagcccacccctcctacatgtgagaaagttctcacgcctacccggcaacaaaaagcctccgatcccgagatgagaccggaggctgaaagctttgtgatgcgccaggattacttgcggcggcgtaggatgaatgccagggcacccaggccgagaagcgcggtagaggatggctcaggcacggccacgaagtccagtgaggaggaaccgatggatggcacactgcgtcctgtgtggttccctgtggtggccagcatgatgtaaaggtctgtctcggcaccagtggcattgtaggtgacggagggagccagtgcggaggcaccgttgtccggagagccgaaaccatccacaccttccgtgagtgtctggaatgagccagcgatgaagttcaccccatcgagtgagaaaccgaaggagaactgggcgttgttgttgtcaccgaagttggtcacccccacatccgcgagagagaaggtgtaggtgcccgcttccgctgtgccagtgagctgctgggagaggataccgaattcattgccattgtcgccttcgagaaggagaacgtgggtaccggcggtgctatcgctgaaccagttgtccgggtcagaggctacacggaagtcgcccaggtcgagagagtcagagccgagggaggtttccgtccagccagtaatgcctgcagagttggtgacaccatcgtcttcccagctgaggttcacagcggtcagcgcagcatgcgaggcgctgatgcaggccaccgtagccaatgtaaatgcgagtttattcatgattctgtttgagtgaggttcattgcttgatcgcgccgaatttctctggtgtgaataggtgattctttaatctcactctgcagtaaggacttggccgcgatgattcagcgactgttctacaggcaccacgccagtgcgggcaaaagatagatattggtctaaatccagaccaaatcggctccggcaacgaccgttgcggtgccagcaaaggcccggagtcacccagaccatgaatgtcatcgacagggattcgatcaggctttatccctagggcgtcatgtcgtttcgctacccagatctccaaaccatgaaacccctggcctgtattttactctctctatggagttgtttgcccctagcagcccaggacggcaagcagagcaagctgattcaacaagtagagaagaaacgcgataaaccagcggttgttgaactcaacattcctcgtttgcttccatttgataagcttgaagacaaatcgaaagctagagagaacgccaatatgatcgcagccgagattctgaggaataaaattgccgtgagcaggcaacaatttgagcattattgcgggacccctgatggaatttcagttgatggtgatcttatcatgacagcctatttttacatgcgcgatgatgctaagaagctatgggtgatgtatgcgttttataagaacggta

SEQ ID NO: 4494 - DNA, 7218 bp, synthetic construct
  source 1..7218: mol_type = other DNA
  misc_feature 1..7218: note = Synthetic
gtgcactgcaagctttttaacgtttaagtttgcttattataaatgagttacgtcgtcattttttgtcgtgtagcgtgaaaatttgtgatcaaaagaacccacctatacagtccaatcaatcagcactttgccggcccttttattctcctgagaacgtaacaacgcttcttctaactgatctggagaatagctgccgtcgataggctgaatcaggtcgttagaaatcacccaatcagctaactgagcatagaccgcatcgatctgctcacgtggtgtttcagcgatccactttgtgatccatagaccacggaggttgattcctttgaagattagaaatttattaggaaccttgagactgcgcatgctcatggctccgaaagtcacctgtgtgccgtgctcagcaagcgcatccatctggcgtagagcgctgtcgccaccaactgcattggacgctagttttggtaaattatcaccgcagatttcgcggactttttcgaccagatctttatcatccaaaagcacatgatctgctcctagagctttgagctcgtcttctaaaccttcacgtcgaacaacgttgatggtgcgaagtcctagcttctttgcaatctgaatcagactctgccccactcctgagtttgcggcgttctggatcacccaatcaccaggcttcagatcgacgtagccgtgcagaatttgccaagccgtcacagggttcactttcagcatcgcagcctgctcagcggcgatttcagaaggaatacgcagagttttagacgcatcgcagacaatatgactctgccaagtgcccacacgttctagaaagatcactttatccccagccgagaagccttctgccgtgctttctaacacctcagcacatccttcgattcctggcgaagtcggtaattctggctgcacgccatagtttccctgaatgaaattcaaatccgcaggattgatagggctagccaacatcttgactaacaactgacctgcggccaaagctggtagttctagttgctccagctggatgacttcatgagatttaccgaatgtgtgaaagcgtgctgattgtgagatcatggaaatagtcctcgttgttttttaacgtctgccacttccttgattcccaaggaaagtgccgcgacacgatgcggtaaatcatttgctgtggcaaatgctatcactcgatcaaaggcctttgccatcatcgtgtctagcttactgagcacttcttgctcagcccactgaaagcgttgcaaattctgcacccactcgaagtaagaaaccgtcacaccgccagcgttacagagaatatctggaactaagaaaatatcaccacgttcctcaagaatgcgatcagcctcagtagtcgtcgggccgttagcagcttctgcaagcactcgacactggagcttccctgcattctcagagttgatcacacgctccaacgcagccggaacaagcactgagcaaggctgaagaagcatttcgtcaggatcgatcgcagctgcaccagcgtagcctttcaccccttgattggctgctgcgtattcagcaagcgctcggacatcaattccgtcagggtcatagacagcaccagtcacatctgaaatacctattactttcacttcaaagcgggaaagtgtcatcgcggcatggtagcccacgttaccaaaaccttgaatgatcgcagtcgccttttcgtgctttatcctgcagcgcgtgagtgcgcgtgtggctaggaatgcaacaccgtgaccagtagccgctgtgcgtccttcagagccttggagattcactggctttcctgtgacgatccccggaaccaagtgaccagcgtggctggaatagacgtctaacatccatgccatcacctgctcgttagttcccatgtcgggagccatcacatcggtctcaggacctatgaaaggaagcatctcagccgtgtagcgacgcgtaagattctccatctcggattcactcatattacgaggatcacaggcgacaccgccctttcctcctccaaacggtaagcccatgagagcacacttccagttcatccacatcgcgagcgcagccacctcggctaattccacattcgggtgaaaacgtaagccgccttttacaggaccacgcgtcagctgatgctgcacacggtaaccaaaaaacacctcggtttcaccgttgtctttcttaaccggaatactaactgttaggagtcgtttaggccacttacagcgctccctaacatcatctgatagatctaagaaattcgctgaacgatcaaattgatcagccgccattcgaaacacaggatttgccaaaagttgctccttcatatcctacaatcaaacatgctaaggattattcagaaaggcaaaaaggttagacttctctaatttacggtattgatttcaattcatcaaaaaaaatgcgggatgctccttagaacagcgcccgctaaatctgattattgctacgaaaagaacaacgttcagtgatcaattaccgtcaccaatttgtccttggctttctgatttgtcaatctacaaatctagagcaatgattccttccaaatacacacttggtgtcgatatgggtgtcgcatctatcggctgggctgttgtttctaccgaagacagcttcatcgatagcggcgttcgcatcttccctgctggccttgataacttcaattcatccaaagaaaagcaccccaatctcgatcgacgtggagcacgtggtatgcgacgccgaattcgtcgcaaagctgatcgaaaagctctaatcaaagaaattctaaaagacctcggctggcttccctccaacgataaagaactagatcaatggcataaacttgatgtctacgagctccgatcacgcgctatttctgaaaaaatatctctccgggaactagcacgtattattctccacctgaatcaacgccgcggcttcctatcactgcgtaaaacagaagaatctgatgctgataaagatactcaaggcatgcttggtgaaatcactgagctacaaaaatctatcgatgagtcaggagcaaaaactctaggaaactacctctatcaaatttaccagaaagacgacatttcaatacgcctcagaaaccgtcacacacgacgctccatgctacattacgagttttctttaatttgggaaactcaatctaaatttaatcccgaactgactgacaaactacgctacggctccaccggacgcttagaaaaaccaatcaaagtagtcaccccaattccacgagtaaaagaggcatctctacttgagcaattcggcatcgaaaatctcagttttttccaacgacgtgtctattggcctgaaaattccatcggtcaatgtgaactagagggccctattttagctgaagaactcttaaaaaaatcatgtgacaaaaaggtagctaaagagctgcagtccaaaattcgtcgagcccctattgcagaccgccgtttccaagaatttcgccttcttcaggaggtgaataatctacgcattcttgataattcagtagcccgacgccccgaagaacgcccgctcacatcacaagagcgtgagatcgttatcgactacctcaccggtaagaaagaagtgaagtttgaggctctcaaaaagtatctatgtaaacataaagagctcaaagccacgctcccctcatcaccatctcagctcacatttaatctcgaatctggaggacgcacaaagatctcaaccacccccactgatgcgcacttggtctccactaaaggattaggtaaggaatggaacgacttaactaatgacaccaaaaacctcgttattgaagctctcacccgccccgcagctatcgacgaagatatccgtgccgatttagagaaaattcacgatatttcctctgaccatatcgaaagactcctcaaggtttctcttcccgctggctacggtcacatttcaatcaaagcactcgagaagcttcttccgcaccttcgtaaaggtatgctctacatggcgaaagataccaatgactctgcccttcatgctgctggctacaagcgccgtgatgagcaacattcagacgctcttgacctccttcctaccttccaagctctcgtagacccgaatagcaaattctacgatccacaccaggtcattattaacaaccctgtcgtgctgcgcgctctcacagaactacgcaaagtagtaaacggactcatccgcaaatacggcaaaccagcgcaaattcatgttgaaatggcgcgtgaactcaagatgtcaccgaaagcgcgttctgagcaccagaagaaaacacgtcaatttgaaaaggaacgcgactccgcaagaaaggcaatagaagagctcaatgtcattcctaaccgtgatgccatcaatctttaccgcctatggaaagagcaaggtgaactctgtatttattcagggaaaacaattagcctatttcaactatttaacagtgaggtagatgtcgaccacatttacccattctccaatagcgccgatgactcatttaccaacaaagttgtctgtttcgcacaggaaaatcgcgataaaggaaaccgaatcccttacacttggttatcacacagtgatccagaaaaatacgaagccatgcttcagcgtgccaaaaagctgatgggtggaaaatacaagcgcttcatcgcaactgaaatccccgatggcttcgtcaatcgtgacctcaatgacactgcatggatggcgaaggcagccaaccactacctagctcgcctcttcgacaagccacatcacgttctaggcataaaaggtgcacacaccgccaagctgcgagaccaatgggaactccactcactactgcgcagcgatggtctcgatctcaagaaccgtgacgaccaccgccaccacgcactcgatgccatcgtcattgctctttgtgatcgtgaacgtatagctgaacttacgaaaaaactcctattcgaaacccggataaaagaggctaaacaagaaggaaaacgcatctaccacctacgcacctctggcgataaactcgtcattccttggcaaaatttccgtctcgatacagccgaatcactcaactccatctgggtctctcaccgcccaaagcgcaagatatctggagctctccacaaagaaaccaactacgggaaagactacaaaggcgacctagtagtgagaaaacgagtgcaagatctcacagctaaggaactagcgggcatctgtgaccctacccttcagagcattatacaaactcacatccgtgaaatgggtgggaatatcaaggctctcaaagagatctctgatgactcacctctaacaatgccatctggcattgctatccgaaaagttcgcacagctagaccttacgcacacataactattcgtaaaggcacaccacacgaaacacatgtccagtctgccgccacgcatcacctcgccattttcacccttggtgatgggaaattccacttcgagcccgtgactctctatgaagcaagtagacgcctacgagccaaagaagaagtcattcagaaagtataccctaatatgcctgcagaggctgagttcctcttccacctttgttcccgtgactcaatgatggctaccattgatggaacagatcagctctttgtgtttaacacaatggctacgagcactggtcaagttaagttcgcttatcacactgatgccgcacaggcacataaacatcctgaaactggagtctcgcttcttcgaacttgcacgcctggcagctttgaaaagaattttcccaatgctcgcaaagtaaacatattaccaacaggagaacctagaaatgtttcatagatagattttgctagaaagaagcggtctagacctgctagactgcttcactttgatcaaacataccatcgaaattgcggagcgccccgcacgcattagccttgagcacaagcaacttgtgctcaaggctggtgacatcgagcgcagctatgcttgtgaggacatgggagtgctgattctacagcacccagctatttctctcagtgctgccattatcaatgctctgctggagtctggttgcgtcgttattttctgcggcagcaaccacctaccaaccgggatgctattacccaccgtaactcacaccgagctagtcccacgtatgatggctcagttggccgccgaccttcctgctcaaaagcgagtttggaaagctatcatccaggcaaagatcaatgcccaagctaagaacctcccccctgtgtcccagcgaaaattgttcaatctcgcacagaaagtaaagtcaggagaccctgaaaaccgagaagcccaagcagcaaaaatctactggcaagcacgcttccccgagcaataccaaagaggcatcaagcgcgaccagaagtgcgccacattatttaattctgcactcaattatggatacgcaatcatccgcgcagccaccgcacgagcactcgtatctgctggactgcaaccagcactaggcgtttttcaccacaaccgaggaaaccctttttgcctagcagatgacgtcatggagccactccgccctcttgtggatgaacgggtcaaagaacttctagcaaaggaaactgaaacggacggaatactacagcaatctcaccgacgcgaattactttccctgctttcagaaaaagttatctgcggtgatttcaccggaccgctcatggtagctctaccacgctatgtcagtagctttttccaaatgcttatcaaagaatctaaaaaactcacctcccccactcaatgcaaatctcaggatacagatgtatgtggttagtcgtcctttttgatctccccaccgacacgaaaaaggcacgccgccaatacacactattccgcaaagaattactcgaagacggtttcgcgatgatgcagtattcagtctattatcgccactgtgccagtaaagaaaacaccgaggttcatatcgaacgaattcgctttgctgtgcccccagacggagaagtccgcatcatgcagttcactgacaaacaattttctcgcatggaagtattcttcggaaaacgacgaatacgcaccgaggaagcgccagcacaacttgaaatgttttaaatgaaatcctcatatctcactctatttcggtgagatatgaggttgatatggtaattgatcactgaacgctgtcaatccgcagcgtgctcgatgcgctcccac

SEQ ID NO: 4495 - DNA, 23234 bp, synthetic construct
  misc_feature 1..23234: note = Synthetic
  source 1..23234: mol_type = other DNA
gtcgccgagcaccagcggcccgtcgagtcggccgctaggcggccctggagcggccgccgcggccttctcgggcacgggcgagaccattgcctggtacatgttctctatcggtgtgacgccgcagatcggttccttggggaacgaccagccataggccacggcgcccgccatcttgaactcgttgcccaccttcaggtagatggggctgccgctcatccccgcgatgatgcccgtcttctccagcccggccccgctcatgcggcagagcacgatgtcctgcctgggcattgcgttgcgcagcacgccgatcacctcgacttcgaaccgctcgatcttcgtgccctggaacaccgacaggccgtagccggtcatgccccgcctgatctcatttgccgcgaggtacttggccggcaggccgcccgcccgggccgcgagggccacccacagaacgtcgaggagcaggacagcacgcactctcatgagaacctccagggaggcagcgggtcgccggatggaacgcggaaccgcagtatcataggcttccgcatggggagagtcaagcagagggaagcgtcccgaaggggcccgggcacccgcgggattttctgttcttgacagcgtgggcgaatgccgctaagattggcaagagagcgcgtgccaggacaggcggcggcaggcgtccccgtagctctgcatccgcgcagacttccccttatcccccgtctcatgtccagccatctcgtgtccctcgggccggcagcgcgagagcaaccgaggcagcccttgaaagcactaccccaccgagacttgcggctcgtgttcctcgtcctggcgtggcttgcggggcagggcgtcgccgttgcgaggcaaagcggcctggtcgtggccgagcgcccgagcatggtggtcacggccatggcccccgtgccgagcacctatcggtacacgtgcctcaacgacctggcgcgccaattgggcgcccaagcgagcttcgacgagctggggggggtctttacgctgagggttggcgagcgtcgcgtggccgtggcgccgggcgtggaggtcgccgcgctgggcatgcgctcggtcgagctcggcgacgaggtggcgatgcggtacgggcgcgtctacgtgccgcgctggttcgcgcgggacgtcgagcgctacctgcgcacagtggggcctgagctcggccccgtgacggtggagcgcccgaccgaacgtccggccgagccaaccaggccgcgcacggtgggccgcgtgtgcattgaccccggccacggcggcaaggacccgggggctgtgagccgctggggcctcgtggagaaggacatcgtgctgccgaccgcgcagttgcttgcgcaggagctgcgggcgcgcggattcgacacggtgctgacgcgtgacggcgactacttcgttgagctggaggaccgccctgccgtggccacgcggaagggggctgacatctttgtggcggtccacgcgaacgccatcgcgaatgcgtcgtacaaggggctggagatcttctactggtacgggtcgtggtcggccgcctccgctgccacgcggcgcgagggcgtcgagctggcgcaggccatcgagcgcgcctgtcagcgcgaggggctcaccgtgcgcaacgtgcgcggcgccgactacaaggtgctgcgctactccaaggtgccggcgaccctggtcgagatcggcttcctgacgaaccgcgccgaggagcaggccctgcgcaccacggcctaccgccagcgcgtggccagggcaatcgccgaggggattgacgcctaccgcaaggggaacaagtgagcgcggcatccgcgccggccccactgcaaagaggactctcgtgcctgaccccgcctcgccgatcggcatcttcgactcgggcctcggcggcctcaccgtgatgcgcgcgatcgcccgcgcgctgccggacgaggacctgctgtacttcggcgacacggcccgggtgccctacggcatcaagtcgccgcccaccatcacggccttctccgagcagtgctgccgcttcctgctgcgccatgggcccaagctgctggtgatcgcctgcaacaccgcctcggccgccgcgctgccgcgcctgcgcgaggcgttcgacgtgcccatcctcggggtggtcgagcccggcgcccgcgctgcggccgccgccacccgcaaccgccgagtcggcatcatcggcaccgaggccaccatccgcagcagggcctacgtcgagtgcatccgcgccctggatcccgccatcgcgctggtggaccgcgcctgcccgctcttcgtgccgctcgtcgaggaggggcggggctgcgacgatgccatcgtgcgcctcgccgccaaggagtacctccggcccctcatcgagttcggcgtggacaccgtggtcctcggctgcacccactatccgctgctcaaagacgccctgcgcggggtcctgggccgcgccgtgaccatcgtggattcggccgaggagaccgcccgcgccgccgccggcacgctcgaccgcctcggcttgaggcgcggcagcgccacctcgcccgcccatcggtacttcgtcaccgacaaccccctgcgattcgcctccgtcggctcccgcatcatgggcaacatcatcgagaacgtcgagtgggccgaccccgccgctctgccgaacgggtgagccggcgccgcgctctcacgccggcgggccgaagcagtcgccgagggcaacacggtgcccacgaaggaagtccgatgcagacatggtgcgcccgccggcgggctgcaaggtgaggagacgcaggatggcgtggccggtccccaccgcgaggcaatcgccttcggcgatggcgaccctgcccgggtgggccgcaggcccctcgacgggctcggcctcgtggatgacgagcctcagcggcggcttgttgggccgccgccagaaggtgaacgcccccggccacggggccatggcccgcacgaaacgggcgagataggccgcggggcgatcccaggggagtgcgccgtcggccttgtcgagcgccggcgcgcgggtggcgagcgacggatcctggggagtcgggtgtgccttgccggcggcgagggcggagagcgtcttcacgaggagacaggcgcccaggccagccaggcgggcggtcaggtcgcccgtcgtctcgcgcggcccgatggacgtcgcctcctgggcgaggatgtcgcctgcgtcaatccgctcgctcatgcgcatgatcgtcacgcccgtttcggcgtcgccggccaggatggcgtgggcgacgggcgccgcgccccggtgccgcggcagcagcgaggcgtggacgttgaggcagccgtgccgggggagggtgaggacccgccgtcggagcttctggccgaaggccgcgacgacgatggcttcgggcgcgcgctcggccagggccgccgcgaagccgcgctcgttgacgttcgcggtctggagcacgggcagcccgcgagcgagggcgacctgcttgaccggcggggccgtgggcaccgcgtgccggccgctcggccggtcgggctgggtgaccacgcagacgacctcgtgccccgcctcgagcagggcctcgagcgaagggaccgcaaagtccggggtgccgaagaaggcgatgcgcatccgctgcagaactcagtaggtggcgaggacgaactgcttccagacccgctcgaagtcggcgacgggcattccgaagacctgctcgaaggcgtcggactggagctggaaggccctgtcggcggcctcctggaacacgcgcctgaggtcggcctccgactggatgtggacgaagcccggccgctcgggggccagctccttgagcttgagcacgaacctgccgatcttgcccctggtgcgcgggtgctgcgagaggcagtggatgaggctccaggcctgcgcgtagcccacgcggtccacgggcgggaaggccgcgacccagaactcgcgcagcggccgctccctgcccgccgacaccagggccttgacgagcggccgccattgcgtcaggcgcgaatcgcccggctggtgcaggaactcgaagaattgcgcgcacccctcgtgcagccaggtgggcaactgcacctctttgcggtagagctggaggaacacgtggctcatctcgtggatgagcacctgctccagatgcacgcggtcctggccgtacatgggcatcacgatcgtggggttcttcttggtcgggctggcgaagccgcccgagagggccgtgcccggcccggcggtggcagcggcgaagctcacgaactgctcgcgcgtggcgaagaggaacacccggcacttgccctcccacacggcctcgccgctggggacgtcgaagaggtcgcagaagcgcgaataggccctctcgcacagtgccgcgtagcccttgcccacgggggtcggcacggtgaactgcacctcgaagtgcgcggtgctaatctgctgaggcctggcctctccctttgcgggcgagccggcgtcggggcgcggcgccgccgcatcggcggcgagggccacgagggcgagcaggagtgcgcggggcagcatcgcgcttacgcctttcccgctgcggcgtgcaagggcgcggccggatgcacgatgatcgcatcgctcggccccgcggcgccccggagggcgggcaggtggcggggctcgacgcgggcctcaagggtcacctgctcattctcgctggagctggccagcacgctggccagctcgtggaggagcgcgaggaggcggccgttgccgcagtgcacgcgcacggtgacgcgcgtctcgcgctgggcgaccaggtgcagcacgcgggcgcgcaggtcggcgagcccgtccccacgcagcgccgagatacgcacgtggtcgggcagagatgccgcgaggagatcggcctcgacggtggggagggcgacgtcgcacttgttgaaggcgttgagcacggggtggccgccgcaaccgatctcctcgagcacctgccgcgccacttcggcctggtgcatgcagtcgcggtggctcacgtcaatcacgtggatcagcaggtcggcgtcaatcgcctcctccagcgtggcgtggaaggaggcgaccagatggtgcggcaggcggcggatgaagcccaccgtgtcgctgagcagcgcgcggtggctgccatcgagttcccaggtccgcgtcttcgtgtccagcgtggcgaagaggcggtcctcgacgaaggcgtcgttcgtgccggtgagggcgttgagcagcgtgctctttcccgcgttagtgtagccgacgaggcagactctgaactcgccgctccgcgcggcggactcgcgcacctttcggctggcgatgtcggccagctcgcggcgcatgtgggccatgcggcgcgtgatcacgcggcggtcggtctcgagctggcgttcgcccgggccgcgcgtgccgatgccggcgccgaggcggtccaggtggctccacattcgcgtgaggcgcggcagggtgtactcgagttgggccagctccacctgcaccttggcctggcggctcttggcgcgggtggcgaagatgtcgaggatcacctcgctgcgatcgagcaccttggcttcggtgacgcgctcgagattgcgcacctgggctgggctgaggtcgtggtcgcacagcacggcatcggcgttctcggccaggcacaggtcgcgcagttcctccgccttgccctggccgatgtaggtgcgggggtcaatgtgagggagcttctgggtcaggcggccggccacgcgagcgccggcggtctccgccagacgctgcaactcgtccagcggggcctcgccgccgtggtcctccccgggcagaagagcgcccaccaggatcacgcgttcctggcgaacggtcaactcgtcgcgtttgggctcgtgcaaaccggtgtcctatcgccaaccgcgggtccgcttgtgcgccggattataccgctgccccggaggggagtcaagcgaggcccaacggcctcggcagtcagcgggccgggctgcgcttccgcggctcaggcctccggcgccgccttggagggctcgggcgagggcgtcggcgcggcgggcagctcgacgcccagcttgctaagcgtggcgcggatggcctctttgagccgggtgacctcctgttcgggaggctcaggctccagcccatcggcgggggcctcaagcagatcctcaaggggcttcacagccgcctgattgcccagttggctcaggacctcgacagcggcgaggcggaccgacaggttcttggacttcaggagtccgatgaggggttccgctgccgccttgtagccgagcttggccagggcttgcgccgcgcccacgacggcaggcggctggtcgcgcttcaggaccgccagcatcggctccgccgactcctggtcaccgaactcggccagggcgaggcacgcgccggccacggcctcaggggccttggcgtcgagcatcgagcggatggcgggaagcgccttgcggtctcccagcttggccagcgcgaggcaggcggcgccagcgacctcgcccgcctcgtcctccagccgtctgcggatgagggggatgaacgcctcgtcccctgtctcggcgaggctctgcaccgcggcgaggcggcccatgggcgacgcgtcctcgatctgttcccggtagaacttgatctgctccgcgctgctgatgacgccgggcgtgtcgcgtcggaggcaactgtacagcgtgtagccgacgcagatgaccgctaacgtgatgagcaccggcggcccatagcgtcgccaatccaccttgccgcgtgctgcccacacgggccctggctcctgcggcgccgcgagcacctcgttccagttgggcccgagcttgggtctcgccgcgggcctaggcgaagcgccggccggccggggcttggcgcccggctcaccccgcgtggcgctcggggacgcgggcgcggcctcgcccggcttcggcgagggcgacaccggctgggccttggctcccggcgccggccgcggggtggtccctgtcgcagatttcggctggtccgccttcggtggcgtgccgggggcaggctggctgcccgctccggccttcgacgcaggggctggcttgggtgtcgaatccgccatgcggcccggtcctccttgcgttcctcccgctgcacaggtgattctactccgctgtgtcgggagtgtcaaccgtcgacgccgcagggggctccccggctcggggttgacagggcgcgcaccgcgggctagaatggccgccaaagacgcggaggagcgcgcgagatgttcacgggcattgtcgaggcagtgtgtccggtcgtcgcgctgcggcgcggagccccctggcgactggccattgacctgggccgcctggccgaaggcacgcgcctgggcgacagcatcgccatcaacggcgtctgcctcaccgtagccgcgctcgacggcagccgcgcctctttcgacgccatcggggagaccatcggccgcaccagcctagccgccctctcgccgggacaacgcgtgaacatcgagcgatcgctccgcctgggcgaccgcctcggcggtcacttcgtggccgggcatgtggatgccgtgggcaccgtccgcgcgaaggacacgctgcccgcccagaccctgctccgtgtcgccgtgccccgcgaactgacgacgttcatggcccccaaaggctcggtggccgtggacggcgtgagtctgacgctcgtggacgtggcgcccgacgccttcgccgtcgccctcatcccctacaccctgggcgaaaccaccctgggcacgaaaggcccgggcgactccgtgaacgtcgaggtcgacatcctggcccgctacgtcgcacgccagctcggccgcgacgccgcactcaccgaacgaaccctccgcgaacacggcttcttctgaaccgcaccgtagatggagtgagagaccatggccaccaagccgctctgcgtgaagccgaacaccgtgatcaccggctgggacttcagcaccggggcagtgaaatgcctggcgttcgacctggccggccgcgtgctggccgaagtgcgcctgcccaccgacctctggcacgagggcgacgaggagggcatctcggaactcaacctcctgcaactggagggccaggcacgcgccagcacccgcgccatcgccgcgcgcctccgtgagctcggccgcctcgccgactgggccgccggcggcatctcggccacccaccacaccgccggccgcatcgaccgcgacatcgtgcaggtgcgccgcgccatttgctggaacgaccacagcctggcgagatacaacgccatcggcctcgaacgcctcggcgggcaggaccgggtccgccagctcatcggcggcccttgggccatccgctacagcctcagccacctcgtcaaagacgaggcgaaactcgccgaagccgactggcgccgcacctggcgtatcctgccccacggcccactctccgccggcttcctcaccggcaactatggcgtcaccagcgtctccgccgccgcctccacgggcatcatggacctctgccgccgtaagtggtgcaaggccatgctcgacgccctcgaatcgcctgcttaccgcgcgctcgcctggaagcaactccccaggatcatccatcacttcacccccgtcggcccgctcgccgagcacgtggccattgaggcaggcattcacccacgccgcgccccactcatcttccccacctccgacgaccagcaggccggcctcgtaggcggcggggcggtggacagcggccagatggcggtcatcctcggcaactccgccgtcgtcaactcgtcgtcgaaggaactgcccacccgcggcaacctcgacgtgatggcgctcaactgggggccgtacctctacatgcgctgctacaacaacggcgcgcagttcctcgaccaggtggtgggcgcgaagcccgattggaaggccctgggcgatgccgcccgcgcctgcccgcccggctgcaacggagtcaccgtcctgcccttcgtcgcccccgagccatcgttgggtgtggatgcggccaaggcgggcctccgctggttcggagccgagggggctccgacgggcgcgaggttccgcgcgagcctcgaggccatcgcctacctcatccgccgcggcgtcgaggagcacgagcaggccggccagaagatcacccgcatcaccgtctcgggcggcatcgcccgcagcgacctgatgtgcgagatcctcgccacggtcctcggccggcggctcgagcgcctcgaatccgacgaaggccccgccctcggcgccgccgtcacggccctcgccgccttcgaaagccacctgcgcaaggagcgcggcatcaagggccgctacggcgtcggcgacgccgtggcccaactcatccgcttcagggcgcccgtggaccccaaccccgcgtggctcgacgcctaccgcgccggctgggcaaccttcaacgaacggctggagcaactctagcatcccgcgtggtcgcctgccgccagtcagggcctgggttcagggtcaggccgcagctcggaactctcgctccgcgcccccggttgccgccaatcgcccattctcggccctctcctctgcccacacttgctcagcgtccggacatggccggaacggcaggaaccacgagaagtgcccattctcccccttccgttcatacttgctcactctctccacctcaaggctgcatcatagagggggacagtcacctatttctccctatgctgaggaaggtagaaggcttcttcggctcggcgtgcctcttaggggcacccacaacaaagcccggagagcccaaaaagaaacgccacacatgggtggcgtttgggaatcgctccgcggagcgttgcctacggacgaaagtcgtccttactgaaacttgacgacaatcgccgctcaggtacacttgatcgaccttatactccttccgtgggcacttgtcaagggggtttatcatggctgatcctggactcctcaagtacgtgctgggtctcgacattggcgccaactcgatcggctgggcattgctcaccgccagaggcgacgagcgcctcacgcccacaggcatcgtgcagacgggcgtccgcatcttcgaggccggcgtcgagggcgacctcgaacgcggccgcgaggaatcccgtggcatccagcgccgccttgcccgacaggcacgccgccgactcgaccgcaccgcccgccgcctcgccaaggtcttcggtctcctccaggacgcaggtctgctgcccagggcggatacacctgcttcgctgcctggcgtgggcgttccccgcgagcacatgacggctcgcgagcgacgcgacgagcgcctgcgcgcctctgccgaacgcgacgcccttctcgcccagcttgatcgcgagcttgtcgcccagtgccaggatgggctccgcgccgccggagcgtcccagggggagatatggctcgtacctcaccggctgccctatctcctgcgcgcccgcgccctcgacaacaaactgccggcccaccagcttgggcgcgctctctaccatcttgcccagagacgcggtttcctcagcaaccgtaaggccgcacccaagaaggacgaagaccagggcgttgtggaccagggcatccagaagatcgtcgcgggcatgcgcgagaccggcgcccgcacgctcggcgagtacttctcccgccttgacccaaccggggagcgcattcggggccgatggacctcccgcgccatgtaccaggacgagttcgacgccatctgggccgcgcaggccccgcaccatcccgaaatcctcacggccgacctcaggaagcgcctcaagcgcgcgatcttctaccagcgtccactgaaggtccagaaggagctcattggcgaatgcgagttcgaaaagggcaggaagcgcgctcccatggccctgctcgtggcccagcgcttccgcctcctccagcaggtcaacaacacccgcatcctcacccccgacgccgtcgagcgggggctgacggcggaggaagccggcaagctcattgacgccctcgacaccctgggtgatatcacgttcaagaaggccaagaggcttcttggcctctcccagcagcacgttttcaagttcgagagcggcggcgaagacaagttcatcggcaatcgtaccgcaacgaagctcatccgggtcttcggccttgaccggtggaagacgctcaagccttctgaccgcgatcgtatcgtggacgacctgctcacgatccagaagcccgagaccctcgcccggcgcgcgcagcgcgtctggggcctcagcccggaggcggccagggaactcgcccgcaccagtctcgaagacacccactgccgactctcccgcctcgccatcaagaacctgctccccctcatggaaaccggcatgccctacatgaccgcggccagacaggtctacggcgagaaaccggccgaaccgcccagggactccctgccggcagtcagcgaggccctgccggcgctccgcaaccccgccgtccaccgagcgctcaccgaactccgcaaggtggtcaatgccatcgtccgcacctatggcaagccggccgccatccgcatcgagctggcccgcgacctgcgcaagtcccccaagcagcgcgagcagacctggaagaagaaccgcgacaacgaggccctccgcaaggacgccgccgagaagctcttccgcgagatgggcatccagaacccgaagcgctcggacatcgagaagatgcttctcctccaggaatgtggctgcatgtgcccctacacgggcaagcacatctccatgcgcgacctcttcggcgatgcgccgcagttcgacgtcgagcacatcgtgcccttcagccgctccctcgacgactcgttcctcaacaagaccctctgcgaggtcgccgagaaccgcaacgtcaagggcaaccgcaccccctgggaggcctacggccacgaccttgtgcgctggaaccagatcctgcagcgcgtctcacacttccagggcagcgcccagcgcgagaagctccgccgcttccagcttcagaccatcgagagcccggagcagttcgcgtccagccagctcaacgacacccgctacgccgccgtcgaggccatggacttcctcaagctgctctatggcgaagaggcccaacgcaaagtcatcgtccaggccgcgcgcggtggcaccacgcgcttcctgcgcgaggaattcggcctcaaccagatcctcggcgacggcggcgagaagtcgcgcgacgaccatcgccaccacgctgtggacgccatctgcgtcgccctcaccgacccggccaccgtgaagatgctctccgacgccgcggcgcgagcactctctgaaggccgccggcgcttcgcctctgtccccttcccctggggccgattcctcgacgacgtgcgcgcctcgatccagggcatcaacgtctccttccgagtctcccgcaaggtcggtggcgcgcttcacgaggcgacgttctacagcccacccaagaaggaccccaagaccggccaggagcatgtgcacgtccgaaagcccgtcaccgcgctctccgagcagcgagttgggaacatcgtggaccccgtggtccgcgccgccgtgcaagccaagctcaaggaggtcggtggcgacgtgcgcaagctggccgacaacccgcccacactccgggccaaagacggccgcgaaatccccatccgcaaggtccggctgcgcgagagcatcacccccttcggcatcggccagggcggcgcccgccaggtggtcaccgacaccaatcaccacgtcgagatcgtgcaggtcccaggcaaggccggccagcccaagtgggagggctgtgtagtcagccagtatgaggccctgcggcggctcagagccaaagagccggtggtccgaagagaccacggcaacggtaggacattcgtcttctcgctcgccctgggcgagacggtgcagatgaagggggatgacggacagcttgcgttgttcaaagtagcgggtgtctcgcagaccggccgcggtcagatcatgctcgagttccgccgaaatgccgatgcgcggcctgcaacagtgctgaggaagatcaagggtggtcgtgtgttccggacgcccgactcgttgcgcagtgccatgggcacgaaagtgctcctcactcccctcggtgagcttcggagggtgggccgtgactaatcggatgattgagctgtccgacggtccggcagccctcagcgtgcggctcgaccagctcgtgatcgagcgggaagagcagcccgagatcacggtgccgcttgaagacatcgcgtgcttggtggtcgcccacccgcggatcagcttcacccactcggtgctcagcggcctggcgaagcacggggcggggttcgtcgtatgcaacgagcgcttcctgcccacgggtatgctgctgccgctcgagggccactcgacccaggccgaacgcttcgagatacaggccgaggcccccgtgcccgtccgcaagcgggtctggcagcagatcgtccgcgccaaggtccgcgcccaggggcggctgatcgcccgggtgcgcggcgacgaccggggcctcttcatgctcgccgaccgcgtgcgctcgggcgaccccagcaacatcgaggcccgagcctcgcgcctctactggcccgcactgttccccgagggcaagttcctgcgcaatcccgacgccgaagaccagaaccgctttctcaactacggctatgccatcctgcgcgccatcgtggcccgggccatctgcgccgctggccttcacccctcactgcgcctgcaccaccatcaccgcaacaacgccttctgcctcgccgacgacctgatggagccattccggcccctggtggacgccgcggtgctgaggctgtgcgacgaacacggcgccgacgcccccctcgacaaggccaccaaggccgtcctcttcgaagccctctatggcaagttcaccctcgacggcgagacccgcagcctcttcgacatcctggcccacaccgccgcttctctcgccggcgtgttcatcggctcagcgacagagctggccctgccggaactctgatctctgtggcgcacagccgcccaggctgcgcttgtgggcgggatgtccccgtcccgcgagcatgcccgcctgtgggcgggacgtccccgtcccgcgagcatgcccgcctgtgggcgggacgtccccgtcccgcgaacatgcccgcttgtgggcgggacgtccccgtcccgcgagcatgcccgcttgtgggcgggacgtccccgtcccgcgagcatgcccgcttgtgggcgggacgtccccgtcccgccaggccgagcaaacgcggggcagcgacgccccgcccacaatggcagacacggtgccgccatgcctcagcaacgcaacctctcggagtaccgggccatgtggctggttgccatgttcgatctgcccgtggacaccaaagagtcccgccgcgagtacacccgcttccgcaagacgctgctccgagaaggcttcatgatgcttcagtactccgtctacgcccgatacttcgagagccaggagaacagcgacgtccaccgcgcccgcgtgcgcggcgcgctgccccccgacggccaggtgcgactcatcgccatcaccgaccaccagttcggcaaaatggaggttttcttcggaaaaaagcgtcaggaaaccgaggaaccgcccgcccaactcttgcttttctgaggctgcgccgagtgtaacctcctgtaacccactgggttacgggagatcgagtgtacctgagcggcgattgatatcaagccccagcatcccagggcggcaggccactgcgagcacgagtgtacctgagcggcgattgatatcaagccccagcagaagtagccgcttaccgatattcaaacccagtgtacctgagcggcgattgatatcaagccccagcacgacgacgcgaccctcgtgctctacgagaagtgtacctgagcggcgattgatatcaagccccagccgtcgcgtgccgttgcctgatgtccctggcagtgtacctgagcggcgattgatatcaagccccagcgcacgctgcgcgtggccgtgcccgacctgtagtgtacctgagcggcgattgatatcaagccccagcgaagaggcagggcttgaagggccaggtgcaagtgtacctgagcggcgattgatatcaagccccagcttggccttgcttggccttgcttggccttggagtgtacctgagcggcgattgatatcaagccccagcgagcgtcgtcgtcgctccaagtcggccgaagtgtacctgagcggcgattgatatcaagccccagcgagcgtgcgcgagcgcgagcgctgcgtgatgagtgtacctgagcagtgagatgggagtcgtggcgaggcgggggatggcgacgccgcggcgcaggatgtccgcctatcggcacggccgcctcaggcccgggcggcagggccgtacttggccatgatgttctggaggagcggcctgttgtagagccaccagacgcaggcgggcacggtcttggcctcgccggtctcggtgtcctcgtaggcgaagcctgcggcgcacatttccatgcgctcgctttcgatggagtggatttcctcgaaggggaggatgatgctggtgaggcggtcgccgatccatgtgtggcgggcgagctggtcgtagagggtcttgccgaggatgaggccgccgagcaggcgcgggatgacgagccacgggctgcccttgaggagccggcggaagtggacgttcctgcggatgaagggcaggaaggcgcgcagcacgatgagcttgccgcgcaggcgcgagaggccgcgggtggagtcgagcctggcgagcctgggctccagccccttggcgatgttcaccgcctcggcggtcagttggtcgaggggccgcttgaggaagtgggagatggggcggtagcgctggccgtcggggatgaagatcgtggcggcctcgcagttggggtggaccttgttgaacgtgcgggcgccgccggagcggaagtacgacagggcgtggtcgaagtggaactggaggccgagggaggcgaattcgaccttctcgtcggggaaggcggcggcgacgatctcctggacgtcctcgatggtggtcgagatgtcaggctcgaagcgccccgcttcccacgtttcggtgagggggaggaagttgagggctttcaggtggttgcggtgctcgtagcacagggtgaagaggtcggcgatgtgcgcgtcgttgatgtgccgggcgacggtgcacatgatggcgtcctggcgctggacggcgaacttcttgaggttttccagcgccttgagcttgggctggtagcaggcggtggtcttgcgcatgcgctggtagatgctggggtcgcgtccgtcgaagccgaggaagacgggcagcttccggtcgcagaccttcttgcagaatgcctcgtcggccagcttgaggccgttggtgaccaggtgcacgcgcaggccgaggctgtgcgcgaggtccacgatctcgaagaggtcgtcgcgcagcgtgggctcgccgccgaagaggtggatgacgggcttggggtcgagcttggccaggcccttgagcatgttctcgaagtaggcgaaggggggatggtagtcgaagcccatccagggcgcgttggccacgcagatggggcaattcatgttgcagcggttcgtgaggtcgaggaagaccagcttcagcgagcgcgggtggcggcagccctcgcactggaggtggcagacgtgctgggtggcggtggcgctgtcgtattgccagatttcgcgcttgcgctgccaggtggcggggtcgttgctcaccaggccctcggtcttgccgcaggccgggcagtgcttgacgaggtagaccttgccgtcgcggatgtcgtgggagcaggggactcggctgtggcacttgtcgcagacgccgtaattgacagccatcgtggttgctgcactcctgtccggccctcggtcccaactcgcctcagagtataccgggaactccggcgcgaggcaagcggttctgtggcggggggggcgggccgtggccgtagccggccgccgcagcggcccgcgcgtccgatacctttgccgcttgcgatttcctgtggcgtgcgtataatacattgttccttggtttgcatggtgctcggcatcgtttcctggagaaccgaatggcggaccataggacggcggacttgcggaatttcgcgatcgtgggccatggcgccgtgggcaagagcacgctcgccgaggcgatcctgctggagacgggggtgaccaaccggatgggcaagccccgcgaagggacctcggcggtggacttcgatgacgaggagaaggagcggcgcttcagcatttatgccaaggccttcttcgtcaagcacaagggcaagcagcttcagttcattgatacgcccggctacgacgacttttttggcgaagtggtgagcgcctgcgcggccgtggagacggcgcttctcgtcgttcccgcggatgcgggcatccaggtgaacacccggcgggtgtggaagcgcgccgtgcagcaggggctgggccgcgccatcgtggtcagcaagctggactccgagggtgcgaagttcgaggcggttgtcgaggcgatccgggccacgttcggcaagggctgcgtgcctgtgaatctgcccgtcggctccggcccggccttcagcggcgtggtgagcgccctgaacccgcccgccgatgcggcagacgaagtcaaggcggccgccgaagccctgcgggaagcgatcgtggagtccgacgattcgctgatggagcgctaccttgagggcgaggagatcgcgccggccgaactcctggcggcggccagccatgccgtggccaagggcactctggtgcccatcttctgctgcgcggccgagaggcgcctcggggtgcccgagctgctggacggcatcgtggctctgctgccctcgcccgtggacgggctccagcgcgcctgtgtgatggccggcaccggcgaggccgtcgagcggcctgccaccgaggaggcccccttcgccgcccaggtcttcaaggccctctacgacccctacgtgggcaagctcgccttcctccgcatcttctccggcaggctcaagccggaggacggcctttacaactcccgcgccggcgaacggagcaagctgggccacatctaccggccgcagggaaaagagcaggtggaggtggattccgccgtgcccggcgacatcgtcgtggtcgccaagatcgagtcgctcgaggtctcggacacattgtgcgacgagcgcgaccccgtgacgtatcctgcgatcgtgttccccgtgccgatggtgtcgcgcgcggccgagccgaagacacgggccgacgagcagcgcatgagcaccgccctctcccgcatcgcgagccaggacaagacgttcctcgccggccgggacgagcagacgggcgagctggtgatcacggggatgagcgacctgcacctcgacgtggtgatgagcaagctcgggcgcaagcccttcgaggtcgagatgaaccttaaggagccgcgcatcccctacaaggagaccatcggcggcaagaacagcgcgtcctaccgccacaagaagcagaccggcggccggggccagttcgccgaagtccacctccgcgtcgagccgctcgagcgtgggcaggacttcgagtttgtggacgagatctacggcggcgccattccgcggcagttcgtgcccgcggtggagaagggcgtgcgcgagacgatggcgaaaggcgtcatcgccggctgccctgtggtggatgtgcgggtggcggtctacgacggcaagtaccacgacgtggacagctcggaggcggcgttcaagatcgcctcgtcgcgggccttccgcgatgcgttcaagggcgccaggccccagctcctcgagccgatcgtcaacatggagatcacggtgccgtcgaagtacttcggcgacatttcgggcgacctgagcggccggcgcggccgcatccagggcatgggcgtcgagggcgaccagcagatcatcagcgcccaggtgcccctggccgaagtctccaattactccacgcagcttcgctccatcaccggcggcgagggcagctatacgatggagttctcccactacgagcccgtgccgccgcgcgtccaggaggtcatcgtggccaaggccgcaaaggccaaggccggcgaggaagaggagtagattccgccggttgtcccgcctgatcgccttccaggggccgcaggggcggcccctgtttcttggtcccgccagcgaatcccgtcggccctatctgtcccatgcgcaagcaggacggataggacccatgggaccgacgggacacgccccgggcctcccgtttgtgtttccccctgccgagggaatccgtataatggtgggcgccgcaggtccggctgcggcgcagggccgcttggagcacgacaggagcagccaccatggaactcgtgaatgagggcgagaagcagtaccgcgacggcgaccacggggtgaagtatctcttccgcgggccgcggctcgactggggagtcctccggttcctccccggccagcagctcggcacgcacttccacgagaaggtggaggagacgttctacttcacccgcggcgcgcctctcgtgattgtgaacgggcaggagtaccgtgtgcgcatcggcgacgccttccggatggagccgggcgacgtgcacaacatcgtcaacgacacccctgagccgatcgacgccgtgttcatcaagagcgagtacctgcccaaagataaggtggacgtgaaggcgtgacgcgcgaggcgcgccgcgcagacaggatgggcctgacatcgccacccgcgcaacgcaacccggcagcccctcgtaccgccgcctggtcttcattgacctcgagacgaccggcctcgatgcgcccacgaacgagatcatcgagttcgccggcgtgcgcatggtggacggcgaggtgagggaggagttcgcgcacctggccaacccagggcgcccgctgcccctggcgatcacgaaactcacggggatcacggacggcgaccttcggcgccaacccccgagccgagccgtcctgggcgagttcctgcggttcctcggcgacgacccggtcgtggcccacaacgcgcccttcgatgccggcttcctccgtgagaagtccgatggcctcttccgcaacaccgtgttcgacaccctcgaactcagccgcatcctgtttcccgcgctggagcaccacgacctcgacaccatggtgctcaccctgggcctcaaggtggaggagcggcaccgcgcccttgacgacgcccgcgtgctggtgcccctgtggcgtcggctcctcgagcggctggaggaactgccctttgaggtcgttgctgcgctgagcgccgtctccagcctcacgaactggccggcccgccacctgttcctcacggccgaggcgaagcggctgaccggggccttcgacgtggccgcgcccaactatcggcggctcctgggcgacttcagcgagacgatcgagcggggccgcagcgtgcggcgcgacttcgaccccagccagcggccgccgccccagcggctcgacgtgccgcggctcgtggggctgtttggccgcgagggcgtcttcgagcgttccgtgccgggctacgagctgcgcccgcagcaggcgcgcatggtcgaactcgtcgcccaggcgttcaacgaggggcggcacctgctcgtcgaggccgggaccggcgtcggaaagtccatcgcctacctggtgcccgccatccactgggccgtcgcgaacggcgacaagatcgtggtctcgacgaacaccaagaacctccaggagcagctcttcttcaaggacctgccgctgctcgagcgcacgctcgccgccaagttcgaggccgccctgatcaaggggcgggccaactacctgtgcgtccgcaagctgctctacctccttgaggaggccgagcgcgaactcaccgaggacgagcgcctggccctgctgcccatcctcgtgtgggccgccggcaccgagacgggcgacgtggccgagtgcacgggcttcctggcctttcgcgagcgggacctgtggcccaagctttgctccgccggcgatgagtgcggcgggcccaactgccgcgagtggcgccactgcttcctccagaaggcccgagccctgtccatgctggccgacatcgtggtggccaaccacgccgtcgtcttctccgaaatcggcatcgagagccccgtgctcccgccctacgcccatatcgtcttcgacgaggcccacaacctcgaggacgcggccaccgagcacctcggctgccagatcgatcgctgggaggtgacgcgcctgctccgtcgcctgctccgccgcgagaggaacgccctcgagcgcggcctgctgcccagcatccgctaccgaatgaagaagggccgcgagcgccacctgaccgatggcgagcagcgcctcgaccgcttcatcgtggaggtctacgctgacatcgaagaggtggagagccgcctcgacgtgttccttcagaccatcgaggccgtgttccaggccgcgcgcaagggcggcgacagcgtgcgctacgacgccgaacatcgcgacgagcgactctggaacccggtggactctgagaagaagacgctggtcgcgtccatcgcccagctccgccaacagatcgagcgcctcgccgaagggctcgagctgctcgccgagcgcgacttccctcaccgcgcggagtccatctgcgacctccgcggcctcgccgggcgcctggccgaggtgcaggagaccctcgacttcctcgtcgcggccggcgacgagggcttcgtctactggatcgagcagttcggccgcagggcgcccacgtaccgcatagcggccgcgcccgtgcgggtagggccgaagctcaaagagctcctctacgaccgcaaggacaccatcatcttcacctcggccacgctcacggccggccgcagcttcgagttcctcaaggaccgcatcggcctcgaccagatggagaaggggcggctcgtcgaggaagacgtcggctcgcccttcgactatgaccaccagatgctcgtgctcgtgcccagcttcctgcccgagcccgacgcagccgagcgcgacttctcggcgcacgtcagcgacgtcctcattgacatcttccgcgccagcgaagggcgcggcctcggactcttcaccgcctactcgatgctcaacgacgcctaccccaagctcaaggccgctctcgaggccgagagcatcctcgtcctcggccagggcttcgacggcgaacggcgcagcatcacgaacctcttccgccgcgacatcggctccgtgctcctcggcaccgacagcttctgggagggggtggacgtgccgggcgagtccctgagctgtctggtcatcaccaagctgcccttcgccgtgcacacggcgcccgtggtgcaggcgcgatgcgaggaggtgcaggcgcgcggcttcagctccttccgccactactcgttgcccagcgccgtcatccgcttcaagcagggcgcgggccggctcatccgcacgaagtccgaccggggcgtcgtcgtcgtactcgaccgccgcgtgctcacccgcaactacggctccagcttcctccgctcgctgcccaccggctatcgcacggccgccaacccgcggcacctgtccgacatgatccgcgccttcctgcgggccagagcccaggcgaaggaggcaccgtgaagcacctcgaccgtggcgcctactgcctgctgattcacctcacagctggtcgcgaggcgaccattggccggctcgggcgcttccacttccccaagggctactacgtctacttcggcagcgccatgcgagggctcgcggcccgcatcgcccgccacaagcggcgcggaaagaagctccgttggcatatcgactactttctggctctccccgcggcgaagctgttcgccgccgtgccccacccttccaacgagcgccgggagtgcaccctcaatcaggccatccagaagtggccaggggccaccgcgcccattcccgggttcggctcctcggactgcaagaggggttgcccggcgcacctgacctacctcggggatgacccgatctc

SEQ ID NO: 4496 - DNA, 9512 bp, synthetic construct
  source 1..9512: mol_type = other DNA
  misc_feature 1..9512: note = Synthetic
cgctactggagtcaggtgcatacccgaatggtatgaagttaagccacccgatgtgccacggtcggcttgtccgaccgtgtcctgggcggtttccgcccaatggatcgccttatcttcacgccattcgtgcataccccacaatgcgcaattcgtaatccgtaaccagaaaaggcgaagacccaaacaacgtggtcctctcttcttcttgtcacggatcacgaattacgaattacggattctccaaccgccttcacaacccttaagagcgccgcgagctcacgaatcggcagcgaattcgccgcgtcgctcttcgccttcgatgggtccacggcgacctccaggaacagcccgtcgatccccacggccgccgcggcacgagccagcgccggagcaaactgccggtccccgcccgaggccgtgccggccgcccccggcaactgcacgctgtgcgtcgcgtcgaagatgacgggccacccgaggctccgcaggatggcgagcgaccgcatgtcgaccaccaggttgtgatagccgaacgacgtgccgcgctcggtcacgagcaccttggtcccgccggcggaggttgccttctcgatcgcgtagcgcatggtctcgggcgcgaggaactgccccttcttgatgttcacggcgcggcccgtccgcgccgccgcctggatcagatccgtctggcggcacaggaaggccgggatctgaagcacgtcggccacctcggccacaggctccgcctggcagacctcgtggatgtcggtgagcaccgccacccgctccttcgccttcacgctcgccaggatgtccagcccgcgccccatgccgggaccccgatacgactccaccgagctgcgattcgccttgtcgaacgacgccttgaagacgaagggcagccccgcctcgcctgcgatctccttgagccgcgccgcgagcgcgtggcactgccgcgccgactcaatcacgcacggcccggcgatcagcagcagcggccctccgccgacctcaacgccctcggcgatcttgatgcgacgcgtcttcatcccaggtcaccacccatcctgatgtggtttctggtttcaggttccaggttccaggtttcaggtttcaggtttcaggtttcaggtttcaggttacaggtttcaggtttcgtaacacttcagcagtctaaagttccgcccccaccggccttgcgtcggtgggggccacttcgcttcgcagggtggcaacttcagatggctgaagtgttaccaggtttcaggtttcagaggaggacggtctgctcttgcctctccacccccgaaacccggcacccggaacccggaacccggaacctggaaccgtcctccgtcaaaggccggctctcacaatgtcatgcagcctgaggatgccgactgcctttccttcgccatccaccacgggaaggaccatgatctggctcgggcggtcctccatcaggtggagggcgtcgatggccatcgtgccgagggcgacgcgaatggggttcttcgtcatcaggtcgccggcggcgagctggaggatgttctcgtagcgctggagggcgcggcgcaggtcgccatccgtgatgatccccaccagcttgtcctcgcggtccacgacgttgacggcccccatcgccttgctggtcatctcgacgacgacctcgcgcatgggggtctgcgggcggacgacgggatgctccttgccgccgtgcatgaggtgctcgaccttgacggtgaggcgccggcccagggctccgccgggatgcgacagggcgaactgctcgggcgtgaggttcttccgtgccgccacggccatcgccagggcgtcgccgagcgcctgagccgcgatggcgctcgccgtcggcgcgaggcccagcggatccgcctcccgctccaccccgcagtcgagcaccacgtccgccgcctgcgcgatccgcgactcccccgctcccgtgaaggcgatgatcttcgggccgatcgcctcgatcgaaggcaggagccgcacgatctcctcgctctcgccgctcttgctgatcaggatgagcacgtcctcggagaacagcaccccgaggtccccgtgcagcgcctcgcccgcgtggaggaagaccgcgggcgtgcgtgtgctggagagcgtcgcggcgagcttccgcgccgccatccccgacttccccaccccgcaggccaccaccttgcccgagcaggccaggatcatctccgccgcctgggcgaacggctcccccaggcgctcccgcaggcgcaccagcgcctcgatctccgcggcgagcaccgctctgccctgttcgatcacctgctccggcttcaccggctcatcggccacggccgactcctcaagagcaccgcgccgcccgtgattataaccccatcccagggcgtgtcaatacctcgtcatcgagcttcctcattcgggagccgccgcactgaataatcccccttcccgcgcgtctacagtctacggagaggcattcggaaacgtggtttgacaccgtctgctccggtggtataatcctaagggcctcaaggagttggctggagcagcgatcgtgaggctgctgaggagacacacaatgaggacgagactgattgcggcaaccctggcgctcgcgacagccctcgccccgctgagttgcacgcccacccaggagggcgccctgctcggcgcgggcacaggcgccgccgccggcgcgctcattgaccatcatcaccgtggccgcggcgcggccattggcgccgtcgccggcggcatcatcggcggcctcgtcggctacagctacgagttcagcaagttctgccccgcctgcggccggcgcttccactacaccaaggtctactgcccgtacgacggttacgcgcttcagcccattcagtgacgcgccatcggtgcccgggtgcctccttccgcccctgagaacgtcgccctgagccgcgagaccctcgccgcctccaccgagcggaccctccgccccgcttcccgcgccaagcccgccatcatcctggccaactgggctggccgccgcgtgatcgtcaaggacttctcccggaactcctggctcctgcgccagctctacggccgctgggtcgtccgccacgagagccgcatctacgctcgcctcgccggcgtcgagggcgtgccggctttccacgggcgcctcgacgcctttgccttcgccgtggactacgtcgagggggcctcgctgaaaaccctcccgcgcaagagcctgccgccggacgtcttcggccggcttgccgctctccagcgggccattcacgcccgcggcgtcgtccacctcgacacccaccagagcaagaacgtcctcatcgcccccgacgggcgcccctgcctcgtggatttcgccacctcgatctacctgggcagcaattggctcgcgcgccgcatcttcgtgccgctgatgggcctggccgaccgcctcggcttccacaagctcagggtgcggtattgtgccggccttcccgcgccggcggcccgccggcagcggcggctcatcgcgttcttgagctggctctggcccccgagcgccgtccggcggctcgcccgcgccctccgcccccggagccgcaagtagaccgcctctcgcggcgtggagtctcctctcccgccatcgtggcgacaagcggcccgcttgtcgctttcagattcaccgctacgcagaaaaggacacagtaaggcccgggggcgttgtcgtcagtcccgaagggacgacaggacttagccggcggcttcagccgccggaacgggggaaacccacggcccagtcccgaagggacgacaggacttagccggcggcttcagccgccggaacgggggaaacccacggcccagtcccggagggacggcagaaccaaccccggagggtgacagggccgccgtttctgtcgtcccttcgggactgacgtgatctgtgcgacccaggcgcaagatcggggccacccggccaacatggtcaagatggccacgcgcgcaacacaggaggtggccatcttgacgccgcggccccaccacaggttcccaagccataagtccttgctacagtgacagatatattacttctcccgcgctcggcgtccgccttctacgctcgtcaagatggccacccccaccctcagaggcggaagtgcccccgcacgagagccgcgccgaagaccagcgccagcgccactatcgccagcacgagccagaaactcaccgcgttcgcgtgccgccccgccagccgtttccacagcctcgccatgcgcacccccattccccttaacggcccaaaaggagggattgtcagaaccggccgtttcgggggcacaagaaactgagagagatgctgaaacgaaagaggcccgtccgtgtcacatgatcaccctccgcgccttcctcaggggttgatcgtctgacggggtgtcctcaagtgcccatcattacaggacttgtggcatatcgccacccgatcacccgctcagatgatcattttctccccccctggaaatgatcatctgaggccctgagcgctcctgacagggattaacaatgcccaaaaagaaacgccacacatgggtggcgcttgggaatcgctccgtggagcgttgcctgcggaacgaaagtcgttccttactaggacttgaacgacaatcgccgctcagatacactagtggcgcttatactctctccgcgggcacttgtcaaggagtttttttatgagcacgggggaactcctgaactacgtcctcggactcgaccttggcgccaactcgatcggctgggcgctcctggccgcggcgcaggagggcgaccgccttcgtccgaccggcttggtcgctacgggcgtgcggatcttcgaagcgggtgtcgagggagacctggagcgcggccgcgaagagtcgcgcgcgcagaagcgccgcctcgcccgccagtcgcgccgccgactcgaacgcaccgcccgccgactcgagaaggttttccgactcctccagagcgccgggctgttgccccaatcacaaccccccgccgcgctgcccggcatcgaagtcccgaaggagaagatgacggcgcgcgagcggcgtgaggaacgcctgcgccacgccgccgaacgcgaggccatccttgcccgcctcgacgccgcgtgtctcgtccgctggtccgacaagctgacagcggagaaggcatccgaagcggacatcgcgctgctggctcaccggctgccgtacgtgctccgtgcaagagcgctggacgaggagttgccactggacgagcttggccgcgccctctaccatctcgctcagcgccgcggcttcctcagcaaccgcaaggccgcgcccaagaaggaagaagacaagggggtcgtcgaccgcgacatcgccaagatcgccgcggcgatgcaggaaacggaggcgcgcaccctcggcgagtacttctcccgcctcgaccctcagcaggaacgcatccgcgggcgttggacttcgcgcaggatgtacgaagacgagttcgaacgcctctgggccgcgcagaccccacaccacccggacgtgctgacgagcgacctgaagaagaaggtgaagcgtgcgatcttctaccagcgtcccttgaaggttcagaaggacctcgtcggcgagtgcgagttcgagtccggcaggaagcgcgcgcctatggctgtcctgtgcgcgcagcggttccgcgtgctccaacaggtgaacaacacccgtgtcttggcgcccgacggggtagagcggggactcaccccagaacaggcgggaacgctcctcgacgcgctcgaaacccaaggcgacgtgaagttcgccaaggccaagaagctcctgaagctgtcgcctcagcatgtcttcaagttcgagagtggcggcgaggacaagttcataggcaaccgcacagccgccaagctcatcggcgtcttcggcctggaccgatggaagggcttcactctcgcacagcgcgaacgcgttgttgacgacctcctgaccatccagaagccggagacgctgggccgccgcggccagagcttctggggcctcgacgcggaggccgccgacaacttcgctcgcgtccggcttgaggacacccactgccgcctctcccggctcgccatcgagaacctgctgccgctaatggagcgggggatgtcctatatgaccgcggccagggaaatatacggcgaacggcccgcgccgccgcccgtggaccttctgccggccgtgggcgaggccatgcccgcgctgcgcaaccccgcggtccaacgcgcgctcacggaactccgcaaggtcgtcaacgccgtcgtgcgcaagtacgggaagccggccgccatccgcgtcgaactcgcccgcgacctgcggaagaaccgcaaacagcgggagcagacctggaagcagaaccgcgagaacgaggggctccgcctcgacgccgcgaggaggctcctcgaagagatgcacatgcaaggccccaagcgctccgacatcgagaagatgctcctctaccaggagtgcgcctgtcagtgcccctacaccgggcgccatatctccatgcgcgacctcttcggcgacgccccgcagttcgacgtcgagcacatcatccccttcagccgctccctcgacgactcgttcctcaataagaccctttgcgaggtcgccgagaaccggaacgtcaaggggaacaagacgccctgggaggcctacggccacaacccgcaacgctggagcgagatcatccagcgtgtctcgcgcttccagggcaacgccgcccgcgagaagctccggcgcttccagctccagagcgtccaggagctcgaggatttcaccagcagccagctcaacgacacgcgctacgcctcggtcgaggccgtgaagttcctcaagctgctctacggcgaggaggcccagcgccgcaccattgtccaggcggcacggggcgggaccacccgcttcctgcgggaggaattcggcctgaaccagatcctcggcgacggcggcgagaaatcgcgcgacgaccatcgccaccacgccgttgacgccgtctgcatcgcgctcaccgacccggccacggtgaagatgctctcggacgccgcggcgcgcgcccgctccgagcgccgccgacgattcgcccccgtccccttcccctggggcggtttcgtggaccacgttcgcgcagcgatcgcgggcatcaacgtctccttccgcgtctcccgcaaggtcggcggcgcactccacgaggagaccttctacagcccgcccaagaaagaccctgcgaccggccgcgaatgcgtccacgtccgaaagcccgtctccgccctctccgagcagaggatcgagaatatcgtggaccccgcggtgcgcgccgccgttcaggcgaaactcaagcaggtcgggggcgaccccaggaagctcgccgacaatcctcccaagctcaaggccaaggacggccgcgaaatccccattcgcaaggtcagagtgcgcgaatacatcaccaccttcggcatcgggcagggcggcaaccgccaggtagtcacagacaccaaccaccacgtcgagatcgtcgagacccgcgtgaaggccgggcaggcgaagtgggagggccacgtcgtgagccagtacgaagcccttcgccgtctccgcgccaaggagccggtcatccgccgcgaacacggggaaggcaggatgttcatgttctctctcgcacttggggagaccgtgcagatgaggggcgacgatgggcaggttggtctgttcaaagtgactggtgtctcggtaacctctggagcgcacgtagacttggagttccgggcgattgcggatgctcgcccggcatcccgactcaggaaggaacagaaggagaaccccaagctgaaaggctggcgagttcgccgaacgcctgattctgtgaggcagtcttccgcacagaaggtgctcgtgaccccgctcggggaactccggagggtcggtcgtgactaatcggatgatcgagttgtcggatgggccggccagcctgtccgtgcggctcgatcaactggtcatcgcgcgcgaagagcaacccgaggtgacggtgcccctggcggacatcgcctgcctcgtggtggcccacccgcgggtgctgttcacccacgccgtcctcagcggcctggcggcgcggggcgcggcgttcgtcgtgtgcaacgagcgcttcctgcccattggcatgctacttcccctcgatgcccacacgacccaggccgagcagttcgccatgcaggccgcggcgccgttgcctgtgaggaaccgcctctggcggcagatcgtccaggccaaggtgcgggcgcagggccgccttctcgcgcgcctgcgcggcgatgaccagggcctcttcagtctggcagacgaggtgacgctgggcgaccgcacgaacatcgaggcccaggcctcccgccgctactgggccgcgctcttccccgacacgggcttccgccgcctcgtcgaggccgacgacgagaaccgcttcctcaactacggctacgccatcctgcgcgccatcgtggcgcgggcgctgtgcgccgcgggactccacccctcgttcggcctccaccaccatcaccgcaacgacgcctactgtctggccgacgacgtgatggagccgttccggcccatcgtggacgccgcggtagtgcgcatttgcgacgagcacggggccgacgccccgatggacaaggcgacgaaggccgtactctttgaggccctcctgggccgattcatcatcgaggaggactcccgcaccctcttcgacctcctctcccacaccgccgccacgctcgcccaggccctcgccggccagcgcaaggacctcgtgctgcccgaactctaatccccatgtggcacagccgccctccgctgtgtccccattgtcattgtgggcgggacgtctccgtcccgcgaggaatcacagccgagggcggctgtgccacactcaagaccggtgatgccatgccccagccacgccacctgtcggagttccgcgccatgtggcttgtcgccatgttcgacttgccggtggacaccaaggaggcccgccgcgagtacacgcgcttccgcaaggcgctcctccgcgagggcttcctcatgctccaatactccgtctacgcccgcttcttcgaaagcggggagaacgccgacgtccaccgccaacacgtccgcggcgcactcccgcccgcggggcaggtgcgcctcctcgccatcagcgaccatcagttcggccgcatggacgtttttcagggaaaaatgagggccgaaaccgaagaaccgcccccgcagctcatgcttttttaggcccgaaatcctcctaactctaggtcgctgctgggcttgggtgagaaagagtgtacctgagcggcgattctcgtcaagccccagctgcccgcggtgagctcgcctcgaggggcgtagtgtacctgagcggcgattctcgtcaagccccagcaaaccacaagagggggggcgcggagggggcag

SEQ ID NO: 4497 - DNA, 8714 bp, synthetic construct
  source 1..8714: mol_type = other DNA
  misc_feature 1..8714: note = Synthetic
ttccgtaaccgtcgcggctcggaagaccgctccgtaaccgtcgcggctcggaagaccgctccgtaaccgtcgcgggtcggaagaccgctccgtgaccgtcgcgggtcggaagaccgctccatgaccgtcgcgggtcggaagaccgcaaattgagatgaatcggagcggacttgaaatgagttgtcgtatgccgctacaattgcgccgtcctgcattctaagctgactcaaccgcatttcaggaacaggtgattcgtatgagctcacggttaaccatctttgtcatggccggaatgcttgcgcttgcgaccttcggatgctccggcggtaagtcccccgtagcacctcccgcgcttcctgtcgcgccggacaggtcgagcgaaacggaagggcatgtcatgtggggcgcatgggatttcacgatcgatccggtcagtctcgacgtgaaggtggagccgatgcgctcggcgggcaaccatttcaacgttacatcattcgtgatgccgcccacctgcgccgactgcatccacatggacgtgctggatgtcgacctgacgaagagcctgttcagtgtgcgaatcatgctgaagaacccgaccgcgctcaccggctatgatgtgcgcggcatagtgtttctcaagggaccgcagcagctcagaagcgccgacaactggaccgctctgttcgacattccgggcgactacatgcggaatccgttccaggctttcgcgaaggagaagggtctgagggctttcggaggcggcgagactcattcggcgacataccgcctgattctgcctcccggcaatatgtcggtcagcttcgcggttgatgcgagctttcccaccaactgcccggagccgtacgaaatggacgtgatcaaggggatcggtttcctgggcgacaatgccgtgtacagcgaggtgatcgaggtcggggtcagggactggcagaacgatatcgcggccgtgcagctggatctcagctcgctcggcgcggcggctcccgtcaacctcacaaaccagggcggaacatggaaagccaccgtgtcgaattcgtacggtgctgtgccgggcatgtataccgcatggctgcagactttcagcgctgcgggtccgatgctttttcagccggtccaaatccaggtcaaagcattggggcaggaccggcttcccgaggtcctcagcctgatgcacaactggaaatcggacgggtccccgaacgagcagctctccaagagcaatttcaaataccaggggagcgatctcagctggatcatccccgatcagggtcacggagacacacgtctgccctactatgacggcattcatcgcgagccccttaccacggtgccctactgcataaaccttctcaataccgtcgagtctcagaccgacccgccaaggctctacaacctgctcactatcggaagccagcagctgggagagagcttcgcaccgacctcgtttggatactctcccacagcgtccccgatcgccgacgcgatggaatcgttgtacaccgtgatcggctcgacgctgtcgcagtccgacaagaacacgatcgcgtcgcagacctccggcctccctatcgacttgcagtacatgaccgcagcgatgctgaaggctgttacggagggatacgcataccgccagacggcgatctcgggatactcggaagatgcgaagaacattctgttcaacaacggcaccgactgggtctacggcacgtccatttacttcgcggtgctcgataccgctgcgagtttcgattacccgaacatgtatcgcgcggcgggtccggtgactcaggcgctcgacggcacgaggaatctcggcctgtattatgtcccgcagacatcgtcgccctggagttgggacactccgatcggcatggtgaagatcggggggtccgggaatgacacccacgccgcggatgagtatctgctcgtcctcgaccccggcggcgacgatacctacaactgccaggccggcgccaatgtgtctctgaataacccgttctcgatctgcatcgatctcgccggagacgacaagtacaacgacaacggcagcggaaagtacgcctacggcgcagggagaatgggcgtgggagtgctttgggatgtttacggggacgatgtgtacaacaatttccgcggctgcgagggtttcggtcactggggcgtgggcctgatcctggactccggcggaaacgatcggtacaactccgacggcaccagccagggctcggggtacatgggcatcggtatgctgatcgatgaatggggcgacgatcagtacgactgctaccagtactcgcagggattcggcttcgtgaaaggctggggcctggcgtacgatcacgagggcaacgatcgctggacggcgaacgacacggacatcaaatatccgagtgcgcagaccgcagagcacaacgtgtcgatgtcgcaggggcagggattcgggctccgatgggattcgcagaccacgttccagtcgggcggccagggaattctcttcgaccacgccggcgacgatcagtattcgtgcggggttttcggcggaggctgcgcgtactggttcggcaccggaatccttgcggactacggcgggaacgacacgatgtacggcatctggtatgtatatggagcgaccgcccattacggcactgcgttcctgctctcgaagggcgacggcaacgactcgtacaccaccacaacgggagtcggcgtaggcggcggacacgatttctccaacaccttcttcctcgaggaaggcggcaacgatacgtacgatacgacggcgcactcgatcggggccggcaatgaatgcggcgtcggcgttttcgtggactactcgggtgacgacaactacgtcacgcatcacgagatgtcggtgggcaacgggaactactcggtcgaccgcgtacgcggcagctggggcgtgtatctcgatctcggcggcacggacacctacacggcggaaaagatggcgcagggcgcgggcgagaacaagacctggaccatcaacgatatcggcgccggcggcaattaccccagcggcatcgtcctgtggcagtaggctgtactactggccggaatgtgaagggccaaaagaaaagccttccactggggaaggcccgggacgctccttggagcgttgcctgcggacagaaagctcttactccttactatgggaagaaaagcaatctccgcttaggtacggtttcaggataatgaacatccgcctacttgtcaagaggagacttccgtattatgctctaatcccttcagatggaaggctatagggggaaggagccctgatcatgacttcacagacggaaggcgaatacgcccttgcgatcgaccttggcgcgagttcgatagggtgggtggtgatggagagcatgcctgatgctgttttcggggcacagagcaggtttcggaacgccggcgtaaggatattcgaggctggggtcgaaggccagctggagtccgggaaagatgaatcccgcggtaagaagaggcgggaggcccggtcggccagaaggcggctggaccgcgtctccagacgactgggtgacctgttccggatgctccaaaggcatagcctgcttccgcagtttccgccggaagagcttagacatgccggggatgatgcagcgcccgaactgagccggcgattcgcgagggccggtgctcgcgacaggctgatcgccgctctggatgttcagcttgtgcgcaagtggcaagagcggttgcgtgccgaggggaagaccgaagctgagatgcgatccctgccaaggaagtttttctatgtcctccgggcaaaagctcttgacgagaaactggatctccacgaggtcggtcgagctatctatcatcttgcgcagcgtcgcgggttcctgagcaatcgactggcccgcggcaaggacgagaaggacgagaaggagatgggcaaggtcaaagagcgaatcggccacctccggaaaatgatggaggaacaggggagccggacactaggcgagtatctcgcgggacttgacccggacgaggagcgaatccgaaagcgttggacatcgcgacagatgtaccagcatgagttcgatacaatctgggctgcgcagcaggccttctatcccgacattctgactgatgaactcaaagcgaagatcagcaagcgcattttcttccagcggcctttgaggagccagaagcatctgatcggagagtgtgagcttgagcacggacagaaacgagcccccatggccatcatggcggctcaacggtttcgtatgcttcagcaggtaaaccacacccgcgttatcacgaaggatggggaggtccgctggttcaccccggaagaaaggcaagccctgttgaacgtcctggatgtcgatggggatctgaaattcacaaaggcaaagaagctcaaggcgctatcgaatatcgactccttcaatttcgaggaaggcggagaagagaaattccttgggaatcgcaccgcagccaagatagcacccgttttcggcgttcgatggaacgagttcacggatgccgagaaggatgagatcgtgaatgacctccgcagcttcgaaaaggaagagccgcttgtcaagcgggcgaaggaccactggaagctgagcgaggagcaggcgaggaagtttgcggggatcaagctcgaagacatgtattgccggctttcgcgacgcgcgttgcgcaagctgcttccgctaatggagcaggggatggcgtatatgacggcggtcacggaggtttacggaccgaagcaagcggcggaggcgatggattctcttccccggatcgagcaagcgatgcctgagctgcgaaacccggtggtctttcgcgcgctcactgagctcaggaaggttgtcaacggcatcgtcagacaatacggcaaacctgaagtcatccgcgtcgaactgtcgcgggacctgaagagaagccgaccggagcgcgtcgcggcctggaagaagaaccgagccattgagaaggatcgtgacaacgccgccgccagaatcaccagcgaagccggtgttcagaacccgacgcgcgcagatgaacagaaggtcctcctcgccgaggagtgcgactgggcatgcccgtacacaggcaagtcgatcacgatacaaggtctctttggacctgagccgcagttcgatgtagagcatatcatcccgttcagccgatgtctcgacgattctttcatgaataagactctctgtgatatcgaagagaaccgcaacgtgaagcggaatcgcagcccctgggaagcgtacggtagtaacccggagaaatgggaacagatcatgcagcgcgtgaagcggttcagaggcgacggaaggcttccgaaactggagcgctttgctctcagggaggaggaattggagaagattctcgaagacttcgcgaccaggcagttgaacgacacacgatatgcttcccgactcgcggtcaagtatcttgagttgctttatgggccggaagcccaaaagcggaaaatcgtgcaggttggcaggggacagattaccgcctaccttcgaagcgagcttgggctgaacgcgattctgggcgacggggaccggaaaagccgcgacgatcacaggcatcatgccgtcgatgcaatcgcgatagtcctcactgatcccgcaacggtcaagatgatgagcgatgcagccgctggggccatgagcgcacggcgcaggagattcgccccgattccaccgccctgggagagattcctaaatgacgctcacctcgctattgaagccatcaatgtctcccatcgcgtctcacgcaaggtcaacggaccgcttcacgaggagacattctatgcgccgataagaagctgtggcgatgggagcgagataggctgctaccacaagcgtaagcccttgagttcgctttccgagggtgaggtcgagaacattgtcgaccctgttgtgcgggcaacggtcaaagccaaactcgaacaaacgggcaagaaggctcccaaggatgcgttcgcggacgagactaatctgccttgtctgcaggccaaagacggacgcagaatcccaattcggaaagtgagagtgaaaacgagcgtcaatgccttctcgataggcaaggggcccggtcagcgtcatgtggtcaccgatacgaaccatcacatggagatcattgagacgaaggacaagaagggcaatgtcaaatgggagggacgggtggtgagccgatacgaagcaatgcggaggcttcgcgcacacgaaccgatcgtaaaacgcgatcacggccccgaaaagcgattcgtcttttcgcttgcgtgtggagagatgttcgagatagagaacgaggaactggcagtgcgggaccgcttcgtcgttcgtggcatttctcaatacgctgcaggccaatgcgtcatctcgcatgtccgaccggaggacgcgcggaaagtacctgatatgaggaaaacaggcgactatcgcagaatcacacccaatgaactgcgaaaggccgattgcaggaaggtcactatgacccctctcggggaggttagaaacgctaaagactgaccgacttccgtccgataacaacaatacggatatgtcctttcctaaacacggaactatatccgtttcggaggggccatggtcacggatcgcatcatcgacgtttcctcggagcctgcacggctcagcatcaggtataagcagctcgtgatcgagaacgacggggaggagcagacgaccatccctgtcgaggacatcgccactgtagtggtctcgaatccctgcgtctcctacactcacgcggtgttctcggaacttgccgggaaaggcgccacggtggtcatctgtgacgggaagcatcttccggccgccatgatgatcccgctggtcgcgaactcgactcagaccgagcgcttcgccatccaggccgtaacccacatacccgtcaggaaaaagctctggcaacaggtcgtcaaggcgaagatcagggctcaggctaagcttctgatggatgtgcgcggcgaagatatggggcttatggctatctcccggcgcgtaagctcgggcgattcggagaacatggagggaacggcctcgagacgttactggcccgcgcttttcaacgacgaagcattcgtgcggcgacgtgacggtcccgaccagaaccgtttcctgaactacgggtacgcagtattgcgcgccatcacggcccgcgcaatctgcgcctcgggacttcatccctcactcggcctgtttcatcacaaccggtatgacccgttctgtctggccgacgacctgatggagccgtaccgccccattgtcgacagggcggttgtcgcctggatgaaggaccatgatcccttcggagaggtgaaccgcgaggtcaagcaggcactcatcgagcccctgaccggtcgcttcgtggttgacggcgagtgcagaaccctcttcgacctcatcggcaggactacctcttcgttggccgccgtctacgagggaaagcggacctcgctcgcccttcccgagctgtgagggctgcaacgtggctcgcaaaaacaaccgaccaccggccatttcggagttcagaggaatgtggctattcgctctctttgatttgccagtcgaaacctctcaggacaagagggagtacgtcctcttccgaaccgaactcctgaaggaaggtttcaccatgattcagtactcggtttatgcccgatatttcgggtcggaggaatcggcagaggtccaccggaagagaatcaaggaggcccttccgcctgacggccatgtccggttgctcggggttacggaccatcagttcggcaaaatggagatttacttcggaaaaaaacgggtcccggtggaggaaccgcccactcaactcgcccttttttaggcctgtaaatgctctaaatcccgctaccggagcgggattaagagggattagattgtacctaagcggcgactgctttcaaaccacagccggggaatgggaacactccacgaggccgggattgtacctaagcggcgactgctttcaaaccacagcggacgtatgatgtacgtcactcgctttccgattgtacctaagcggcgactgctttcaaaccacagccgtccgagtgtcgtctcgcaaagtcccctgattgtacctaagcggcgactgctttcaaaccacagcctgacttccatagtggacccgcccctggcaattgtacctaagcggcgactgctttcaaaccacagcgcggtttggcaggcattcggattcggttggattgtacctaagcggcgactgctttcaaaccacagccgagcgtacaaggtggttatagggccggggattgtacctaagcggcgactgctttcaaaccacagctagagcaccctcgtatcctgagcggaccccattgtacctaagcggcgactgctttcaaaccacagccactggtgtaacgttacctgtccgggatgcattgtacctaagcggcgactgctttcaaaccacagcgtcttctatgagggaaccaagaccagtcagattgtacctaagcggcgactgctttcaaaccacagcagaacgtgggcgatgctgacggggtcgacgattgtacctaagcggcgactgctttcaaaccacagcacaacctcagggctgcacaactgacactacattgtacctaagcggcgactgctttcaaacca

SEQ ID NO: 4498 - DNA, 8236 bp, synthetic construct
  source 1..8236: mol_type = other DNA
  misc_feature 1..8236: note = Synthetic
ctctttttatgtactgatagaaccttttcccctcacccaacaggttgaagcaatctttgttttcatcgagtttagagaaccaatcggcggggaatgagttgccggtgatttcttcttctacaagcggattacctttgcaccaatagagcaaggccagaaggaaccggatgatcgccactcggtccatgggattgctggcggcgatttgtctaatcttgcctgcttgcgtgagcgcctctttgatgccaacgcgcgtgaccttgccgttgttccaaagcaccggaatccagttttctttgaggagattgaagttttcattcgggttcaatgttttcgctcctttttgctatggtttgatcgtagcatgctttaatgacagattcggtcattaaattgcattttttttcaattcattttgggtttatgaatcgcccccgctttcttggcgggcagattagcatcaagcgaccaatcttgtcaactggttttttgctctgtgctgtctgcgggggccggcctgcatcagctatctgccgactattgaacgctcgtatcgcttggggttttgccctgcccggataattcggtcagatactggccactctgaaactttcgctcaagaggtcctgcttattcgaagatggtcccacctggaccagatattcgatttcctccacccgccagccggctgaatcggggtcatagaaagccaggtccgccgcgggaacttccagggtgacggttttggtctcgccgggtttgagcgcgacccttgcgaatgccttgagctctttgattgggcggtcgactttggagccgttgtatccgacataaagctgcacgatttcctcgccggccacgtctccggcgttcctgacatccacccgcgccaccagttttccggatcggccaatggttttttgcgcgagccgcaaattggaatatttgtaggcggtatatgagattccgaacccgaagggaaatgccggctccagtccgtgtttgtcaaaatatcgatagccgtggtaatagccgtattccactttgcgggctttgttatcgaatggatagagctgttcatttgatttggggatcacgattgggagcttgcccgaggggtttacgtctccgaagatgacgtcggcgatggcgtttccggcctccatgcctccgtaccaggccaggagtatggccggcgcctggtccttccaagcctccatggtgaccgcgcctccggcttcgatgaccaccacggttttggggttggccgatgcgatctcgcggatgagcgcctcgtgcttgtcggacaggttaaggttcaagcggtcaaacccctcgttctcgtccaggtgcgagagacccacaaccaccaccgcagcgtccgcatgttcagccttgtcccgggcggaaatgagatcaactccgtcgtcgaaaattatcgcgatgtttttgcccgcggcgcgcctgatgccttggagcggagttacggtataggacggctcaaacgcggttgatccggttgctccgaggttgactttgtcggccagttcgccgaacaccgccagggtcttgatctcgccgcgcttgagcggcagggtcttgttttcgttcttgagcaggaccatggctttttgcgcgcattcgcgggaaaccgcggcgtgttcgggtcctccaagcttgctccggtcgtaatccgtgctgccctccagatggatgaaccggagatgctgcccgagctggcgcgagaccgcctcattgatcttgtcgattttcaccctcccggtctggaccgcagacttgagcttccagtcgtaaaacctcctccggtccatttccacgtcgcaaccggcattggccgaagccgcggtggacttgaggctcccgaagtccgagagcacaaaccccttgaagccccattcgtttttgaggatgccgctcaggagatgcgagttttgcgcgcagggctcgccgtttaaagtgttgtaggcgttcatgatcgaggccgttcccgcgtccacgcaggccttgaaatgcggaagataaatctcgcgcaaggtgcgctcgtccatccgaacgtccacgtaatggcgcgacttgtcaatgctgttcccggcaaaatgcttggtgcacgccatcatgtggttctgaacgccccggacaaccgcggcgcccatcatccccaaatgataagggtcctcgccaaaggtctcctgagaacgaccccaactcggatgacgcaacaagttaatgcacaccccgccgaaaaaattcgcgcccccggaacggccttcataaccaatgacgttgcccacccgctcttccagcgccgggtcccaggtcgcgccccgggccatggccgcggggaagcaggtcgcgcccttgaaacggatgccccgagagccgtccacaaaccggatgccgggaatgcccagacgctcgcacccgggagtgttgttggtccggaaaggagaatccttgacctgcgtgaacgggccaatggcgccggccatcatcgcgatcttttcgtccagggtcatctgcccgaccaggtccttgaccttctgcgcgatcgcgctttcgctcagccgcgcgcccgcagaccaaacccgacgcggaaacgccatgatcgacgatgccaccgccgaaaccttcagaaataatcttctgtccattctttaccctcccagacttgaatattcaatctttgttgcgccaaaatgtgcgagcgacttcagtcgcgaatcaacgccattctaacccggcatcaaaacttcttcaatgtgcgaggggcttcagccccgatatcatctctaagtgtacggcagagccgaaggctctgcctatcatcgatttcaagccagttctgaccgaagctgtcattaacatcggctagaataccaggcatatgagacgcctcatccaaagaaaaacgccctccgaagagggcgttaaggtcgctcatttgagcgttgcctgcggcgcgaaagcaccttactgtgaaaagaagggcaatcaacgcttagatacactatttggtatcatagcggaatctaaaatcttgtcaagtaaaaaatattatatttttttctaattgatttctattgccaaattggtataattcattgggcatggggcacaaagcaaaggagggggtcaaatggttacgacaaaaggcggcaagtatatacttggtatagacttgggagcaaattcaatcggttgggccttgctcgaggccggaccgtccaaagagggcgatgggaagctaaagccttttgcgattaaaaaagccggggtccgtgtctttgaagccggagtggaaggggacattgagtccggcaaggacgaatcgcggagcgtgtcccggcgcaacgcaagaggcgcaaggcgcaggattgagcggactgcgaggaggatgagccacctttttcatctcctgcaaaaggccggattcttgccagccggagacggaaccgccctggcccacaaagaaaaagggaagcatacagccgaggaactgcgcgaatttcgtatgaaagctgctgctgaacggcacaagatagtcaatgaattcgacctgcaattccttgccaaacttgggtcaaaggatgaacttgctgccaagaagctgccctatcttttgcgcgcaaaggctttggataaaaagcttgagccgtttgagtttgggcgagccctttaccatcttggtcagcgacggggtttcttgtccaaccgcaaagccaactctaaaaaagatgatgaactcggaaaagttaaacagggcattctggaacttgagggcaaaatggaagagcttgacgcccgcacccttggcgaatatttttccaaaaccaaccccgaagaagtccgcatccgcagccggtggacttcgcgcaaaatgtatgatgatgaattcaactcgatatggggtgcgcagagcaaacataaccccaagcttgacgacaaacttaagaaagcaatccaccgcgcaatatttttccagcggcccttgaaaatccagcaccacttgatcggcaagtgcccttatgaacagggtaggcgcagagcgccctgggccatcctggacgcgcaaatgttccggaccttgcagcaagtcaataactcatatctcatttcacctgaaggagaggtgctcgagttcacgcctgaatggagaaagacccttttggatgaactggataagaaaaacgagatcaaattctcagccgcgaagaaattgcttggcttgaaaaaggaatatcagttcaattttgaaaaggacggcaagggagaattcctgggcaacagcaccgctgaagaccttatcgacattttcggcgaggagaaatggaatggcttctcgcgggagcaaaaggatgaaatcatccaggatgtattgagcatcgttagtgaagacgggcttgcaaagcggggccgtgaaaagtgggggctttctggtgaaaaagccaaagagttcggccagctccagttggaagaaggttattgcggactttcaaggcaggcgcttaagaaactcttgccgaggatggaaaaaggcaaaaaatatatggaagcggtgaaagatgaatacggcacggtggtttcgggcgacaaatttgaggcattgccgcccattacggaagtgctccccgatctcaaaaatccgactgttaagcgcgccctgaacgaactccgtaaggtggtcaatgcaattgtccgcgaatatggcaagcccgatattgtccgcattgagcttgcccgcgagatgaagaagaaccggaaggagcgcaaatccatctgggaccggaaccaggagcagcggacctggcgggaaaaggctgcggaagaaatcatcagagaagccgggatcaaggaccccaagcgcgcagatattgaaaaatatttgctatggcaggagagcaattgccaatgcccttataccggcaaagagataagcatcaagaagcttttcagcggcgatgtggacgtagaacacattatccctttcagccgctgtctggacaattccttcctgaacaagaccctgtgcctggccgaagaaaaccgcaacaagaaaaagaacttcacacccttcgaagcatacgcggggtccgatcctgaccagtacgcaaaaattctcgagggggtcaaaaaatttgaaggggacgccgccaaggaaaaattgcgcaggttccggatggagcacatcaaggactttgacgattttaccgagacccagttgaacgataccaaatatgcctccaaagaagccaaaaaatacatcggcctgctctacggcactgaacaattgagccgggtccaggcatccaaaggccagatcaccgcggatgtgcgcaatgtcttcaacctcaacaaggtccttggagacggaggcgaaaaaaaccgcgaagaccaccgccaccacgctgtcgatgctgttgccatcgcggtaaccgaccgttcgctggtcaagatgctgagctcgtcagcggccaaggccgaaaaagagttcagccccaaaaagtttgaccgggccaaaatcgaaaaactttggccctctttctttgaagatgtaaaagaatcgattatggccataaatgtttcgcaccgggtatccaaaaaagtcaacggacgacttcaccaggacaccttctatagcccgcccaaaaaagatgagcaaggcaaaagctattgctgcgtccgcaagccggtggcccgattgagcaagggagatattgaagacataatggatccggcggtccgagaggccgtgcaaaaaaagctcaaagaactcggtggcgaccccaaaaaagtattccaagacccccaaaaacatccgttcctcacggcaaaggatggccgcaaaatcccaatccacaaggtcagggtcaaaaatatcgggtcccccttccaggtcggaggccagggacgcgaacgcttcgtatcctccgacaccaaccaccacctcgaaatcgtcgaagtcaaagacaaaaagggaaacatgaaatgggatgggcacgttgtcagccagtttgaggccatgagaaggctcaggggcggagagccagtggtaaaaaaggatcatccgggggagaaatttgtgtgttcactggcacagaacgaatcagtacaattgaaagacgatagaggcaaccaggttgtgtgcacggtaaaaggaatttctcaactttcagcaggaccaataataataaccttgcgctataattcggatgcaaggccaacgtctgtatatcaacaacaaataaagaaaagaaaagaattgaaaagaacaaaagacgaaaaattggctgaagaattaagcagtgaaatgcccgtttttattttcaggggaccagaaagcctccgagaatcaaatggaaaaaagattttggtggacccactaggaaatattcgctgggccaatgactgatgggcgaccggatacttgatttttcgcaggaagcggcttatctgagttcgcggatcgggctgctggtgattgagcagaaggacaagccggagctgaccattccgtttgaggacattgcggttatcatatcttctcatccccaagtgcattataccaatgcggtgttgtccggtctttccgaggcctgcggcgttttcataacatgcaaccccaagcatctcccggtcgggatgatgctgccgctggccagtcattcaacccagggtgagcggttcatcgcccaagccaatgcttccgctccaacctgcaagcagttatggaaacaggtggcgaccgagaagatcaagaaccagggaaagctgctcaaggaattgtatggcgatgatgagggcttgatcgaaatgtcgaggaaagtgaaatcgggcgacaccgaaaacctcgagggctgggcctcgcgcatttactggccgaaaattttcggcgaccagcaattctcccgcgaccgagaggccgaagaccagaacaagttcctcaattacggatacaccgtgctccgcgcaatcgtggcccgagcaatatgcggcgcaggtcttcacccctcgctcggcatccaccaccacaaccgctacgattcctactgcctggccgacgacctgatggagcccttccgacccattgtggacaaggccgtggtccaacttgtcagggaaaaaggcaccgaagccccgatggataaagaagtgaaaggcattcttatcggcgcgctaaccgcaaggtttgacctcgacggcgaatcccggacccttttcgacatcatcacccgcaccgcctcatccctcgcccgggtcttcgaaggaaaagctgatgatctggtcctgccggaaatttttaccacagcgataccacggcagaatgaatagactcctgatcttccttgtgtcctttgtgtcgttgtgtttaaaaggattttagaatgcccgcatcaacctccaaagaactatcggagtacagatcaatgtggctatttacgcttttcgacctccccgcggtcacgcccgaagaaaaaaaactccacgccaaattccgcaagaacctccaaaagcagggattcacaatgctccagttctcagtctatgcccgatacttcgcctccgaagaaagggcggacatccagcgcgaaaaagtcaaagccgtgctcccgcccgaaggacaggtcagattgatggcgatcaccgaccgccagttcgggaaaatggaagtcttctacggaaaaaaacgacaacctacagaagacccgcccatgcaaatgtcatttttctaaacgccaaaacaaaaaaatgccccgaaatttcagcaagttcggggcgaaatagtgtacctaagcctcaattcccgtcaagccacagcactcgcacatgccgctcccgttcctgttcgagtgtacctaagcctcaattcccgtcaagccacagctccaccagcacgagcagtgaaataaacggcagtgtacctaagcctcaattcccgtcaagccacagcagcgggtgttggaggcgcctccggccaggtagtgtacctaagcctcaattcccgtcaagccacagctcctcgtcggcctgggccgcggccctgatagtgtacctaagcctcaattcccgtcaagccacagcttgcagcgattgcactgttgatgctgctggagtgtacctaagcctcaattcccgtcaagccacagcgccagcggatatatatccgcagggcgcgaaagtgtacctaagcctcaattcccgtcaagccacagcaccc

SEQ ID NO: 4499 - DNA, 7351 bp, synthetic construct
  misc_feature 1..7351: note = Synthetic
  source 1..7351: mol_type = other DNA
aggactactatcgcgtctggaatctctcgcgcaccaacctcagtcagggttggggccggcccagcaccgcctatgcggcccgaaaaggcgtgcttgttctcatggccagcgtcggtcccgattgcgttgaggatgtcgccgacggcagacaatacggacagcaagtcggtgtgcagggattggtgatttacgatcccaccaacggcacgatgagctggggcgacatttactacggcatgcctgcgctcggcttcgaccttcaacagaaaatcgttccctgatcgggcaacgctctgcattcccacgccaccggccaacaagccccgcgaaagaacagcgccacacgacagaagcccctaaatcaaaacgcccctttgaggggcgtcgtggcactccgtggagtgtcgattgcggagcggaagctccttactaagacttgacgaagcaaccgccgctcagatacactaattattactgtgggatcagtccccgacttccgtcaaggagaaaacgccatgggggagccgaattcttcatcgttcattcttggcctcgacctcggcgccaactcggtcggctgggctttgttccgcgcccaacaaggcggcgatggccgtctcaatcccgtcgccatcgagcaagctggtgtgcgtgtcttcgaagcgggcgtggaaggcgacatcgagaaaggcaaggatgtgtcgcgcgccattgatcgccgcacggcgcgactcgcgcgtcggaggctcgaccgcctggcccgccgcctcaatgcgctctatgcgattctgcgccgcgcgggcttgctgccgcccatcgccgagccgacgccaccaccgccgccgcccaatcgcaaacgcaccgcgcgcgagcggcgtgaattgcgaatcgccatcgcccaacgccgcgacaagtcgctggccgaactcgacaaggcgctcgtctcgaagtggcaagcgcgtcttcggtccgggggcgcgcccgaagaaaaagtgcgtctcgttcctcacgtccttccctatcttttgcgcgcgcgggcgctcgacgagccgctcactccccacgaactgggccgcgctctcttccatctcggccagcgccgcggcttcctcagtaatcgaaagtccacccccaaaaaagacgaggacctgggcgaggttaaaagccacattcacgagctggaagaaaaaatggccgggcaaacgctggggcagtacttcgccgcgctcgatccccacgaagagcgcattcgccaccgttggacttcgcgacagatgtacaacgatgaattcgagaagatctggtccgcgcagcagccgcaccatgccgcccttctcgccgacgaactgaagaagagcacctatcgcgccattttccatcagcgcccgctgcgaatccgcaaggagtttctcggcaactgcgaatgcgagcgcgatcgcaagcgcgcgccgatagccctcctcgctgcgcagcgtttccgcatgcttcagatggtcaatcacacacgcatcctatggaacgggctggagcggccactgacgaccgaagaacgtgccaagatgattgaagcgcttgaaagccaaggcgatctcgagttcggcaaggccaaaaaactgctcaagctcgggaggtccgagaagttcaatttcgaggaaggcggcgagaaacgatttctcggcaatcgcacggcggcgaaactgcgcggaatcttcggagagcgatgggactcacttttgcccaagcagcgcgacgacatcgtcaacgattggctcagtgttcagaaggactgggttctcgccaagcgcggcatggcggcctggggcctggacaaggaggctgcggcggagctcggcgcgctccaattggaagacggccactgtcgtctgtcgcgccaggcgctggccaaacttctgcccctcatggaagcgggcgagccttacacaacagcccgcctcaaggtctatggcgagcaatacgccgcgaaacccgtggacgaactcccggcggtcgccaaagccgttcccgaactgcgcaatcccgccgtcagccgcgccctgaccgaactgcgcaaggtggtcaacgccatcgtccgccgctggggcaagcccgccgccatccgcatcgaactcgcccgcgacctgcgcaacagccgcgacaagcgccagcagatttggaagaagaaccgcgaaaacgaaaaagcgcgcgaagaagccgccaggaaagttcttgccgagcgtgggaacccgaacccatcccccgaggacatcaagaacgtttctcgggccgacgtccaaaaggttcttttggcggaggagtgcaaatggatttgtccctataccagccacggcatctccatggcggcgctgctgggcccgcagttcgagatcgagcacatcatccccctcagccgttcgctcgatgactcgttcatgaacaagacgctttgcgaggcgggggagaaccgcgaacggaaacgaaaccacacaccctgggaagcctatcacgccgaccccaagtgggacacgatcatcagcaacgtcaaacggttccggggcagcgccgctcgcgtcaaactcggacgttttctgatggacgacgaagcgatgaagaagttccttgcggaaaacagcagcaaccaactcaacgacacgcgctatgcgaccaagctcgccaaggagtatctcggaatgctttacggtgacgaagcggccagccgtgttcaagcctcccgcggcggcgtcaccgctttcttgcgcaacgagtggaaactgaactcgattctgggcgacggcggcgagaaggtgcgtgaagaccatcgccaccatgccgtggacgccgtcgcaattggtctgaccgaccccgcgacggtcaagatgctcagcgacgccgctgcccgcgccgtccgcgaaggccgccgccgcttcgctcccatccagccgcccttcgacggcttcctcgacgccgtccgcgcctccattgcccagatcattgtctcccatcgcgtcgcgcgaaaggtcagcggcccgcttcacgatgaaaccctttacagcaagatgaagaaagatgaggaaggcagcccgtgcgtccacatgcgcaagcggatcgaagacctgaacaagccggatcaggtcgaggccatcgtggaccgtgtcgttcgagaacgggtgcgcgcgaaacttcaggaactcggtggggacttcaagaaattcgccgatccgggcaatcacccgtacatggagacaagagacggccgcagaatccccatccacaaggtgcgcatccgcgacaggcggtccacagtcccgatcggggagcatgcccgcgagaggagcgtgtggttgcgcaacaatcaccacgtcgagatcgtcgaggtcaaagacaagaaggggcacaccaaatgggagggaaagatggttactctgttcgaagccaagcggcggctgaatgggcgagagcctattgtccgtcgagaccatggcgagggcaaacagtttcttttctcgctcggacatgaagaaacggtgcggttgacgctggatggaggggtaggtttttacaaggtcacgaagttctccgaatctgcgaatgagcgtattgaaattgcattccgaagaaaccgtgatgcccggctggcaaaaaacctaccaaagggcaaggaaggtcttctgcggatgccacccgattcccttcgaaaagcagagctgtcgaagcttacggttgatcctctcggcgaactgcggcgggccaatgactgatcgtctgattgatctgtcggaggagccggcgcgtctgagcgtgcggcttgcgcaactggtcatcgagcgcaacgacaaggacgacgccacagtaccgctcgaagatcttgccgtcctcatcgtctcgcacccctgcgtctcctatacccacgccgtcctcgccggaatcatcgaggccggcggcgctttcgtcgtctgcgaccaccgccacatgcccatcgccatgcttctgcccgtcgaaagccactcgacgcaggcggagcgatttgtccgccagaccgaggcctcggagccgacgcgaaagcgcctctggcagcagatcgtggaggccaaggttcgcgcacaagggagactgctcaaagagcttcgcaacgacgatcacggcctttcggcaatggccacgcgcgtcatatcgggcgatggtacaaacatcgaatcgcaggcttcgcgccgctactggaccgccttgttcggcgaggagaacttcaagcgcgaccgcgacgccggcgatcaaaatcgctttctcaactatggctacgccgttctgcgggcaatcgtcgcgcgggccgtctgcgccgccggtctccatccctcgttcggcgtccatcatcacaatcgctacgatgcgttctgtttggccgacgatctgatggaaccgttccgtcctcttgtggaccgcgccgtagcgcgctgggtggccgaacacggcgtcggcggcgacctcaaccgcgaggcgaaggcggcgttgatcggcgccctcacgcaacgcttcgagatcgaaggcgagtggcgctcgctgttcgacatcgtggcgcgcacggcctcgtcgctggcggcggtctttgaaggaaaaagcaaggatctgctgttgccgggcgagtaggctacaggcgacaggctacaggcggcaggctgaaggtagtgtcaaaagttccatgaaagaatgatgctgtggaggagagagtactggttggtggaaggaggatgaacgatgagagatcaccggaagctgcgggcatttgagctggccgatcaattggcggtgcaggtttacagagcgacgactgatttcccgagagcagaacagtttggattgaccgcccagatgcggcgggcggcagtgtcggcagcttcgaacattgtcgaagggtgtgcgctattcaccgaatcggagtacgtgcgatttctggatatcgcttacggttccgccaaggagttgcaataccaggcgtcgctggccaatcggttgggttatctcaccgaccgggcatttggctcgcttgcggcattatgcgatgagacatccagggtgctcgggggcctgatccggtcctaccgcactcgcccctgacgcctgtagcctgacgcctgtagcctcacaaggattcttgcccatgcgtgacggcaaagaacgcgatctctcggagtatcgaggcatgtggctatttgcgatgttcgatctgccggtggacacggcggcggcgcgtaaggaatacacgcgttttcgaaaggccctgttgcgtgagggctttatgatgctgcaattctcgatctatgcgcgctacttcgcctgcgaggaagcgagcgaatcgcaccgaaagcgagtgagggcgatcatcccacccgcgggccaggtgcgcttgatgtcggtgaccgatcggcagttcggcaagatggaagtttttcagggaaaaaagaaagagacggcggagaaaccgccggagcaattgctgcttttttgaggctgaagggcttgtagccccccgtaaacattgggtttacggggggcggagtgtatctgagcggcgattcttgtcaagccccagcaatttcctgttaagatagtcgatcagaatcagtgtatctgagcggcgattcttgtcaagccccagcctagggcgcgaatgctgtcggccacgatttagtgtatctgagcggcgattcttgtcaagccccagctcgttgattgcgttggatgctctggtcgtcagtgtatctgagcggcgattcttgtcaagccccagcgattgagtcggcctcctgcggagggacaggagtgtatctgagcggcgattcttgtcaagccccagcatggtcggggcatgggagcaggcgattagcagtgtatctgagcggcgattcttgtcaagccccagcgtgaaaacatggtagcccattccgcaggggagtgtatctgagcggcgattcttgtcaagccccagccctactactacttccccgccgcgccctatcagtgtatctgagcggcgattcttgtcaagccccagccaaaggatgatcggaggcggggatgagagcagtgtatctgagcggcgattcttgtcaagccccagccgcgcgctcacaacccaacctcccccttcgagtgtatctgagcggcgattcttgtcaagccccagcagtttcctgttaagatagtcgatcacaatcagtgtatctgagcggcgattcttgtcaagccccagccggcgggctggacgatcgagccagagataaagtgtatctgagcggcgattcttgtcaagccccagctacaactcgcacatccgtcgaaacgattccagtgtatctgagcggcgattcttgtcaagccccagctatttgcagaacacgttgatggcgctaccgagtgtatctgagcggcgattcttgtcaagccccagctcccggcgagcgggcatgtgcgggagaaaaagtgtatctgagcggcgattcttgtcaagccccagccaaacgatgatcggaggcggggatgggagcagtgtatctgagcggcgattcttgtcaagccccagcggcttcgcctcatcaacgctgatagaaacgagtgtatctgagcggcgattcttgtcaagccccagccaaactcataaccgatgacccagtcgcgatagtgtatctgagcggcgattcttgtcaagccccagccgaaaatatccttggtccaaccgagaggttagtgtatctgagcggcgattcttgtcaagccccagcttcggacataccatcgaagagccgatagggagtgtatctgagcggcgattcttgtcaagccccagccatcaaagaaagccgaaagtctggattgcagtgtatctgagcggcgattcttgtcaagccccagctgactcctctgactttgtttcttccgttgtagtgtatctgagcggcgattcttgtcaagccccagcaaaccggaacgtcggatagcgcgagatcgtagtgtatctgagcggcgattcttgtcaagccccagcttgaatcatgtcttgctttcctcgatttccagtgtatctgagcggcgattcttgtcaagccccagcttcattgccgcaggttccccctccggaaaagtgtatctgagcggcgattcttgtcaagccccagccgcaaaattgcaacgggtattacgattccaagtgtatctgagcggcgattcttgtcaagccccagcctgtttctgcgcggcagcaataagaattaccaagttattaccattcagtgaagattcgccgtctcatctgttcaattccctgacctcagcctgcggggcgctaacggtggcgccgcgggca

SEQ ID NO: 4500 - DNA, 5970 bp, synthetic construct
  misc_feature 1..5970: note = Synthetic
  source 1..5970: mol_type = other DNA
gtaactcataatataaagctcaagcctgtgggaatggtagccgaagctgccccgcctcaagtcacggaggaagccttgccggaggacgcggaagagattctcatcgaaggcggcaggttagtggtccgcaacgttctttttgatttcgataaatatgacctgaaatccaccgccattccgattctcgaacggcttgtcgaatttatgaataagaactcacaagtccggataaaggtagacgggttcgccgacagcattggttctgaggattacaacctgagattgagcatcaaacgcgctgaggccgtaaagcgatatatggtgctccgaggtgtcgcggcggtgcggattgtcaccgaaggacacggggaagcgaacctggtggcgcaggatgatcccaagaccgggaacgaaaagaatcgccgggtggaattcagtctggtgagaggcacttacgccccgacttccaaccccaacaccagcatgcgcggaaagcagccgccggaaaatgtgcccaataaccagatggcggcgattggagtaactgcccttccgcctaccacagtctctccggcgcccgcccctgttattgatatcccctctgaattgacggtaaaagtcgcccttattgccactaatgtcgcggatcgcatcccttcggggactgggacggtttttccatcgagtgtcggaaggctttatttcttcacgtacatcgtcggcgctcagtcggaaatcaccgttacgcataaatggtactataaaggccaattgataagccgcatcccgttgaagatcaaaagtccggagttccgcacatggagctacgttgatatatcgccatcctggcaaggagctttaagagcggaaatcgtcgggccggacggaaaagtgctcagcaccgtccgattcacgctcgcaaaataaaaatcgagaatcccgaacataaaggggacgcgaatccgcgccccctttttttatccgcagatttcgcagatcaaatgatttgaaagcctttatgtgccggcagatggatcgtccgcgccatcgcgggcaaaaagccttttgaatatttcgtataaaaaatgaaacgccccaactggggggcgtttgggtcggctcgtaagccgttgcctgcggaacaaaagttccttactatggcttgacagaacaatcgccgcttaggtacactaaatatattctttcacattatgctatgtttgtcaataggtagtacaaatattttttcgtgggggtggaaaatgagcgataccaaaaacggcggatatatcctcggcctggacatcggcgtaaactccatcggatgggcaatactaaaagccgatgaaaacctcaatccaaccagcattgaggacgcaggcgcgcgtgttttcgaggctggcgttgagggtgacattgaatccggcaaagatgaatcgcgtaacctgaagcgccgagatgcgcgctcgattcggaagcgtctcgatcgcaacgccagacgtctgaacgaggtgttttaccggctgcaaactgcggaacttctacctaaatcgaatacaaaagggaatcaaacaggtgaagaaaagcaaagagtgcttaaggccaaaacacgccatgagatcataatttccttggataatgaacttatgaaaatgtggtgtgaaaagctccaaacgggcggagcgacaaaagacgatttgcgattgtttcatttaaagtttccatacttcttgcgcgcccgcgctcttgatgaaaagctggagccattcgagctgggccgcgccatttatcaccttgcgcagagacgcggattcctaagcaaccgtaaagccttgaaaaaggaagacgagaaaaagggagaagtaaaaaaggggatagacgaattatcgcaatttatgcgagacacaaattcgcggacgcttggagaatacttctcgaaaatcaaccccgaagatcggcgtatccggcagcgatggacatcccgcgccatgtatttagaagagttcgagaaaatctgggccgctcagaaatcacatcatcccagtgttttgactgacgaattcaaagaggaaatcgaagacgctattttttatcagcgtccattgaaaatccagaaacacctcatcggcaaatgcgaactcgagacaaacccgcctcgaccgcgagcgccgatggccatcctcgatacgcagcggttccgaatgctccagatggtaaataatacccgcgttattccggagtatggagaattgcgagatcttgaaccgactgaacgcaacgctctggttgatttgctccaaacaaacggcgatacgggtttcaaagaagcaaaaaagaaattggggctatccaacaaatccgttttcaattttgaggagggcggtgaaaaacgatttctcggcaaccgaaccgccgcaaagctcgaagaagtattcggcgaaaaacgctggaaagaatttaccgaggatgaaaaaaatcgaatagtggaagattggttaagcattcagaaggaagaaactctcagacgacgcggcaaggaagtttgggggctggacgatgaatcggcgaaaaagtttggagagttggaattggagcagggctacgctcgcttttcgaaagcggcaataaacaaattgctgcctttgatggaaaagggcgcgcgaaccaaccacgccatttacgaagtttacgatcctcctattccggaaccggatgaattcctcccgatgatcacccaaaaactcatgccggaattgcgaaatcccaccgttagtcgttctttaacagaacttcgaaaagtggtgaacgccgttctccgcgaatacggcaaaccggtaaaaattcgagttgagcttgcccgcgatctgaaaaaatctagaaagcaacgaaaagaactttctgataagatgcgccagaaccaaaaagcgcgggaagaagccgctgcatcaattatgaaagaagcaggtataactcagcctaaatctggcgatattcagaagtacttgttggccgttgaatgcaactggacatgcccgtacacaagcaaaagcattactccaaaagctcttttcggagatcatccccaattcgatatcgagcatattattccgttcagccgctgcctagacgattcctttatgaataaaaccctatgcgatcataatgagaatgtgcacggcaaaaagcaaaggactccttttgaggcttatagtgccgatcccgaaaaatggaacgaaatattgctgcgagttcaaaaattccaaggagaggccatgcgtgcaaagctgcgcagattcaagctcgaaagcaaaaccgaagatgcggaaaaaatattcgaggatttcgcaaccaaccagctaaacgacactcgatatgcgtcgaaactggccaagaaatatcttggactgctgtatggcgaggaggcgaaaagccgaattcagatcgggcgcggggcaaccacggcgtttttacggaacgaatggaaattgaataaaattctcaacgacggtggggaaaagaaacgcgacgatcaccgtcaccacgccgtggatgccgttgccatcgcgttgaccgggccgaaaactgtcaaaatgctcagcgacgccgcatatcgagcggtgaaagaagggcggcgctggtttgcgaatgttcagccgccttgggacgggtttttcgaggacgcttgcaaagtcatcaactcgattattgtctcccaccgcgtttcccgaaaagtcaacggaccgctccatgaggaaacattctacagcccgcccaaaaaagacagagatggaaaagaatatcattccgcccgaaaatcgcttgacgcgctctcaaaagacgatgtggacaatatcattgatgacacggtcagggaaaaagtcaaatcaaaacttgccgaattcggcggcggggagccgaaaaaagtttttgcatcccccgaaaatcatccgcatctcgatgcgaaagatggaagaaaaattccaattcatcgggtgcgcgttaaaaaatcggtttcaccgttcaaaatcggaaaagggttaacggaacgatacgtaacaaccgacgcgaaccatcatgtcgagatagtggagattttggataaaaaaagaaattcgaaatgggaaggacacattgtaacacaattcgaggcaatacaacgccacagaaagggagaacctgtcataaaaacaaaccacaacgatggcaagaaattcttattctctctcgccggaggagaagtcatcgagattgatgagggtaatgggaaaagaggattgtatataattcgaactatcgccaagatgaaacaaggaaaaaacgaatatgtcaatcttgctttcgttccgcttaacgatgccagaatgaaaaaggaaattattgcaaaaaaagaatggagaacgtctttaatagatccactcagaaaattgaattgtcgcaaggtatctattacccctctcggcgaggttcggcgggcgaatgactgaccgcatcatagacatatccgacgaaccggcgcgattaagcgtccggtacgatcaactggtgatcgagcgggaaaatcagccggagaccacagcgccgcttgacgagatcgccgcgctggtggtttccaacccgcgtgtgagttacagtcacgccgtgctttccggcatcgcggcgaaaggggccgcgctgatcgtttgcgacgaaagacatctcccgacggggatgctgcttccaatcgccggacatttcactcaggccgagcggttcgcgcttcaggcggcggcgtccttgccaactcgcaaaagactatggcagcagatcgtgcaggcaaaagtcacatctcaggggaagcttctggctgagttgcagggcagcgatcatggactgttcgcaatggctaaacgggttaagtccggcgattccgaaaatgtcgaagcgaaggcgtctaagatatactggccgaacattttcggtgacaaatccttccggcgggatcgagccgccgatgaccataaccgccatttgaattacggctatgcggtgcttcgcgccatagtggctcgcgcgatatgcgcggcgggtttgcacccgtcgcttggagtgcatcaccacaaccgctacgacgcgttctgcctcgcggacgatttgatggagccgtttcggcccctcgttgacaaagcggtggcgaaaattctaacggaacgcggcgcaaatccgccgatggacaaggaagcaaaggcggagattatcggcgcgattatcggccgattggaaatcgcgggagagtttcggacaatgttcgatatcgcgtcgaaaaccgcgtcgtcgctggcggcggtgttcgccggggaacggaatgatctgttgctgccggaagggtaattggcagactggagagtctgccccacatgtggcgcaggttctccaacctgtgctggataagccatgactgatgaaaccaacaatctttcggggtataaagccatgtggctatttgcgcttttcgatctgccggtagattcgccggacgcgaaaagggaatacgtccttttccgtaaggtgttgttgaaacagggattcaccatgcttcagtattcggtttacgcccgatactgcgcatccgaggaagcgagcgaagcgcgccggaataaagtccgcggctcgctccctccaaacggacaggtcaggttgatctccgtcaccgaccatcaattcggaaaaatggaagtttattacggaaaaaagcgcaaaccagtcgaagacccgcccatgcaattgtcgtttttttgattgaaaagaaagacgaaacccctcgtaagtcagccggttacgaggggttcagtgtacctaagcggagattttctgcaagccacagcattatattcatccacctctgacggcgttttagtgtacctaagcggagattttctgcaagccacagcgccgaagaaccagcccaggtcttccatttcagtgtacctaagc

SEQ ID NO: 4501 - DNA, 23246 bp, synthetic construct
  misc_feature 1..23246: note = Synthetic
  source 1..23246: mol_type = other DNA
ctgccggtcggcgcgatcttgaaagacccgggcgccccgttccatcttcgcggcattttgctcgcgtacagacttggagttggcccgttcaccagcactcatccgactactgccccgccggatttgggcggccttttcatgtcgagcttgggccgcttgtctgagcttgcgtcgttcaacctgcccctgccgataggcactctgggcggtctgccgttgttgcttacgggctgtattgaaggcagcaaaattgccattgaattgcgtataaacatggtcgtctagtgaccagatcgtagtcgtcacagcagttagtaactcccgatcatgcgaaattaacaggagcaaacctgaatagtggcgcagctgctctatcaaccactgctgatgattgtcatccagattggctgagggttcatccaaaattaaaatagctggccgtcgtgccagtgcccgccgcacccgcgctaacatgctttgaccaccagattggccatccatgggggccaattgcggcaccaaaacgacgtcagctgtaacgttccgttgaccactaaactcatcgtcttgccccgcaataatccgcgccagtgtcgtttttccaccaccattagcgccgataatgcccacgcaatcaccagtttgcgcggtcaaacgatcggctgagaatagtcgaccatccgctaaatccttgattaaattcgttaattttacttgtgtcaaaaaatcgtccccttttaaaaagcgggattgatcgcacaaaaaaagacgcatttcccagttggaaatggcgccctctgcttacctatagcaaacagtcggtgcaccatcaatcccaaattgcaggcccactccaccccttaaacggatgaagctgacaaacagttgtggattgattagttgcgcatcggcggaatacctcgttctttcttaaagtagccacagcataccacagcttaaatcactttggcaagtcgttaaaacttaacaacaattttgcttaaatccgtgtacactagaagatatcagtctagcagaaagtggaggggcccccatgcaacccattcggattttatttatctcgattgaaggtaacacccgcaattttgtcgaaaatctcacggcctatgctgccaagcagcacgccagccaaccagaattaccggaaatcaccgcaacagaaatcagtgaaaccagcgatttaacggatgaaacccagccgttcttctgctttgtccccacctacctagatggtggcaatggcatcgacaacggcgtcaaggaattaatgaccaacgtcttgggtgagtacattgcctatcaccacaatgctcagcaactactgggtgttgtgggcagtggcaaccgtaattttaatgagcaatactgtctcactgctaaacgctatgccacgacttttggggtgccctttatcgctgactatgagcttcgtggggttcccagagatgagacccggatctacgacgcactgatcaaccgcttgaaggaagtgaccccagcctcatgaatccaactttaaccaccctatttaaccatcgtagtatccgccaatttacggccgaaaagttgacaactgatgaggtgacgacattaattgctgcagcccaacatgctgctaccagtactttttcccaacaatacagcatcattagtgtcactgatcccgctaaactagcagtcctcggtgatatcaccggccaccattggttggaacaagccggccactacttcgttatggtcgctgaccaatatcgtaatcagcagatggtcccacctacagccactacaaccacgaatctgcatagcttagacaagctactggcgggcgttttcgatgccgcaattgccaccgaggccatcgtcacggcgggagaaagtctgaacttaggtagcaccatcatggggagtattcttaatgatgccccgcgggtgattgacctgttagatttaccggaactgacatttccggtattgggactagccatcggccaccctacggaacatcccgaacaaaagccccggcttcctcaagacttgatgcacttcaccaatgggtatcaagctctgacagctgatgatgcacgactagtggcgtatgaccaggtcatccacgattactaccagcaacgggggactcaccagcgcgatgaaacgtttagtcaccatatcataagtgaaatgagtcgtgatccacagcaacgggcagggatcttgcaggcgttgcagcagcaaggatttttaaccgaatagtacgtaaaagcgtcccgggctctcgcccgggacgctttgtgtttccaaagatctaagcacaacgaatagctaatcgcccgctgcaatctttgccacgtgatgttcatgaatggcaatgtagcacagtaacagcaaagctaaaccagccgccgtgtaaagcaccgtgttgctggcaatccagccaaattttgctaccaaaattccgattaaagccgtggccaacgtttcaccaaagatatactggaagaaacccatgaagcctgtcgacgaccccaccgcaaactttggcacagactcattgaccatcaggcccaccaaagttagcggcgcgtaaatcaagctacccatgatgagtaatacaataataatcgctaaatgactggtgctaaagaaatacgtcgtgagacagatcagtaacccgatcacacacccgatacaaacgatcgcccgccgatctttcagtaaatcagaaatggcccccatcaagataacgcctggaactgcggccaattcaaagataccaactaaccatttagccgttcccggatcaaagcctttgaattgtgtcaggtaactcggaatccaactcataatgccgtaacggactaaatataatgacatcgacgtcaacgtgatagcccagacaaccttgttggtcaaaatgtaccggacgaaaatctgccacaaagagaggtccgttaattcggctctcgtggcctgaccatcatccaaaacgacttcgtcaccggtgtactcgccaatgctaggtaaccccaccgttgccggacgatcggctcccgctaagacaatgaagatggcaatgacaatcgagacaaccgatgccgtgtagaagacagccgcaattgaatgcgtaaacatcaacgtggcgatttggaccacggccacacaggcaaaagcaccggcgttatgcgccgaagaccagacggcatagacggttccccgccactttttaccccaccatagctgtacggttcgctggcaagccgctgcacccatgccttgggccaccgacatgaccagcatgaggagcatcatcacgtagaggttacgcgtggagcccaagccaaagttcaggatggcagaaatgaagagaccggtggccaaataccacttcggattactcttatcactcaatgcccccatgaacaacttagaaataccataaccaattccaaaacaagacatgaccagcccaatatctgcggtggtaaatccgtacgccttcatgatgtcattttgctcggttgtaaaaatcaaacgaataatataatagccaatataaccgatacaaattgacaacaaaacacctgtctgccgtaaccgataagtccccacaattttatcagcaggaaccttcaccttagcatccggtgcgggctttagaaatgaaaacataaactcatcccctatgttacaaattggcaaatccttgatacacttttaatgtactgcaaggttgatttagcgtcaatgtaaacccttacattttaaaacaattttgtccagtaaactaaaaaatgaaccaaccattttcaggctgatccattttaatttattttttaacacgtgtcaggttgtggtgattacggagcataactgccgctaaagccgctagcataaggcccgtaacggaccagaacagcaactgatagcttccatactcaatgattaacccaccgtataatgggcccaccgcccgaccaaaggaaattgccatgttataaataccttgaaatttccctttgtcgttgtctccagcaagaccatcaatccaagccggaattccagggaaccccgtcatttcaccaaccgtcaggataaccatagtcaccacaaacatggtgtagtctctagcaaagaccaggagtaagaacgatagaataaaaataagcgtccccaccgcaatctgtgaactcattttaaagtacgtcccaatccgattagccaagggctgaccgaagacgatcaggagtccatttaaggtccacaacagactgtacttttcaaaggaaattccgaggttcgtcatgtggaccgagatcacactttcccataaggagtaactcaagtaaaggcaaaagaccatcgccgcaatcaaccaaatgagctgtaattgagccggcttggccgggcccttgacgtgttgatgggtcttggtctgaatatccatgcggaagtctacaacgaaaatcactaacaaggccgcataacacagactagccgtcatgaagaccaattgaaccccatgatccatcagtaccccaaccatcagagtcccaacaactacccccaggttcataccaatatacagccagttgaagacccgccgactactaatttctttaatatttgccgcaaaagaattgacgacagtcatcacaatcccatcgccaagaccgatgaacaacagcataatcccaaagatcggccacccatgaaaaacaattaaggtgagcatcggaataaaggaacataacgtcccaaccagcgctgacttaaacggtgaccaattatcaaagagccagccgccaagccagttcccaacaatcatacataacgacatccctaacagcgccaccccagccaatgctaacgtctggtgaagctgattgtgcatataaacagtcgtcaacggccacatacacgcggcagccgcgttaagtagcaaggtcgctgacaggatccccactaaactgacttcttttttggttttccacatttactgtccctcacttattttgaacttctagcttcattgtcgcatatttcactaaaaactgaaactcttaacagctatgatcattgttaaactgccattttgagcgaattggctaagcggttcgtgaagatcccacggttggtcaaccacccagcagttagctgatacgcatcagtgcaaccaaataaaaacgaccatcctacccaaatggggtagcatgatcgtttcgctttgatttagatcattaattctaattaagccttagtgaatgtccacttagcagcgggcgcaacgccggccttggttgagataacctggttcttgctgttgaccaccttgaacttcttagcagacgtgaagcgaagatacatcgtttgcttcgtcttagaaccctttggtgtgtaggtaatcttccagaaagttggcgtcttagcagagacactgtacttcgcgtaagaaaccaacgtcttgaccttcttaccattcttgtacaggtattcattcagacccgtcttttgactgaagacccacttttgtgagtacttgttggccgtgttagatgtccacgtacccgttggcgtctttacagaaaagttggccgtactagtctttgaagaagtcgtcgactttttcgtggttgtcttcttagtggttgttttcttagtagccgtcttcttcgttgacgtgctcttagtcgttgccgccttcgttgaagccgcttggacccggataatccggtagaaataagccttcgtcttcgaattggtagcgtagacgtaaacgttagcgttcttctttaacttcttggataacttgatactgtacttacccgtggtcttagaagccgtaccactggcaaggttcgtcttggcattctttgtcgccttaacggtaatcttggaccccttagtcgccgttccagcaaccttcgtggacgtggtgtaaatcgcgttaacctttaagcttgggctgacgtacgttgacttcgttgcggcatgtgccgtggtaactgcagtagctgggaccgttgcgccaacagtggctaacgtgactaacccagtcaaagcaaccataaatttcttcattattcctgaccccttagtctaccggcagtaacccaccggcacttatttttttaaccgattgttagtataacagattttttacagaatcgtgacataatctcgcggagtttaggcttttttaatctggcttaattttaatttaacgacaaacttttactgaaccaaaatgtttgcaccacccgggtaaaaagactaacttaatgttagtattttaattcttacgaaggtggtatttcagcatggaaaaaacatttacatttgattccgatttaacggttaatcgcctgggctatgggacgatgcagctcactggtgacggcgtttggggaccagttgctgacccagataatgctgttaaagtgattgaaacggcgattgatcacggcgttaacttcattgatactgccgatgcttacggacccttttatgctaacctctacttgcgagatgccctgaagaatcgcccggacaatcacgtgatggttgccaccaaagttggtaacacccggcaaggaccagatgtctggacaccagttggcgttcctgcctaccttcgacaacaagttgaaatgaatttgtttacgctgggtttggaccacatcgatctcttacaacttcatcgggttgatccgaatgttccgttggccgaccagattggcgttctaaaagacatgcaagacgagggtaagatcaagcacattggcttgaatcaggtctctgttgaccagctcaaagaagctacggccatcgctccaattgtttcagttcaaaacatgtataatctcagcaatcggcaagacgaggacgtcttagattacgcagatgcccatcacattgctttcattccatggttcccactagctactggtgaactgatcaaagacgctacgctgacgaacattgcgcaaaaatacagcgcttcgcccgcacagattgcgttagcctggttgctaaaacgttctgacgttattctgccaattccaggcactaagtctagtgaccacgaattgcaaaatattcaggcccaagacatcgacttgagtcaggcggactttgaggcgttgaaggccttggccaagtaacatctgctgattagtaataagagagacctaacacggcttgtgcttggtctctttttatttcggctctattcgattgaagaaactctagcacgcccctttagactagagtcccaacatcttcttaaatcgcttctcattacgctgattgtgtatcggcaccatgaagcgtgtggtgtatttggctaaaattccttgtttataaaccgatttaggattactgaaggtttcaaaaccaaccttgccacctttataacgccccataccagagtacccgacgccgccaaatcccatttcgtgagaacccgcgtgtaaagcgagctcattaatatcaacgccgccagacgaggtgtgccgaataacccgatttaattgtgccttatttttgccaaacacatacatggccaatgacttttcgtgggtatttatgaacgcaatggcctcatctaacgtttcataagtgaaaattgacaaaatcgggccaaagatttcatttttagcaatctgtaaatctgggtcgggattaatggctaacgtcaacggaatcaatcgcttggtggcatcgggtaccgcatcgtggttcggattaatggtcagtaattgtgtcccgcgctgttgtgcttctgctaacatccccgtaattcgcttataagccgcatcattaatgatcgctgaatattctggattatcgctatatgtgggaaatgcctgttctaactgctctacaatcaaatgaatataatccgtcaactggttggccggaaccatcgcgtagtcaacatctaaacagatttgaccactattgcccgatcgtccccgtgcaatttttttgctgccagttgttgattggcgtccggtaaaacaaccgctggattcttcccgcctaattccaataccactggtgtcaaattaggcgcggcggcagctaaaatctttttcccagtttctgaccccccagtgaaaacaaatttatcccaattcaaggctgaaaaatgggccgacacatccgctgcaccagtaatgacagcaaacgtggtctcgctaacgtacttttttgccaatctttgtaataaagtcgccgccttgggcgtgtactcagatattttaaccatcactcggtttcccgccgcaatagcttcaatggccgggtcaagtgccagatcaattggtgcattaaagggtgacatgatccccaccacgcctaatggctcattatagacatattcccgactcccactaagtcccatcagacctaatcgctttttgtcaggcttcatccatttacgcaaatgctttctggtataggcaatagtggttaagggacccgttagatctgccccaataatctgtaatggatcacgctgaccaaaatcggcttgtaaggcctcaacaaaagcatttagattttctcgtagcagtcgttcaagttgatccagcgttgttaatcgggtcgctaagctcataggttgtgcgcgattgtactgttgccgttggtcctcaaaaattttagtcatttctacattagtggtcatttattttttctcctttttaatcgaatgttcgtttaattataacaataaaaaataacccgttgaccggtttattcttttaataacgcgtgcatacacatatcaataacttgctcaattgagatggtttgggccgtcaactgattgattttacgtgctttaacatataaaacaataggtgcgtaagcaaagcctaagatcacggcggctgagtccgttacaaattgtggcgcatgactagtggcttcaaataaccgttcaaagcctcggtatgactctgcttgactaatctgtaaattatttcgaactggagaactgttaaattgttcgataatcattagggcttcataatgttgcatgccaaattcatacagtgtccgcataaattgctgcgcaaagataactggattatcagttgtcgcttcaatatttttcagtaaaaaagtggctaacatttctttttttgctaaataaacttgttttaacacatcttccttatccgtaaagtacacgtaaatcgttgatgaagaaatgccacttgccttagcaatcttggacattgaaactgctgcaattccctcgtttaaaataatattactgacctcatcaataatactcgtttgttttgccgtatctttttctcgcatgattggctccttttaaaagatcgatcgttcgattattaatataacgcgcgccattaactttgtcaaccaccagcactttatttcttgacagctagcctcatttatacggtccccgtgcctgaataccgatagacttctcgataagttcatctcacgccgattttttcgataatgtcctcgtgcaaaatcagtcaacacctgcatcctatcaccctggcctcggctaattaatgatccgttccatgaataaccactgacaagcactgcgcaaaaaatatggcatctcacccgaactagtctgattgctaaagcgttccaacattattctgccaatcccaacactaagtctagcaaccccgaactacaaaatattcaggccccagacattgaatattagtcagactgtctttgacgcgttgcaggccttggaggggtatcgggcattatttaagaaagccctttcacactttaagataacgtggtataattaatatgtcgaaagacattataggtttcctcttttataccctaatttgagaggaacttaaagtaaggaaatggtcattgaatgaccgttctctgtgcagctctaacccccgcaagtttcttgcgggggttatctgtctaaattttgaaaagaggctaaattatgagttatattttaggattagacatcggcattacctcagctggatacgctgtaatacttacgaatcacgctggtaaaccttttaaaattgccaaactgaatacggtcatttttccgctcgccgaagatcctcaaagcggtgcctcactagcgctacccacgcgtcagcaccgaagtagccggcggctgaaccggcgcactaaatttagaaaatatcgtgtacgtcaacttttcctgcgctaccatttactaaatccgaatgatatttcacgtttccttagttatcaggttccgcaccaagacatttggcaactacgaaccttagccttacaacaaaaaatcacgaatgcacaactttttgaaattttctattactttgctggtcatcgtggatttaagtcaaatcgccgctcagaaattcaaccccgagggaagagcgatgccgacacgcgcaaggtcctatctaacattaccaccaaccaggaaaagataacgcaatatccatcacttggcgctatgatggccgaacttccggaatttgaatctattaaacataacaaaaattatcgatcagaggacatttatccgcttagaagttggattgtcgacgaaatccggaccattggccgagtccagaaacaatttggtcatgacctacctgcgtcctttatcaacgactacataaaaatttttcaggcacaacgtgattttgataaagggcctgctaagccgagtcgttttggtggtaacttgattgaaaaaatggtgggtgtcgattctttagatcacagtcaaaaacgtgcggcaaaattaactgatacttttttccgttttcagttactctcccagttaaatagcttagccatacgctacgatacaggccaagattttgaaccgttaactcccgatcaacgacaagtgattttagatgccgcctcgcttaaacaactatcatttaagcaaattcggaagaagctcgacctcactgacactgcgcgttttaacctgatcaattactatcctttaaagaaagacaaaacaccaaatgaaaccgtctctcgtgtcgaaaaaaaattattctttaagtatggtgctttgactgatctccggcagatcacatctgacccagcacgcattgaccaaattggcaccattctcacaacctataaaggcgatgctgagcggcaaaaaaggttccaaaagctcggacttacacctaatcagattgaccaattgctccccattaacgcaaccggtttcggtcacttatccttaaaaacaatgcgcgctatattgccttatctagcagatggtgaggtttatagcgaagcggcgacccatgctggttatgacttccgcgacaataaaatcgaccgcgagtatcttcgagaaaacatcactaatccggttgtcaaccgcgctattgctaagaccttaaaagtagtccacgcagtcattgctgaatatggcaaaccggatgccattcatatcgagctaactcgagaacttcgccacagtcacgatgagcgtaaaaaaattgataaacggcagcaggccaatcaagagaagaatcaacgagttgctaaccagctaacggaaaatggtatcccagtaactggtattaacatcatcaaacaaaaattatttgatgagcaaggtggcatcgatctctattctggcaaccaaattaacgcagagaagctattcagtgaccagctatttgaaatcgatcacatcattccttactccaaaagctttgatgatagttttaccaataaagttgtcacagctacacacaacaatcaaagtaaagccgaccgaacccccttagaatttctgggaaccactgaggctgccaaagctgctttcaaaactcgtgtacttgctaacattcaaaactcgcgaaaacggcagaacctactgaaggagcacttcaccgccgaagatcgccaggcatggaagacccgaaatattaatgacaccggttatattaatcgaatactcagtcagtatttactgcaaaatattgaatttactggtgtctttacccaacctgtcgtaacagtcaatggtgccttgaccgcatacgttcgcaagcggttcggtatctccaaggatcggcaagcttccgacttgcatcatgctgttgacgctgccttccttgcttgcatcacaccagcatacgttcagcgattagcgcactacagtcagcaacaagaaaaccgatacgaccagcaactctggcaaattgatcgtgatcataatttcaacggggccaccgccataagctatcaacaagcgattaatatgtttcctgctccttggccgaacttccgtgccgaactcatcggtcgaacagctagtgacccagcccagatgatggctggacatttatgggacagctataccactgaggaaattaaacacctacgtccagccatagtcattcgtatggctaaccacaaagtaactggcgctgcacacaaagaaaccatttactcatccaagatctaccaccaaacggggttaggcttaattcgaacaccaatagataagctgagctatgatgcaaaaaaggatatcattaaaaactacccgttagcaccggataagagtaaccaggttgtctataacgcattaaaacgggtactaaaacgtcatgctggacaaaagaagtcacctttttcagatcatcggttaacgattcaagttggtcaccaaaaacaaatcgtcacccacgtcaaaacaacgcaaaaaatttcctctccaactgcagtcggccaaggaattgcgctaaacagtcgaatgttgcgtattgatattttcttgcaagctgacagtcagaactttgtgggggttcctgtttacgtcgcagacgcggtagcgaagcatctacctgacaaggccgtcgtcactgataaaaatgcaagcgattggctacctattcatcccgctgatcagttcatctgctcagttgccactaatgatctaattgaagttaaattcaaaaagccagttactattaccaacatcagcactggtgagaaacagcagcgtacacaactgctctgctacttctcaggatttagcattgcaaaagcgcaaatgaatttccgttctctgaatggcgattatacaattaatagtattgttttaaaatatatccagtccattacccgttttcaattagactacttgggtaattattaccctattaaacacgaacatcggacaacatttcattagaggagcgtgagcgtcatgtttcgtaacatttacctgaggaatcccgctcagatcacccttgatcactatcaactcgccatcacaacgctggatagcacctatcactttccattcgatgatgtgcaaagcctgctaattgaaaatctaaagtcgagcatatcgacagctgcattagctgaacttgccagtcatggcattgccgttattacttgtgatgcccagcacctacctattgctactctccttccatttcaaggttattaccagcatctgaagaccttgaattatcagttaaagctgaccaaaagattcaaggatcgattaactcgtaaaattattaagcaaaaaatcagtaatcaagcagccactttgtccctggtctccgggaaaccacaaacagcactacaacaattagcagctcaagttacagatggtgatgatagtgctcgtgaaagtatcgccgccaaagcctacttcgcaaaattaggtggcccaaagtttagtcgacgacaagaaaatctgaccaatggtgccctaaactacggctacgccattgtccgcagctgcttagcccgtgagctcattcagtttggttttgaacctgcgctaggcttcaatcatcacaaccaacaaaatgcatttaatttggcagatgatttaattgaacctttccgtccagccgtagaactctacgtgtttaccaaattagctactagctctgctgaagaattaacatcatctatgaaagcacacctgctaaacttacttagttatgaggttattatccagggcgagcggcaaagtatacagtacgcgattcatttagttgttgaatcattatggggcgtctgccaaatccaaaagagtacgcaattagtcttaccggagattgttgcattgcgggtacatgagaatggggaataaaagatttatgcgaatcattgtgatgtttgatctaccaactaaaactaaagatgaacggcgaattgcggccagattcagacgagatttaatcaactctggcttcgttatgatgcagctatctgtctactatcgcttggtcaaagggactgatttggttcataagtatgaacaacgagtcgcagattttctgccaccaaccggtcaggtccgattgcttgttctaaccgagaagcaatttagcagtatgcaaatcatgacgggttccacatctcatcaggaagaaaaaattgacaattcagagttgacaattttgtaactaacgtagtttaaagtagaaaggttggcagatcttatgcttagcctttctttttttaactcatttcaattttatgaccatttttatgccaaaaaactagcccacaatcaccgtaatatcagtgattatgggctagatagatcctttataccctaatttgaaaggaacttaaagcgtcgaacgttggcttgtgacggtcgtcaaagatcctttataccctaatttgaaaggaacttaaagctaaccagctttattaagcgctaaccagacagatcctttataccctaatttgaaaggaacttaaagcaaaaatgcggaaagtatgaaaggtgacttcgatcctttataccctaatttgaaaggaacttaaagccaaatcgctaagcttattctctaatttcttgatcctttataccctaatttgaaaggaacttaaagctttaaccgtctctaattcttgacgcatagcgatcctttataccctaatttgaaaggaacttaaagccggttgctttgctagttgctgacgtgtcaagatcctttataccctaatttgaaaggaacttaaagcgtccgcctcgccaataagtgtaatgataatgatcctttataccctaatttgaaaggaacttaaagcctttttgatttgaaccacgatgaactaattgatcctttataccctaatttgaaaggaacttaaagcaacagcattagcaataccttcaagggaatagatcctttataccctaatttgaaaggaacttaaagcccgccaattgcacaatggacataaccgcttgatcctttataccctaatttgaaaggaacttaaagccgaatccataggctatttttcatatataaagatcctttataccctaatttgaaaggaacttaaagcctatttagatgatgaagaagatcacattgagatcctttataccctaatttgaaaggaacttaaagcgcggtctacgacgcctacaacgcggaaaaggatcctttataccctaatttgaaaggaacttaaagcaccaagcatcacatggtgcttatctgatgagatcctttataccctaatttgaaaggaacttaaagctggtgaacttggcggatggaatgcgctaacgatcctttataccctaatttgaaaggaacttaaagcgatatgatagacgtcatcaatgctgggattgatcctttataccctaatttgaaaggaacttaaagcttgatggaggcccaagttgacaaggctaagatcctttataccctaatttgaaaggaacttaaagcctgataccatcgatcattggtgcaattattgatcctttataccctaatttgaaaggaacttaaagcccctgctctacgttcaacctcggcaatggagatcctttataccctaatttgaaaggaacttaaagcagggtcaacgttacacatgagtaacgacgcgatcctttataccctaatttgaaaggaacttaaagccagaagatatcagtgagggtagcgaagacggatcctttataccctaatttgaaaggaacttaaagcggggaggttgcacaaactgttattaacagcgatcctttataccctaatttgaaaggaacttaaagcacaggcggcttagacccgggcggcccccttgatcctttataccctaatttgaaaggaacttaaagcctactgccgtgataaattcgtagtagacgggatcctttataccctaatttgaaaggaacttaaagctgctcgccagtatagtcatcaatcttgttcgatcctttataccctaatttgaaaggaacttaaagcagtgatgacagctatcctagagaaacataagatcctttataccctaatttgaaaggaacttaaagccaggcctattcagcttcgcaaaacgtgacagatcctttataccctaatttgaaaggaacttaaagcagaacttccacaagataatcctcgaggactgatcctttataccctaatttgaaaggaacttaaagcggtcgcagtcctctgacatctttatgcggagctcctttataccctaatttgaaaggaacttaaaacattgatgaatatggaacgactaatatttacccactttacttccttcaatcctaacaaaaaatgtaggaaaaactacttcctacattttaaatctaccttacttattttgacagataatcactagattctcagagatcaaagttattaaaatctgcaatatccataacaaatctttctgcagtcatactaccagtactcatattcttaataatcaaacgatattcccgttgcttatcataatattgatccgctaaaatgatttgaatactttgcattcgatccttagcgttttcggaattactattagccagaaccgttactggtcctgaaatctgttgattctggtcgttcacaaaataaagctcaaactcagctggaatgacggttgggccaattggtgccgattgacgaatcacaaccggaaccgtcaacgacgtaatctgacgattcatactaaataattccagctcgacactcttcgccaccgaacgcgccgatgttgttttaacttcaagtaatggcacaatcatttcctgcagtgacgaaccaccatgtacatagttaaaagaacccgccgatcgaaaaacattagctgtctttggaaaataaacatatcttggatcatcatttcctaaaatttcacctaatctttgatgacctacacccggttcgtcaaacttttgactcgtaatcaggtaccgcggcgcctttatgtcgctcgccacttctgataaatcaattttgtctgttatccgtaattgatcgtgccgatataggtaaccatgatcagctgtcacatagaaatgcgcaatatcattgggccgtaaccgttgaatcaactgttgaatttcggtaattgcgtcttctgtcgcattaaaaacatcatcttctgtttttttgttatccgcaatggcgtcaatctgattatggtagatgtaaacaatttcttttccagcaaactttgcccgaatgtcttttgaagtagcacccttcaattcgtcgagagagaatactatgctattcggattttgacgttgtaaaatctcttgccgctgtttccgatttacggcttcatggtcatccaccaataacttcttatcttttaatgctaatgatcgatgcggtaacataattggcatccccatgtaggtcactgatggcaacccagttatcaaatattgcatggtagtcgacttcacttgatcttcccgccttaaccgcttctcaagttccttagccgcctcaaatcgaaacgcatctgaaatgatcactacaattcgattactctctggtgcgacataatattgatagaaatttcgctgcaaattttgtggcttaattttcgaaagatctagtctctcattccaggcaagggttcttttattgaggtaatcggtaatatagatagactcaactaatttttttgtctgcgcaaattgttctggcatctttgcatgctgatagtaataggtgaacttacgatagtctgtatctactctatagcccttggtaacatagttatcaataaagccctgcatctcagtctctaagggctgtgtagcttgacggatcaagtaccaagcctttcggatcattcgatagagcaaagaaaaccgcttctgactcccaaaatgggtttctaagcgttgccggattaactctggaattattttcccatccaactgcacatccaaatcatttgatatcaaacgttcctgcatccataacaatattttccaatcaaattgtgggaaaatatccgccttaactagatcgtcaagcttaacttctccgaatacctgatcaccattaatattttgccaaactaatttagcaatactatcaaaatcatccccgaccgttccatgatttgtgcttcgacgattactaaattgctgaataaacgtctgcacattagcctggtgggcactaagatcatattgtccaagattttgcgggagactatgtcccatttgttggtaagtagccgtaacatatagaccatccagtaacgcctctaactgcggttcaacatctacatacccaaaccgttgctcaacctcagcccaaaacgcgttcgatacaccatagcgaccgaactcaattagcactgggttatccttgacgccttgattgatcagtagttgaagaatactgaaaaagtcaactattggttggttcagatgtactaaggtcgccataatccccagttccggatctttttcataactaccaacatcatattgtttaaatcgtttccgtcgtcgagcattaccaaaaaacgttatgtacttttgcataaaaggacttaagctctctggaagtcctaattctttacgtaaaatttcccgagaatcggctgaaaatttacctgaatataatacaatattccgcaaatgatcctcttccaaagccggctcaggagccggggaataaatcaaaaccttttgttccgttggtaaattcaacaggtactgcttcgtcatcaactgacacccgggattcaacgttaccacttcggcaatttcctgtagtcctttagtaatcgcttctaagctaccaagaaaatcgccgttatcatcataccaaaaaataaagtgttcttgcgcagcaaaccttttttttagtgcgactattattttgtcaatatccatattcgccatggtctctgctcctttgtccgtcctaaactgtacattaatcataacgtaattttcttcaacctgcagtaataatttgtgaaaattattgttcactccaaactatcatgatggggttattcaacatttgattcatgatattagtgaagatgatttcaatgtagccgttggtggccaggtggaaattattggctggctgtatcagtactataattcagaaccaaaagatttggcattcaagaaaaagaaatacctagaagtagatattccggctgtgacacaactttttacacctgattggattgtaaaatatatggttgaaaattccttaggccgttattggatacacgttgttcaagcaaaaggagactctcgttctgagcaacagcttgccgaatactttggttgtaaatatttcatgccagaagcgcagcagactggcaatgttaatgtcacttctgaagctcaacaactgtcagaagtgacaatcgaagatattaccttagttgatgctgctatgggatctggtcatattttgatttatgcttttgatgtttttatgcagatttatgagcaggaaggatacgctcgtcgggaggcaactaaccgaattatacagaacaatctatatgggttagatattgatacgcgcgcttttcaattggcctatttctcactgatgatgaagggacgcgcaaacagtcgtcgcttcttaacgcaaaatatccgtccaaatgtatatgacatccccgagacaggctcattaactagtgatgattttcagagtctgttacaaagcgattctgatattgatcagttgaattacgttctggatagcttcagatatggaaacgaatatggctcattaattcattttgataaacccattgattggcacgtaattgatcgaattgctaatgaaaagttgcccgtgggacagcttaccttggatgctgtgtcattggcagagaatcaacaccaattgcaagagataagtgctgtcggaaaggtattgagtaatcagtactctatcggtgcaatgaatccgccttatatgggaactgggaagatggatgccattttagggaaatacgttaaacaacagttctcagacagtaaatcggacttatttgctgtctttatggaacgtttacggagcttgattgtgccaaatggctattatgctatgatcacgcaacattcttggatgtttctttctagttttgagaaattacggaaaaaattgcgaacgaatacgcttattaatatggcgcatttaggaacgagggcttttgaggaaattggtggagaagttgttcagtccacagcattcgtgtatcagcagagaaacaatgtaaattacattgggacatttgaaaggctcgtagactttgactcacagcaacggaaggaaaaagcatatttagcagccatcacggatccaaatgtggactatctttatcgaactaatcaagcgaactttagcaagattcccgggatgccaattgcttattgggctagtgagaaactggttcacgattttgagactggaacaaaaatgggtgaaattgtagtcccgaaacaaggactggctacggcaaataatagccgattcttacgacaatggtttgaagtcaatcataagaagattaattttaaagcagattcaattaataatgcggtccaatcaaagaaaaagtggttcccttataacaaagggggagcttttagaaaatggtatggcaattacgattacatcgtaaattgggaaaatgatggtgatgaaattcgccattttacgggtaataatggtaaagtgagatctaggcctcaaaatactggctactattttcaggaagcaattacttggtcactcataaccagtggaagattcagtatgaggtatcgtacacctgggagtatacatgacgtatcgggtatgtcggcattcacccgatcaactgaccgtttaaaagaaattctggccgtaatgaattctgctgtcggaaactatatactgaatattttgaacccaactataaacttacaaataggtaattttacgtctttcccaattctaaaaatgccaacgaacgagttacaagtaatagataattgtataaaaatcacaaaaaaagactgggattattttgagacttcctgggacttccaacgccatccattcttaatacacatcgctgacgataacctatcatattgtcgctctcccgctagttaacatgctactatgtgacaaatatgtgccaactatagtgaagtggaggagaaataatggttagttatcgaaaacgcggcaatgcatggcagtatgaaatttcctacaaagacaaagatggacgatataagaaattacgaaagtctggattcctgttaaagtccgaggctatcttagctgccagcaaggtacaagcagagcatcctaacctagtaaccgttaagtctggaagtgaaacgctggtttcttactacaaacgttggattcaagtttataaacaaaatgctgttacacctattacttatgataaatatttaaataccgctcaacatgctgcagaattatttggcagtttaaaactaaaataattaactaagttaatttatcaagaacgtctcaacgaattcgctaaaaaccacgctcgacgtactgtttcttgtttccacaagcaacttcgagcttgtatcttagaggcattggatgagaaaattattacaacagatcctaccagaaaggctgtcattaccggacgcgaaaaacctaaagctactagaaccttggactataaaaactggattagactattacagaacctaaatactaataaaattggtgatatgattatttacttagctagtgttactgggatgcgctatggtgaaatagtcggcctaaccctatcagacattgatttggaggctcgcataatcaaagtaaataaagcctgggattataaatataaaactggttttatgaagaccaagacctcatcttcaattcgggaaattaccatagatccacatactgctatcaagttagaatcatttatattctgccatccaagctcagagcatcaaccaatttttatgacatcatctggtcacattctggttagtgccgaaataaataagctattaactgaacagctcaaacgcttaaatattcctcggatcaccttccacggattgcgacatacccatgcctcaatcctgctgtataagggtgttagcgttctttcagtatctcgtagactgggacatagcaacattacaacaactcagtccacctatctccacatcattaaagaacttgaatctcaggaccaagataaggtactcgccatcctagaatcggcaacaaaatagttggcacatcacttggcacaaaaggggctcctcatttctgagaagtcccttttgtgctactttattttagacaagatcgtaccatcaatctgcaactttttataattgacaacaactccatcgtctaaatctaatgcaatctgctggttcgcaatatgttgaattatcggatcatacttcttgatctctgttaattgttgtccaacatgttttaatactttttcatagcgtttcttttgactaataaccgtctcgctatttactagctgcgttaactgatcaattttagtttcgtactttccttgaagcgggtgtaaataattagtccgtaacatcgccaattcattacgatcgtaacgatgcaagtacatcagtgccttaaaaccatctcgcttgccgctattgaattcccaataaatcggccgcttttgataaatcttcaaatggtccttaaagaagtcctcaacaaaatatcgtcgcactgccatttctgccgtatctgctttctttccaaccacggatgctaaatattctaaattttcatcaacattcttctcaccgaatgtgacggttaagaattctcttaatcgattcataatgtcacgagaatcatcaaaataatttgcatcat

SEQ ID NO: 4502 - DNA, 23237 bp, synthetic construct
  misc_feature 1..23237: note = Synthetic
  source 1..23237: mol_type = other DNA
ttgcggtcccaagaccccgatggaaaccacctgaatcaagatgtagagtaacgccacgaccgctaagaccacgatgatggccaacggaatcgtgcgttgcgggttccgaaattcctgcgccgcaatcgccagggcttcaaacccggtgaaggcgtaaaagatcagaatggccgcggacccaaacgagccaccaaaactgccggtggtcaccacgaaaggtgtaaagtgcgccccgttaatgaagaagaccccgacgcccacgaagatcagtagcgggatcaacttggcaaccgtgatcacgttgttgaccaacttggtcagggtgattcccgaaatgttgatcaacgttaacgcgcccagtaggagcagaatcgtcaagtctttccacaggggttgggtgaggaccgggaaaatcgcgcccaacgccgtggtaaacgcgttggacatggtcgcccacgcgatgatgctgatggcccacacgctaaagccgacctcgtaacccacgaagttcccgaaggcctccttggcgtagaggtacggtcccccatttttctgaaaataggtcgcgtcttcggcataacacagggcaatggaaatgatcagtaacatatcaaaaataaaaactaaaatactggccggcccaatcagtttttccgcctgacccggcaataaaaagattcctgatccaataattgaattgatccccagcaagattacactgagcatcccaaacttggctttcaccatttcccatctcccaaattaatcaactctcatcaccagcttaactagtgacaaaatcaattattgtccaggaaggtcgtgccgtcaacttgaacgattcagtcccctcaattgtcacatccgtgaccgggccactgccactcaaaaagacgtttccccgtactaacggaaaaacgccctgtcgtcattgattggctagttactggccgtcggtgcgcagatacccccagagttgtctcaacgtctggtagagaatcccgatcgtaatcacggcggaagtgcccccgataccgaccgctaagtagacgttgcgggtccgttgcgcccagctaaaactttcggcgtttagcgcccacaggcccaacgccgccagaatcaggacggccccgtctaaaccgatgagcccgatggtcagcaataatgcgcccaatgaatttgggtctagctcccgttgggcgatcaaccgccgggcgaatttctcgcaggccataatcgtcacccaggtaaacgccccaccgagcaccgccaccagaacggttcccatgaatttcagtaccatcgccccatcgactccttttcgctagtttcattattcctagtttacccggaaaagcggcgtttgtctggtcatccggagaaaaagcgcgagttcgtcctaaaaaagcccccgccccctgaaccgggccgcgtcaaaaatttactcatcggctgctaaagacttaagttcccccagtttcacgaccacaacgcccggcgccggggaaatgagacttgttttttcgccataagtgggcaatgatatgagtcatacgcaacgccaaattctcgaaaagtaggtggcaagtcatgtcaacacgtcaaccgttatccgcccaccgcgtcgtcattaaggtcggcaccagtactctggtctatcccgacggcgccatcaatctccgagccatcgatcaactggcctttgtggtcagcgccatgcgccaccggggccgtcaggtcgtcctggtttcctcgggagccattggggtcggcctgaactatatgggcgcccaccaacggcccaaggccattccggaacaacaggccatcgccgctatcggccagaccgagctcatctccatctataaggaacgtttcgccacctacgaacaaaaggtgggccaggtcctcttaacgcgcgacatcttcacctaccccaagagccaccgcaacgtcttaaacacgttcgagtccctcctacaccaaaacgtggtccccatcgttaacgaaaacgacaccgtggccgtggacgaactggatcacgagaccaagttcggcgataacgaccaactttcagccatcgtcgccactaacatcgacgccgacctgttgatcatgctgtcggacatcgacggcttctatacgggtaacccccaggccaccacttcggccaagctcctttcccacatcgccaccatcgacgagcacacctacgacctggccggcggcagcggtagccgatttggcaccggcggcatggtcaccaaactcaaggcggccgagcgcatgctggcggccaacggtcagatgattctggccaacggtgccgatcccaccatcattttcaagattctggccggcgattccgtcggcaccctgtttggttaaccccacgcctaaggaggtagtgatatgacgaccattgatttaacaactctgggccaaaatgcccaaacggccagcttcgcgcttagcgacctgaccgctcctcagaagaacacggtcctgcagcgcatggccgacgctttattgacccaccaggacaccatcctggcggccaacgcccacgacctggccaatccccaagtgcccgccaagttcgtcgaccgcttacgcctgacccctgagcggattcacgccatggccactggattgcggcaggtggcggcgttacccgacccgatcggcaacgtcgatcacgcctggcgtaacgccgcgggactcctgattgccaagcaacgggtcccgctgggcgtcatcggcatgatttttgaagcccggcccaacgtgacggtcgacgcctcggccttgtgtttcaaaacggggaacgccgtgatcctccgtggcggcaaggaagccctgcagtccaaccttgccttagtcacgattttacgcgacgccctgaccgcggctcaggtcgactccaacgcgatccaactgctccaggacaccagccacgaaacggcggccaaattcatgcaattgaccgactacatcgatgtcttgattccccgcggtagcgcccggttgattcaggccgtgttacgccaggccaccgtcccggtcatcgagaccggggccggcaactgccacgtctacgtcgacgccgacgccgagcttcaaatggcgaccgctatcgtggtcaacggcaaggtccagcgccccgccgtctgcaacgctaccgaaaaactcctgatccatcaagccgttgcggcagactttctccccaccatcgtccacgccctgcgcgctcaaggcgtcgaggtgcggggggatgcggccactcaggccatcgtccccgacgtgatccccgccaccccagacgactggggcaccgaatacaacgccctcatcatcgctatcaaggtcgtgccctccgagacggccgccattcaacacatcaaccactacaacacccagcactccgaggccatcgtcaccaacaactaccgtgccggtaaattgttccagcgccgggtcaacgcggcctgcgtgtacatcaacgcctcgacgcgctttaccgacggcttcgagttcggtttcggcgccgagattggcatctcgactcagaaactacacgcccgtgggccgatggggctcgccgaattgacctcgtacaagtacgtgatcgacggcgacggccaggtccgcgcctaaccccatcccaaacgaaacaaatggcactgtcaccccgcttgcggttgacggtgccattttcatttggtttagtgccttacggtcagtctcatgcctgaccaatgattgtgaccaaggtcttgccgcccaccgtgtaacgactccaaaagagggcgttcggatcatccgggtcaccggctgtccggaatgggcggtgctgattaacgacggtcaaccgatacttcagcttgccgctctgatggacccgtttcatcccccagccggggacttttttggcaaagtagaactgccgtgtattgccccgattagtggccttttgaatcttttcctgaaactgtggtcgttgattcccattgacggcgttcggatttttaaagcgggtaaactcggcgaagccattgctggtcaccttcagttgggagtgaacttggttgtcttgattgggattggtcgtgaatttcatttgccgcaaggtccccagactcagcgcaggtaagtaagccggtctggcaatccgttggtaatcctgcgggcgctttgagccgatggtcccactagtggacaaaagctcaacgtttttcggccgccccttatttagaaacttataatcaagctggcctaggtaaaaactaattgctggtttttcgacggctgagcctttgaacttatttccaataacgacggtgcctttcgggagttgtcgcgttttcttggtcttgtcggcgtagagcaagactactggggtggcacgtttgaccttatagtatttataatcgttaagctcgtagtcttgaacctcatggccgccaatctggtaactcttggccatagccgtcctgggaaacattccgcccagggccaccaacagggataacagggcgatgactttaagcattactttggggggcatatcttcaattctcctcatctctaatttttttaacaataatgttaatttagccgttagtcgctagccatcccacgagaaggcaagactaatttggctgagaatcgtaattgagtttgatttcatatttgttactgtaagtcccctctagcttatccgtaaactcgatggcttaagttttagaacgatccccgttccatcggacgcagtgtccatgtccagagtcaccgaatgtttcagcaattctggcatttaagtaacgcatttctgatcgcagtgtttaaggagaacatggtatactaacggtgcgcagtattgaaggagtgattgacatgcaaaatatcaaagaaaaaaatgatagtcaaagttgggctcaacacgcatctctcaaagaattacggttggcagcccagttagaaaaagatccatcccgacaagctgtctacctatccttgtataatcacgcgctacagcaagcacaaaaacagatcattcagcgaaaaaaattcgtacgttagtgaccatgtgccgatatataattattgccggaattaacggggccggtaaaagtaccctgtacgatagtgaaccggatctatttgcgggaactaaacgcctgaatgccgacgaaattttacaacaatctaacggtgattggcgttccactgctgataatctaagagcaatgaagctggaattaaaggaactccatgcgtgtctcacacacggtaaaagtctccacgttgaaacgaccttagccggaaatggaaaaactcaaatcgacttaattactgaagccaaaactttaggctttaaaataacattatgttatatcaccttaagaaatagtgagttagctattcaaagagttaacgaacgggtcatcaagggtggccatggtatcccatcaaaattgattcaaaaacgattcgaccaatcccgaaaaaattttgctaaaattgccccactatgcgatattgtcacgatttacgataataccactggttttcacaacgtctactatagagtcggccaaacggttacccttaatcagctaaaatcatatccctggcttcaggctttttggccgaactttcgtttctgattaatccttaaatttcaaggtcctagcaattcgctggggcctttttagtgcgagcaaatccggtagacgcgctaacggcgaccaaaaataaaactggctagtctgtcgccggtaaaataccgggaacaagaccaaccagttagtggtttggcacttagtaatcattttatagcggttacttcaatgccgcctttttcaatcaatccaatttttagaacagtcccgtaatcgtcccatcggccgcgatgtccatgtctaaggccgctggatgtttcggcaggcccggcatggtcaacacgtttccggtcaaggctaccacgaagccggcccccaggcgtggcgagaattcgcgcacgtggatggtgaagtccgtcggggcccccaactggtgggcgtcatcggtcaacgagtactgggtcttagccatgcagaccggcaggtgatcccagccgcgcttggcaaaggtcttcagttgccgttccgccttactcgacagttcgaccttggcccccccgtaaatcttttgggtgatggccttgacctgcgtcaacaggtccgtacccggtttgaccaacggcgtgaagtgactttcctggttggccgccttgaccacggcttcggccaaatcggtcgtcccggccccaccatcggcccattcggtcgtggtcgcgacggccacgttttgggccttaacgatgtcggtcaacgtttggatttccgcgtcggtatcgctggtgaagcggttgatggccacgaccaccggcacgccgtactgctgcatgctgtggatgtgccgcaagaggttagcgctcccctgctttaaggccgccaagtcctcggtttccaggtcggcgcgcttaacgccaccgttgtacttcaaggcccggaccgttgccacgatgaccacggcgtccggtgtcttgcctaagacgggggtcttgatgtccatgaacttttcgcccccgaggtcggccccgaagccggcttccgtcacggcataatcgcccagttgcagggcggtttgggtcgctagaaccgagttacaaccatgcgcgatgttggcaaacgggcccccgtgaatgatggccgggttgtgttccagcgtttgaactaagttgggcttgatggcgtccttgagtaacagggtgatcgccccgccgaccttcaagtcgccgaccgtcacgggttccttgtcggtgttgtagccgatgaggatgcggttgacccggcgtttcagatcggtcaggtcttcgctcagacacaacaccgccatcaattcgctggccacggtgatgtcaaacccgtcttgacgcggtaccccggacgtccggccgcccaagccaatcacggtctggcgcagggcccggtcgttgatatcgagcacgcgcttccacacgatttgacgcgggtctaagtgtagctcgttaccctgttggatgtggttatcgatcagggccgctagggtatcgtgagcctcggtcaacgcgtgcatgtcacccgtaaaatgcaggttgatgtcttccatcggaaccacttgggcgtggccacccccggtcgcgccaccctttaagcccatgacggggcctagggatggttcccgtaaggctaaaacggtcttatggccgatcaggtttaaggcatcccccaagccaatggcgactgtcgacttcccttcgccggctggcgtggggttgatcgaagtcaccaagaccaacttacccaaggcgtgttggtcactcaggggcaggttgattttggctttcgtgtggccgtaaggttcaatctggtcgggcgttaaaccgaccttggcggcaatcttttcaatggattctaagggtgtggcttgggaaatagcaatatctgtgtttaaggtcattaaacggattcctcctcaggatttgactgatcaatggcggtctgaatcaggctcgccaattcgatggccgaatttcggggtaataaaaactgataaattcgaccctgggccaccaagcccagccggtaccgggccaggtggacactactaacttgatgtaacgggatgaccaggtgacggtggtttaagaccgtactgacggtcaacacgttatgggccatggtgatgttacgaaagtggatctctaaccagcagagccccgcaaaggccgcaaaaaaggccaaggtgatccagttaaaatgggtgacttcgagccagaaaatggctcccactaaaagcacaatcagtgtccagctccaactgatcacactgctaatcgggttcggttggtacaaaaagcgccgttcctgggttatcattacttacaacacctcacaaaaaggagtgattcctttgtattcattatatacggatgccgccacccaaccgcaaagcggcctgagcgccgggggcatcctcttgattcacaaccaccaacaaactcaacacggcgtaaccttaaccgcgacgaccaatcatttggccgagtttgaagtggcgaccatcgcctttacgcaactggcccacgatttaggcgcagcgtgcgccacgaccaccgtgctcttttacacggatagtcaaatcgtgagccagagtttagacaaacgttatgcaaaacactatcaagcacaggtcgatgccttgttggccgcgcaacggccctttcaactggtcctaacgcagtgggtccccgaaaaacaaaacatgggcgctcacacgttagccaatcaggcccttcacgccagagaagacgtcaaataggtggccaacggcttttcgtagttacgccaatcgggcgtgccaccgtataaggcggaaccggctaagagccgcccgatttggggcccggtggtcagtccggacgagcctaacccggaggcgactaagaaacggtcgtgttccggtaacgggccgaagaacggtgcgaagtcgctggtgtaggcccgcgtcccgacccgcacgccggtaatgttttgatccgtcaacccgctcatcagtcgttgcgcactggccagcaggtcggccgtgaccgcggcgtctaggctcagatcaaaatgcttatcgtcttcgtgcgtggcccccacgatcagttttccgtggccgaacggcacaaagtcccgttcgccttcgggcatcaacacgggcaggttttcctgcagggggtaatccttgaccgctaactcgatcagctgccccttttgagcccggacgtcggttctgacgtgtaacggtaccagtaattcgggcagccaggcgccggccgcgataatgacccggtcgaaccgttgggcgcctaacgacgtcaccacgttttcgtcctggtccaacttgacgcgttcgcgccgcacggtcaggttcttgtgactggcctgcgtcaacagggcgtcgaccagcgcgcccccgtcgactttagcgccaccgctgaggaacaccccggcttgcgggttggtcagtaacggtaacttggcttggacctcttgggccgtcagctgttggaccgtgcccatggtgggtgcggtcttttggcgttcctgtgccagggcgtctagggcctctaagtccggtaacgcggcgcgcgtcacgatggtcccggtttgttgataaacctcggtccccagttgcgcgtcgtggaccagttgcggatatagatccgccccgtccttggccaagcgataccattgctgattacgacgcttggacaaccacggtgaaatgatgccggccgccgccttgctggcttggccgtttccatcatcgtacagggttaccttcaagtgttgcgcccccggcagcgtactgagatagtacgccgcggtcgcgcccacaatgccgccgccaatgattgcaattcgtttttgcatctaattccgacctccttataccaccaatcttgcactcggtttcattctagcataacttctaacggggcgacgatgattctgcccggggttggggaaaagttaagattaaaactacaatcaaatcgatttaggccttataaatgtatttaaagatggtactcattcaccaaccccatcgcattcttattattgattggtcattaggaattttcattctttaagcgataaatgtagactgttcgatcataatttttaatataaatattattctaccataatatttataaacaaaaatggtgtttactattcatgagtgtgatatactttaattgtcgagagacaataaatttctcttttataccctaatttgagaggaacttaaggtaagggatatggttattttggtaatcatatccccgtgcagctctagcccccacaagattccttgtgggggctatctgtctatcctaaatttaagaaggggctacaatataatgggttacttaatcggattagatatcgggattacttctgttggctacgccgttttacaaactgacttcaagggaaatccttacaagattctccttatgaacacggtgattttccccgttgctgaagcccccaagaccggtgaatccttggccgctcccgttcgtcaaaagcggagtagtcggcgaaccaatcggcgaactaagtttcgtaagcttagagttcaaaaattattcgttcggtttggcctactagaatctgctgacgttgcaaccttcttaaatcaaaaggttcctcaccaagacatctggcaactccgaaaagatgcgttaaatcgtaagttgtctaatagagagctatttgaaattctttacttttttgtcggccaccgtgggtttaaatccaaccgaagatctgaagttaccggtaaacaacctaaagacaaccaggtcgttttgacaagcattcatgatagaggcaatactctgaatgactttgattcattaggggaaatgatgcaagaattaccggaatttaagaccattaagcacaataaagcctatcgacctgataacactatctatcccctacgtgcctggattgagcatgaattatctgcaatattctcggtacaacagaaaaataatcggcagattacagataacttcatcacccagtacctagatatctttcgctcacaacgggactttgatcaaggccccgcggccccgagtcgctttgggggtaatatgattgaacgcatggttgggccggattcattagatgctcacgaaaagcgggctgcgaaattaactaacactttttttcgcttcaattttttaagcactttaaataatttaaaaattcaactcacccttggtgctgaatttcatcccttaaccacgccacaacgagaaatcgtcctccaagccgcaacgttaaagagtttgaattataaacagattcgccataagcttcaattacctgattctgctaggtttaatttggttccgtatcagtctaatgaagaccccattaaaactgaatccaaacactatctttttaagcgtaaagccttaactcaaattgaagctgtcacggataacccccaattaatcgataaaattggaaccatattagcatacttcaaaggcgataaaacccgtcaagaaaaactatcagccttaaacttaagccgtgctgaaattaagcaactgctccccattaatcaacctggatttggtaatttatctttaaagacgatgcacaaaattcttccttatcttgaacaaggacatctctaccatgaagcagctcaacttgcaggttatgattttcagaacaacctagttgaccgccaatacctacgggataatcttaaaaaccccgtcgtcaatcgtgccatcggtaagaccattaaagtcgtcaatgccatcatcaaaaagtatggtgacccagatgccattcacattgaactcacacgtgaaattaagcatagtcatgaggaacggcaaaaaattgcacgacaaatgaacacgaatatggaccagaacgataaggttgctgaacacttacgagaaaacggtatcccggtgaatggtcaaaatattatcaagtctaaattattttatgagcagaagggtatcgacttatatagtggtcagcaaatcaatgaacaagatttgtacaccgaggatcattaccaagtcgaccatatcattccctattccattagctttaatgatagttttacaaataaaacagttaccagaactagcaataaccagaacaaagctaaccgccttccacttgagtatctcagcgaggaaaaacaagatgcctttagggcacgtgtaatgtcgaacattagtaattatcgtaaacgtcaaaaccttttaaaggaaggcattactgaagacaaccggcaacaatggaaaactcgcaatattaacgacaccggctacatcaatcgactgctaagccagtacttacggaataacgtgcagtttaccaaaaaatctcataacccggtttttacagtaaacggtgccaccacggcctacattcgaaagcggtatggcattattaagaatcgacaagcgacggatctacatcatgccgtagatgctgtaattattggctgtatttctaatacattcgtttctcgattagcaaaatacagtgaagcccaggaagcaagatatcataaacaactttggcaaattacccaatatcgacaagaacataaggatttatctactattgagtatcaagaattaatcaaacagttcccactcccttggccagactttcgccacgaactaatggctcgactctccactgatccggctaagatgatggcccaccatacctgggaacattatactgacgaagaaattagtcagttaaaacctgcatttgtcatcagaagcgccaatcataaagttactggttcagcacacgacgataccatttactctaagaagctctatgatcagcggggggttggtctattaagaacatccttacaaaatctgaaatacgattcaaaaaaagacgggatcaagaattatgaacgcttaaaggacgggagcaactccttagtttacgactccctattgagagcattaaaggaacatgacggtaatgctaaaaaggccttccctgataatcagttgcttatttctactggtaatcatcagcaaatcattacgcacgttaagaccgtaaaaaagatcacccatccaattgaagttaatcgtgacaccgcaattgcaattggcggccgcatgattcgcgttgatattttcaaacaggccaaggctcagaaacttattggcattcctgtatatgtcaacgatactgttaagcctacccttcccaatcgtgcttgtactagtggaaaaagatatagtgattggtaccaacttaccagacaggatcaatttttatgctcattagtttccaatgatttagttttagttgaaactgcttcacctctaaaggtcactaacaatatcaccaatgaagaagtccaaacaactcaattactctgttacttctcatcgtttaatatagccaacgcccaaattaactttcactcaattaacaatgattcatccattaacccaattgtcttaaataaagttacataccttacaaaatatcaactagattacctcggcaactacttccccgtcaaacacgaaagtcgcaaaacatttaaccgaaagagatgacttagatgttcagaaacatctatcttcatagccctgcccaaatctcaattgatcattatcaactatctgtttgtgttaaggatactcagtatcattttccgttcgacgatattcaaagtttacttattgaaaacccaaaatctgtaataaccgcttctgctattgcccaacttgccgagcacaatattaccgtaattacttgcgacaaaaatcacttaccaatttccactctgctccccctgcaaggatcctatcaacaccttaaaacgcttcaattacaattaaagctgacgaaaaggattaaagaacggataacccgaaaaattattaaacaaaagattttaaatcagtcccaggtaattggcttgctcactgaaaatcccactgtgcaacaaaaactcatgcgattagcttcagctattcaggacggtgatcctgataatcgtgaggctgttgccgcaaaaatttattttgaaacactaggtggttcagacttttcccggcggtccgaagtaatcgttaacggtgctttgaattatggattcgccattttgcgaagctgtattgcccgtgaattactacaattcgggtttgaacctgcactaggatttaaccatcacaacattcagaatgcctttaaccttgccgatgatttaatcgagccactgcgtccggccgtcgaattatattgtttcaaaacgtttaatcctaatgattcgtcagaattagactcccaaataaaaagccgacttttaaacatccttaattacgaagttctgatcaataataaccaggaatccattcgtcgagcaattcacttaatggttgaatctttatggtctgtctgttccgaacaaaagatttcctacttggcactcccaattgttcaaaacttaaaggtacatgataatggagaataaacgctttatgagaattctagtaatgttcgatttacctaccatcacaaaacaaaatcggcgaaacgctgctcgcttccgaaaagatttaattaatgcaggttttgtaatgatgcaattttcggtctattatcgactcgttaatgggactgacatggcaaaaaagtacgaacaacgtgttaatgactgtttaccacctagcggacaagttcgcttactcgtcctaaccgaaaagcaattcagcagcatgcatatcatgctgggacccattacgccgcaagaagccgttgttgataattctaatttaacagtcctataagaaaaaaatctcccacggcagatattatgccaagggagatttttttcttataaattaagcttaatcggcagaattatagtcaggaaaacctgacctatcccccatgattacagcattcataccatatcgtcttaatttataccctaatttgaaaggaacttaaagcatcctggaataaatcaatcagggaatattgcttaatttataccctaatttgaaaggaacttaaagccaaggtactcgacttttcgagagtagactgcttaatttataccctaatttgaaaggaacttaaagcgatatcttgcttaatctttcgccgcttagccttaatttataccctaatttgaaaggaacttaaagcccgcacacaacgcttttatggcgcacggtgcttaatttataccctaatttgaaaggaacttaaagctgactaggcgctagccttgtaataggataccttaatttataccctaatttgaaaggaacttaaagcggtatgctgaaatggcctatttggtacgcgcttaatttataccctaatttgaaaggaacttaaagctacaagttcagcactacatgatggtactcacttaatttataccctaatttgaaaggaacttaaagcgctagtcagtttgccctgggcacccttggtcttaatttataccctaatttgaaaggaacttaaagcttggtaacggcctatttaaaccaacaattacttaatttataccctaatttgaaaggaacttaaagccagattgcggacgataactctaattatgggcttaatttataccctaatttgaaaggaacttaaagctatcaagttgcggtctgatggtagtgtttgcttaatttataccctaatttgaaaggaacttaaagccttatgaacccgctgggaagtataccgacacttaatttataccctaatttgaaaggaacttaaagctcaacagagatgatgccggtaacaccgtcgcttaatttataccctaatttgaaaggaacttaaagcagtcaggcgataaaagagttccctattttgcttaatttataccctaatttgaaaggaacttaaagcgatgaagacgtcgtacttctcggccatgcgcttaatttataccctaatttgaaaggaacttaaagctagcaccgatcaaagaccgcttgacgtcttcttaatttataccctaatttgaaaggaacttaaagctggcgtaggtgagtcaataaggcgactccgcttaatttatacccctttatgttagcattaaatgctcttgataaaataacttgctttcgaataatttcttacagagaattcaccatatcctctctcctcaacgtgttagactaaaagtaaatccaaatcaccttaaaaggaagtgtctaaccatgacccaagccgattccgccaagtattcgatcaccgtgacagccgatgacgacggtaacgttcagttagcgtccaccctcgatgagggccgcaccgtgagtgcgctgatgttgtcggcgctgagcaccattaagaagagccaaccccagttgacccaaaaacagtttttagccatctgtaacggcatctgggactacgatcagaaatattgaccccagtcaaaaaggagcgccaccttcacgttttcgtgcaggtggcgctccttttaaacgactttaagttacttaaaaaccttgaaccgatcggcatcggccatgaagtccttatcgccggccggcgcttcgatggacccaaagtccatttcggcccgtaattgccagctggccggaatatcaaacgcggcccgcacctggtcatcgatcagtgggttgtagtgctgtaggttggcccccaaaccgttttcggctaaggccgtccacacggcgtactgggcactgccctgggcctgttccgaccagtcgcggaagttatcggcgtacagcgcaaagttgccttcgaactgcttgaccacggccgtatccgtgaagaacagcaccgttccgaaagcggccttaaagccgttgatcttcgccgccgtcttggcgaaggcatcatcgtccttgactaccttgcgtagtgcgtcgtggacgatgtcccagagccggtcgtgggcctgattgaacagaatcacggcgcgggtcgtctggttgttaaacggcgttggggccaacttgatgttggttttaatcaagtccgtcaagtcgtctggcgtagcggtcacgttgcgaccaagtgcgtagatactccggcgttgtttagctaaatcgatcaattgagttttcataataggtaaagtcctcactttttaaaattaatttttagtttaaatgccagaacatctctggtgtgaatctagcatatcaacttactttttgaaagtaaaggaatttaacctgtcgttgcggataatagttgggtaacctgttgctgaacccagtccgtggaataggtcgcgggcggctgcaccaaaacacctaataggaaggtccacaccgccgccacttgctcgggagccaaaggttcgggtaccggagtctgagccccccacagcgtcaaaacggtagtcagactctggggaaccggccacggctgggttaagccaaacgccaccgcacgggggtggtcctgctgatagcccaataaattcgtgatcaagcgactgagcatggcatcgggcgccggggaatccaacacccccgttcgtagcgccgcctccacctcggttaagatgtccgtgcgcaagaccgttaacagactcgctttatccggaaaatgccggtaaatcgccgcgggtgtcacggctaagaacttggccagtcgccgtaacgacaattggtccacgcccaactcctctaattcctggcgggcccgttgttggatcgccgcggctaaattttcccggtgatagggttgcttggtcatcttaacaccctccttaggatgaaatcggttacatcaactagtttaagcctatgttatcaccgattacatctaatgtaaacaatgataacattgatcactttagctaacctttacgttttttttacacgttaaatcactgaatgggcttacaatgaaggtaatcatcctattagaaaagagcaattcctatgtccgataccgtttctcgtcgccggttaacctggcaattcatcgctttttggcttacctggctaattgtccagatcgtcatcaactcccccattgaacgtcacctgtccggatggccccaagagttgaccctcgatgccatcaagttagtcgtctggttgggtggcggctggtggttcattcatcaaacccagccccaaacactcgccattgccccccgggaacagtggcgccctaactggcacttctcggccggttacctcatttggggaatcgtcgtcgtttatctactcggtcaattctggttgacccatcacggcctgcgcgtcagtcacagtttcctacccgaatactggggccgctacttcgtggtcgtggggatcaccgaagagttcgtctttcgcgggtacttcttaaacgccctcctcaaacacaccagctttgcttgggccaacacccttcaggcgttggccttcatgtcaatgcacattccgcgttacctcaccaccatgccgccaatgagtccgacggtttggctcagtaacctaatctccgtggccttactcggcgccctcttcggttggttatacgtcaaaagtcggtcactctggcccggtatcatcgtgcacatgacctgggatattctggtcacgctgttctcgtaagctggcccccattatcgaagtcaatcgaaaaagaattgtcccgctaaacaattgaaatcgtttagcgggacaattcttttttaatagctaaatcttactggttaaccaaatgtaattctgagaaattagacgggtagatgaatactgcaaagacggcatacgtgtcgctggatattttctgcgtagcacacccaatgcgcactgaggaaaagaaggttttcggattcgttcccgcttgataatcccagtcactaagataggcccattgtcccggtgaggacatccggccagtaagttttcatataaggtgctaaggacgattccgctttatcgggcccattgccaataatcgcactaatcccattcttggctaaagaacgcttatatatcgcacgatcatgatcattatcgttagcaccagaaaagtcaccaaatgatccaaaaaatgtcaggtgttgaaccgcaagcgttgacttgatatgcgaagcttgcaaggcatcatgcaggaaccctttagcggcaaccatcaattgtggatcaggtttagccccgtgtcccaaccctttaatggcctggacggcatgcggatcgttaaccgttgaggttggctgtgaagactgattcgtcttagtcgttcccgtgttggaagcagtactattagtcgtcttattcgttgccggctttaaatagccgcgccaaatccatccttgtaaagtgccatcagcgcttttaacgtgatagtaaatggctgaactccccttggctttccgataaagtttttcatgggcatccgtataccacgtgaccgattccgtgacgtcgttattactgtaccgaattcccaggtgttgcgaataacgcgcgccctgcgtggccgttaaggcgtggcggcccatactcttccgccaaaccaatttgaccgaattggaacgtgcggccgaatactgactgttggctgaagccacaacggtagtagtccctaacatccccaccccagccattaaagctaaaacgctctttacaacttttttcataatttcccctcccgctagttctattagaactttacacgtatggcttctattgggtaaatcataagtaacatgtataccttataggagatatttcattaagcaatgtatcaattgttgcgactataatcgtcacccagaaatattaaatggcagaggcccaattatgtttcagaacactgccatttaaaaaatcaaatagttatcttaaattgattgaactacctacttaggattcgaattagttttttctgaatcaaattaattatctatccgatgaatagattcataactagttggatagacaaatacagcgaaaactgcgtatgtatcgccagagagatgctgcgtggcacacccaattcttactgaagaatagaaggttttgggattcgttcctgcctgataatcccagtcgctcaaatacttccaggacattgtaagtgcgtccggccaatagtttctagaatcggtggtcaaggccgtttcagccttatcgggtccatacccaatttttgtactaatcgagttattcgttaatgacttttcataaagggtccgatcagcggaagttccccctgtaatcttctcataggttccacccattgaaagtgccgtagctgttaatttagcttttatctgtgaatttgacagcatatctttcaaaaatccttttgctgcaaccatcaattgtgggtcgggtttagccccgtgtcccaaccctttaatggcctgaacagcatgcgggtcgttcaccgttgaggttggctgtgaagactgattcgtcttagtcgttcccgtgttggaagcagtactattagtcgccttagtcgttgtcggctttaaatagccgcgccaaatacatccttgtaaagtgccatcagcgcttttgacgtgatagtagatggccgaactccccttggctttccgataaagtttttcatgggcatccgtataccacgtgaccgattccgttacgtcgttattactgtaccgaatgcccaggtgttgcgaataacgcgcgcccctttgtcgccgttaaggcgtgacggcccatactcttccgccaaaccaatttaaccgaattagaacgtgcggccgaatactgactgttggctgaagccacaacggtagtagtccctaacatccccaccccagccattaaagctaaggcactttttacaattttattcataattttctcctcctgctagttatgttagcactttacctgggtaaatcatacaatcctcttaaccattagaaaaacgtattcaatctaaaaattggccctagaaaccgccaaacgatttctagggtcaacttttaatgaccaatatttaggaaccaatgcctcgaacacctgaacaggttatttaagcaccgtatcgtaactaaccagtttcaccgttcttggatgcgaccagcgttgcttagcgtgttttgcatagactttgagcggttgatcggctgaaaagcccttccagttttgggtgttaaagaccagcaccccggttgacgtttccttaaacaaacgctgctttccctgccgaacttcaacgatgctgttgcgtgccgagcgaatcaaaccggtataaggaagcttatacacgaccggttcgatcagtttaagcggttgacccgctttcagagctgcctgattttgccggttctggtcggcaacccgttcaatcagtcgttgatttttttgggacgctttaatgtttttagccgtaaagaattgtgtcacctgggggcggctggttcgttttaccgccgcctgtgcattagtcgtccccagtcccagtgtcgccaatgctagggtcaaccccagcgtcatttctcttttcatcattctcgctcccctgtgtcctagtagcgggtcgtccccgcatccacgtgcagttcaccgtcccactgctcgctgaccacggccgccgtctcgtggtgaaagacgcgcaataacgtcaggagactttcggcgctgttctcgaccgttaactcgctttcgggtagccagtacacccgcccctccgcgctggcgtggagctctccgctaaattggtcactgcggtacaataagcctaacttacggcggccacccggcacgtcaaaccattcacaggtgccgcaaaattcggcggtcgctaacaccagaccggtctcttcgcgcacctcgcggatggcggcactgagcccactttcaccgacttcgacgtggccaccgggaaagctgtgaccggccttccaagggacgttgaccttatcttcgaccaagacacgtttggtttggggatcttgaaccaggaccatggtcaccaattcaacgggttgcgtgcgagacatttgaaccactcctctagactttttcttccattatatcagtttcagagcaaacaaaaaggaggctcacgggcctcccttattttcggtgtcaacgctttaagcttgacgttgattattatttttagatttcatgagcaaggcttcgccgccgtagcacagcacaccgagtgcggcaaacgcgactggaaaaccaacggcccaaagcagtgacttcatcaggaccaagcttaataacagaactgacagtaccaccatcacaattaaaaccaaagtatcttttttcatttcaattcccccgattccccgaatatttgtggccccaaccacatttacagggtagcaaattcccggaggagttgcaaactttcgccccaatcttaaccaaacctaaacgaactctttaggaatgattgttcagcttcgattctgccggctgagtcgggtgctgtaaccgttctagttggcccttgaactccggggcgtacttttcttgatcggaggtaaaggcgcttaatttagcgttcaggctaatcgtataatcggcgtgttcaccgtgttccccttcgtccaagccttgacgttcctcgacggcgttgacccgcatcggcatgacccgtttcagtaaccagatcagcagactccccatgagggccacaaaggcaatcgtgaaggccgtcgccaagagctgaatacctaacaagtgccagccaccaccgtaggccaacccgttggtggtgacgaccgagttgacggacttagtcgcaaagacccccgtcaaaatactaccgacaatcccgctgacgccgtgacaaccaaaggcgtccaacgcatcgtctacgcccaagcgcggcttgagtaacgtgatgaagctgtagctggctaacgtagcaatggcgccgatagccacggacccgaggatcgtgacgtaaccagccgccggggtgatgccgaccagcccacacaacgtcccggtgcagaccccaaccagggttggcttaccggtcgtccagatatctaagatcatccagaccaccatcgccgtcccggtcgccaccgtggtggtgatggccgcttgcatggcgacgttgttgacggccagcgcactgccggcgttaaagccgtaccaaccaatccacagaatggtcgtacccagtaagacccatggcaagttgtagtgatccttgctgtcgaccttcagccgcggtccgagccagatggacaagatcagcgcggtgaccccggcgttgatgtgcacgacggtccccccagcaaagtccaagacacccaggttggctaaccagccgttggggctccaaaccaagtggaccatcgggtaatagataaagatggaccacacgatgagaaacgccagtaagaacttaaagtgtgtccgcccgacgatcgccccgacaaacaacgctggggtgatgatcgcaaacatcatttgaaacagggaatagtccccgatcggaatcttcgtggcggttaaactccccaaattaacgcccgccatgaagacgtgtttcaggttgcccacaaccccagcgatgttgcccgaaaacgccagcgtgtatcccaaggcaatccataagacaatcgccaccccc

SEQ ID NO: 4503 - DNA, 6857 bp, synthetic construct
  variation 5982..6066: note = note, n is a, c, g, or t
  misc_feature 1..6857: note = Synthetic
  variation 6261..6315: note = note, n is a, c, g, or t
  source 1..6857: mol_type = other DNA
caaagaacaagtagccaaaatgctgatgatgacttttaacctcaaagaagccccccgtctccttgacgccaccgacgccctcggcgtagccctctgccaccactacaaccgcggcaaagtctccaataaaaaatcaagctgggaaagttttgcaaaggaaaacccggggagggtgaaatagctgcgctttcataaaaaaaaagcccccgataaggacgagggcagaaccaaacgaggggttacctcactacggaataaatccttattatgatttgcttcgcaacaaaggtaagacagaaaattgaattagcaaactattggataaaaaaatcagtctgcaatttttgcgcgatgccagttaaatttttttctgaattgacgttatttggcgtagtgtatagtgttaattcgcattatgcagggaggcaaaaatgcggggagaacggtatttaccctcaaagaggaagatttttgaaaagaagattagcttaacggcggagaatatcaatcgcatcatcttgtcccaattgaataacagaaaatttttgccaattgccaactatcccatattgcacatcaaaaaatattaatatatttggaaccttaataaataaataatcaattctataaacttaaactacaatgaaaattcttggtctagacgttggcgtcacctctgttggaggaggtttgatcactattcctgacacatttgaagattggggcaagcacggaggaatcaattggctaggcagtcgtattattcctactgatggcgattatctgcaaaagtttgaaagcggcgtaccggctgaaacaaaggctgcctttagaactgccaaaagaggctcaaggcgattaaagcaacgctatattctgcggagaacaagactaataaaagtcttcaaaatcttaggttgggcgagttcagaatttccggaaaacttcaaagagaaaataaaaaaggaagaagatttcaaattcaacatcagcagttatctgccttttgagcaaacttcaattgacgaagccacaaagctattaggagtaaagaataaaaaagaaaagttggcttgttctgaagattgggtgatttactacttaaggaagaaagcgctgagtgaaaaaataagcctgagtgaattggcacgaatcatttatatgttcaatcaacgcaggggttttaaaagcggccgcaaagatttaaaagatgtgccggaagatagcgttgagaaaaaacgggttgagattcttaaaataaaagaagtcatccaactaggggacgagaaagacaaaaacggaaagtataaattccagataatacctgacaatagcgttgcaaaagaacgagttgaaccttgggaggaaacacggcataaaaagccagattgggaggagaaagaatttacttttctgataactgtaaaaaatggcaaacaattaaaacctaaaactcctgataaagacagtgaccatgatcttttagtcactgctcttgataataaaataacagattcaggaaaaactgcaggggcctacttttttgatgaattagttaatgataagaactataaaatccgacagcaaatagttaaaagaatccggtatcaggaagaattaaaagccatttggaataagcaaacggaattttatgctgaactaaatgataaaacgaaactccgcgaaatttcagccgcgttatatcctacccaaaccaaaacagaaaaatctaaactaaaggagattcttagcaacgatctgtaccatgtaatagcaaatgacattatctattaccagcgtgagcttaaatctcaaaaggggctaatccagggatgtcaatatgaaaagattgaaatttgcaagaacaacgagaaaataaaagttggcgttaaagcagcccccaggtcatctcccgattttcaagagtttaggatttggcaaaccatccataatatcaaaatttatgaaaaggaacaaataattgacgggcgcactcgaattgatgttgatgtgacaaaggaataccttggcaacaatgaaaacggctttaagacaaaggaaaaattgtttgatttttttgacggacacggaggagttgaagctaaacaggtattcaaaacgattaatgattcttgttcttcaaaactttcagataagacacataaaataaatcttttttacaaagacggagtaaccgtaaaaggaaacgaaataaaagaggtattcagaaaagcattcagaaaagcaaattatgctgaagagggtgagcaaatactcaatgacgccaagcgcttgaatagtctatggcacatattctattccataagttctaccgatgccgaaaaatcccaaaagggcataaaaacagcgcttgggaacccgaaactggggttcaactttccggaaaagataatcgaaagcatcgtctccattccggaatcagctaaacaatatgcgtcattatcttctaagtctattaggaaatttttgccgattatgcgttgcggcaagtactggaaatgggaaaatattgcacctgaataccaagccaaaattgaaaacttaattaaaaaaggatggaacaacgtcgataaaaatacgggagaaattataggagtagagtatcctttcgctaatgcggagcaagttcagggactcgcgacgtggatggctgcttacgtaatttatgatcgacattctgaaagatctgcctcagaaaagtacacctcatacgaacaaattgatgtaatgaaacttgttcctaataattcattacgaaatcccttagtggagcaaattgtaagagaaacgcttttcgtggttaaagatgtttggaaaaaatttgggcaacctgatgaaatacatatagaactgggaagagatttaaagaaaaacgctgaagagagaaagcggatatcagactcaaacacaactaatcagcaagaaaaggaacgaatcaaaaggttattaaaagagctgttaaacgatcagtttgaagagtacttagaggacggctccacaaaaaattctcgatttgaaaccaagccaaatccggagagtccgcttgacgttgaaaaatttaaaatttggaaaaatctagccggcaatcttcccgaagatatcgataagttctttaaagggaaagatgcaaaggaaaaggataaactccccagtagcgcggaaataaaaaggcatgcgctgtggttgacacagaaatgcaagtcgccttataccggaaaaataattcctcttagcaaacttttcacagaatcgtatgaagttgagcacattatcccgcgttcaaaaatgaaatatgacgcgaaggagaatttggtgatctctgaaaccgaggttaataaagcaaaggggcacaggctggcagccccctttatttctgaatgtaaaggcaagtgtaagcatggcaatactgaatatgcgcttctagaatacgccgactttgaaactcactgcaaggccattttcagaggtaaaaagttaaagaatttattagccactgaagtgcccgaagattttatttcacgacaaataaatgacacccgacatattacaaggaaaattagcgaattactccagccgattgctaaaagtgagaatggccttgtttttacgataggaagcataacctctgatttgaaaagagaatggggtttaactaaagagtggaaaaggctaatgcttccgcgttttcaacgcttggagtccattacaggagaaagctacatttctgttaatgccaaaaatgcaaacgactttgatatccatgttccagaaaatcctgatttggacttaaaacgcattgaccataggcatcacgcattagatgccctcataatagcggctacaaccagagagcatattcgttacctcaactccttgaatgccgttgataataacgaagaacttaagaaagtaaagcagactttggtaaagagcaaggttagagaattttcgttgccatgggagagatttacagaagatgccaagaatgcattgtcaactgttatcatatcaataaaagcgaagaataaagtcgttagtaagcccaaaaacaaataccaaaagtgggtggagaaagacggcaaatggaaaaaggaattcgtggcgcagaagccacccaaagaagaaggcaaaaagtggttgtcggttcgcaagtcgatgttcaaggaaccgcaaggcattattcatcttaaagaagtgtatgatgaaaaaagcatagttaaagccatcgagatccaaatcaacagaatgaaagtccaagatacgcctgccatgaaaacggcttcgtacatctatgatcaagaggcaaaagagattgtaaaacgattgattttggaatatgacttcgatattgaagcaataaagaagcatcttaaaaagcatccattgaaggatgcaagcaggcaagaatacaagacaattaaagtagccaaatttgaagaatatgcttcaaagcgtgtttctttggatgcttcctttgactcaaaaaaaatcaacaaaataccttatgcaaatcatattaaagaagtgtatgccgaaaaaagcatagttaaagccatagagattcaaatcaatagaatgaaagttcaagacacgcctgccatgaaaacggcttcgtacatctatgatcaagaagcaaaagagattgtagaacggttgattagggaatacgacttcgatattgaagcaataaagagagagcttgaaaaacgtccattaaaggatgtaagtgggcaagaatacaaggcaattaaagtagccaaatatacaaaggatagcaaatcaccatcaccattagctgaaattctaaaaaagcatttagagcaatataatgagggcgacaaggagcaccctgaattggcattccatcgcgagggaatagaggttttgaacaaacggttaaagcaaccgataggcaaagtgaccatctacgaaaaaaagtcatccgaggacaaattcaaaaacaactatgtcgaggttgataaaggcgcaaatgtgtacttcattatgtatgaggatttgaaaaccaaagaacgtaatgaaatgtattccattgctgcgcataaagttgttgaaagagtagtttccggtgaacctatagcagaaaataaggaaggatacaaaacaattattctctcgcctgaccaattggtctatgtgcctacgccagaagaaatacgtaatccagagttaatcaatttggaaacaaatgatccgaataagcgcaaattaatatttgaacgagtgtataaaatggttagttgtaccggaagtaaatgcgagtttattcctcacaacatttctaaagcaataattgatactgttgaattaggttctagcaataaaaatcaaagagcttgggatggtaaagtagaacttaaacccaaaagggaggattctggcacaatgattaaagaaatatgtcaaaaaattagcatagatagattaggtaatataaaactggcttagagtatgattaagcgcaccctctacttcggcaaccctgcttatctgagcttgacaaatagccagttagtgttgcgcttgccagaagtggagaagagcgaggtgttaagcgagtactttaaaaaggaggctacaagaacagtgcccgtggaagacatcggcgtggtggtgcttgacaataaacgaattaccattacccaaggattactggccgctttgttggaaaacaatgccgcgctcatcacttgcaatgaaaagcacatgccggccgggttgatgcttaacttagacgggcacaccacacagcaagaacgcttttcggcgcaaatagaagcgagcctcccgcttaagaagcagttgtgggcgcagacggtgagcgtgaaaatacgcaatcaggcctctcttctggccgctcaaaaaattgcggttgaaaatatgcatcattgggcggactgcgtaaaaagcggcgacggcgaaaatcatgaggcgcgtgccgcnnnnnnnnnnnnnnnnnnnnnnnnnnnnnnnnnnnnnnnnnnnnnnnnnnnnnnnnnnnnnnnnnnnnnnnnnnnnnnnnnnnnnatcacggctcgctctctggtgggcagcggattgttgcccacgctggggatttttcacagcaataaatacaatgcctactgccttgcagacgatatcatggaaccttacaggccttttgtagatgagttggtattgagtatggtgaaagaggggcaacaccaaaaagagcttggcagagaaggcaaggctcaactnnnnnnnnnnnnnnnnnnnnnnnnnnnnnnnnnnnnnnnnnnnnnnnnnnnnnnntttatcctgaatttgcatgaatcagaccggaaaatatgctcgaccgtacaaaaaaaacgcgcctaaacgcctatcgggttttgtgggtaatggtattatttgatttgcctacggaaacaaaaaaagaccgtaagaactacagcgtttttagaaagaaaatgttgcaagacggttttaccatgttccaattcagcatttacctgcgccattgcgcaagtcgcgaaaatgcagaggtccatatcaaaagaactaagctaaatctccctcccagcggccatgtgggcattatgtgcatcaccgacaaacaatttggcatgatggagctatattacgggaaggcaaagaaagccaaacccaatacatgccaacagttggaactgttttagaaagaaaaaaccggcggaaccttagttccatccggttttccatgaaaagaatttttctttccattttttgacgtaaagtactcattatcaacttatagtgctaccctaggttgtttttcaatacgtcaaagatacaatttgaaagcaaatcacaac

SEQ ID NO: 4504 - DNA, 23051 bp, synthetic construct
  source 1..23051: mol_type = other DNA
  misc_feature 1..23051: note = Synthetic
atgcgtccgccccatgaacccgcttccccatatcgccactcgcttcattcatggaggttatgacggccaattcgattggctatggataaaatcctgctaaccatagattttattacggaatgaagcggatttacttctctggcagcgagccctggtggcccccggcctgccgcatcggcggcatcggcctccgggagaccatgtctccccagcacgtcaaccgccccgaaggcatgccctattggctcatcgtcgccttcgaccatcccgccgatgtgctgcttgatgaaaaaatccgcaccatcggccccgctgctctggtcgtttggccccccgcccggtgccatttcttcggcaaagccaccggacgctggacccacacctggctctacgggagcggcccggcctgggaccttgcctgctccagcctcccccaggaacaacccatcctgctggacggcaccggattccaccgcctcatcgaggccctctaccatgaaatcatcgagcacccccggcccgatcccaacatgctccaaaacctggtcgagctgatcgccacccacatccgccggctggctccattgcccctgcgccagccccggagcgccggctcgctggcccgtgcctgtgacctcatccagcgccggatgcaccaccccctctccctggccgacctcgcccgcgccgccgggctctccgtgtcccagttttccttcaacttccgccgcgcccacggcatgtcccccatggcctacctccgccgccagcgcctccagcgcgccgcgcgcctcctggaaaatcacaccctgagcatcaaggaaatcgccgcccaggccggctaccccgatcccctgcatttctcgcgcgagttccgccgggtcatcggccatcctcccacccgccaccgcgccctggcccaatccgcccgcacgcgctgacacgggcggaagcctgccggcggaacccgcgcatccggggcgcaaattcgcattcccaccgccacccgtccggctaggctgcctcccatgcaaaccgcacccgtgctcggctacatccgcacccattgggaccgcaccctctatcgcgatgccaatggctccggcttccagggcgaggaccttccctatccatacacctctccctgcatcaaaggccagggccacttctatttcttcttctactgggacacttatttcaccaacgccggcctccttgcccacggacgccactccgccgccaaggacaacatccgcaacatcctttggcttgtcgagcgccagggctacatgcccaaccacgtcgccatcaccaaccgctcccagcctccctatctctgccagatggtgcgcgactacctcgccgccaccggggattccgctttcctccgcgaggccgcccaaggagtccgcgccgaacaccacttctggaccaccgcccgctccacccccaccggcctcacccgccatggccaccatgacaccgccgagggctgcgccctctttcacgacggagccgtcacccggcgcatgggctggtccaatgacattccgctgcccgataaagtccgcatcggcggccacttcctggccgaggccgaaaccggctgggacttcaacccccgtttccagacccgctgcctcgaccacaatccctgcgacctcaacggcctcctctacgggcacgaaacctggctggccgaggcctccgagaccctcggctggggtgacgccccccgctggagaaagctcgccgccctccgccgcgagcgcatcgaccgccacctctggagccaggaacgcggcctctacctggacttcgatttcgtccacgggcgccactcccccatcgcttccctggccgctttcctgcccctcttcaccggggccgcctcgccggaacaggccgcccgtgtccgcgccgcccttccgctcttcgaacgggagcacggactcgccgtaaccgaagcctcaccttcctgccggggctatcaatgggcctatcccaatgcctggcccccgctcaccttcatcgccgtccaggcgctccgccgctatggcttcgatgaggaggcccgccgcatcgcccggaaattcatcgccaccaccgtccggctttttgaaaaaaccggccagctctgggaaaaaaccgatgccgaaacgggcgaagtggcgggaggcgaatacaccgcagctcccatgctgggctggaccgccggcacctttgtcgtgctggaagaatggctccacccccgcccttgacctgctccacctttcgcccttgtgccgcacccggcggcggccatcatcaggccatgcgcctgcttctgcccgccctgctcctcgcctccgtcctccccctccccgcagccaagctgggccaggacacctggcgcgaggaaaaacgcgggcagacactcgacggcctccgccactggtcccggctgaccgaacccagcagcggcaccatcgtcgatgccggcgggcgccgcgccctccgccttaccgatggcgcccgcatgcagtccgtcggcgtcctgccttatggcggcggaatgaccctgcgcggcctgttcgatgtcacctcgtccggcggcaccgccgggttcggcttcatcgatttttccagcggcatctactactacctctacgtggacaaaacggcgggcaaaatcatcctccagcgcggagacgcggaaagttcccaggtcctggccgaagccccggccgcgcccgcctcccccatggccctggaattgaacgtggacaccacggacaaaaaaaccatccgcctggccgcctcgctcaacggcaccgcccttctccaggccggggaagaaaaaccgcccaaactcggctcgacctatcaaatttacgtgggcctgggcggggacacggtggccgatctctacgaaatgaccgccatcctcggcaaatagcccgcgctcaatcctcgtccgcctcgtccagcgctttcaaagtccgcttcgtcgccgccagcttgccaaagccgaagaaaagcagcgccatccccaccggcagcagcagggcggtgacaaaaaacgaccagcccagcgaggccaggcgcgaccagaaggcctcgtccccgctgatcacaatgctcaccagggtcaggcccgtgggaacgatcgagagcagcatgcccacccccatcagcatgttggcggtttttaacgacgcttgcagtgcttccttgttggtttcggccatagacccagcctgctccccacccctcggccttgtcaatcttgcagattgcaacaaccctgccacgcagcgcctgttctatccatccgcctccgtttccaggtcgggaatgtgatggaaggcaatccgcatcggggccgcatgcaaggcctccatggatcccccgaggaagacggaatttttgccgaatttccggttgatcgaatccatcagatggcccaggcggtcccggcgtcccgcatgctcgaagaggcaaggggtgacgttggccgcctccgtcaggcggaacaatgtgacccccacggccaaaatgttccgctccggcccgggcctccgcgcccagagttcccccatcacccgcaccaaatggatgctgtcctgcgtttcctggaagcgcaggtccatgccccagcgctcccggtccggatatttcagcgccaggtgcagcccgccggcaaaatagcccatcttgcgcagccgcatcgccgccttctgggtcagccggtgcagcaccgccagcgcctgctccggacggcgttcctgcggaggcagcacatgggaatggcccaccgtggtgtgggacgtcggcgcctcatgcaccagccgccccctcaactggtcgtggaaccgctcgccctcgatccccccccacacccgccgcagctcgtccttgcccgccgcacacagctgccgcaccgtgcggatgcccgcccggtggagcctcacttccatattgcgcccaatgccgcacaaatcacgcaattccagcccgtgcagccgctccggcaggtccccttcatccagcaccaccagcccgtccggcttctgcatgtcactcgccgtcttggccagaaaccggttcggcgcaattccgatcgagcagcgcagccgcggccccacctgccgggcaatctcctgcttgatccgccgcgccacctccactgccttctcccggctccgccagttctccggcagcccgcaggccatttcatcgatcgacatcacctcgtccacatgaatgcaggattccaccgcctccaccagccggtggtggaaatccacatacttctcatgccgggcctccaccagccggatgcccgggcacatcaccttggcgtcccccacccgcgtccctgttttcaccccgaacgccttggcctcataactggccgcaatgcagcaggtgctgtccgccagcatcggcaccacccccaccggctgcccgcgcagcgccggattcaattcctgctccaccgaagcgaagtacgaattgaagtccaccaccagattgcgcaaagccatcccccagaatacccccccatcgccccaactcaacgcctcttcccttcccaggctcccccgcatgcctttgcccccttttgcgcccccatcctgctttctccctttcaggcttgcaacctgcacgcccaaacccgctcaccaatcgctaaaatcctactcaaaatttgcgcgcacccccttcatgccgtaatggtatctaaaaggaaacaaacaggttgcagcggttcaaacataagttcgtatcatgttgacaccttccacaaccttacccatacatgaggactgtctcatgactcacgaagcccccgagacggagaactacttcaagaactccgccctctaccgggagttcctcgccgaacgtgaggaaatcctgaagcacaaatggatcgagagcgaaaaagccggttacgatatcggctttgaaaaagcccttttggattggattgtcaaacatcgtgccaattggcgcctccagcgccaagccactttgcagcgccagcccgccacccaacactgatccgccccccaccccgggacggacgccccctttaaaccggtcctgcgaggccggaaaggaaccatgaacgacgccaccgcagtctgggacgccgccgcgatcagccgctcgctgaaccgcctcgcccacgaaattctcgaacgcaactccccgtccgcccagctcgctttcgtcggcatccatacccgcggcgtccccctcgcccgccgcctccatgccctcgtccagcgcttcgatcccacccgccagctccctgagcccggctccctcgacatctccttccaccgggacgacctcgccgcacccctgcccaaagacaccgatatccgcttccccctggatgacatgaccgtcatcctcgtcgatgacgtcctctacaccggacgcaccatccgcgccgccctcaacgccctcaccgacctcgggcgcccccgcgccatccaactcgccgtcctggtggaccgcggccaccgcgaactccccatccgcgccgattacgtgggcaaaaacctccccaccgcccgctcccaaaccgtccaggttctgctccaggaaaccgacaacaccccggacgaagtccgcctcgcccccatctgaaatctccaatttgaaatctcaaatcccactccccatgtcctggaaccgcaaagacctcatcgaaatccgcggcctctcccgcgaggaaatcctcctcctcctcgacaccgccgccgccttcaaagccatcctcggacgcccgatcaaaaaagtcccctccttgcgcgggcgcaccgtcgtcaacctcttcatcgaacccagcacccgcacccgcgcctccttcgagctcgccgcccagcgcctcagcgccgatgtcatcagcatcgccaaagaagccagcagcctcaaaaagggcgagaccctcaaagacaccgccctcaacctccaggccctcaacgccgacttcatcatcctccgccacagcgccgccggcgccgcccgcttcctggccgaccgcctccaggcccatgtcatcaacggcggtgatggcgcccacgagcaccccacccaggccctccttgacaccttcaccatccgcgagcgcctcggctccatccaggacaagcacgtcctcatcctcggtgacatcctctacagccgcgtcgcccgctccaacatcttctgcctcctccagctcggcgcccgcgtcaccctcgccggcccctccaccctcgtcccccccatcttccgcgaactcggcgtccgcgtggaacacgacctcgaccgcatcctcccggaagtcgatgtcatcaacctgctccgcatccagcacgagcgccagcgcaagaccatgttcccctccctcggggaatacaccgccctcttcggcctcacccaggaacgcttcgcccgctgccggcccgatgtcctcatcatgcaccccggcccgatcaaccgcggcgtcgagatcgacagcgccctggccgacggccccaactccgtcatccttgaacaagtcaccaacggcctcgccgtccgcatggccgtcctctacctcctcagcggcggcctccccatgcccgaccccgcctccgctcaatcccttaatcccccaatcgcttaatcccttaatcccatgcctgccctcaccctccgcggcggacgcgtcatcgaccccgcccgctccatcgatgaaacccgtgacatccatgtcctcgacggacagatcgtcgaggccctcccccccggagcgacccccgagatcatcgatgcctcccgcctcgtcgtcacccccggcctcatcgacatccacgtccacctgcgcgagcccggccaatccgccaaagaaaccatcgccaccggcacccgggccgccgccgccggcggcttcaccaccgtcgtcgccatgcccaacacctcccccgtggccgacgcccccaacaccatcgcctggatgcaggcccgcgcccgcgagcaggccctcgtccacgtcctccccaccggctgcatctcccagggcatgcagggagaactcctcgcccccatcggctccctcaagcgcgccggcgtcgtcgccatcaccgatgacggacgctgcatccagaacaacgaactcatgcgccgcgccatggaatacgcccgcatcttcgacctccccctcatggaccactgccaggactactccctcaccgccgacggcgtcatgaacgagggctactggtccgccgtcctcggcctccgcggctggcccgccatcgccgaggagatcatcatcgcccgcaatgccctcctctccgaactcaccggcgcccgcgtccactgccagcacgtcaccaccgccggcggcgtccgcatcctccgcgaggcccgcgaacgcggcgtccccatctccggcgaggtctgcccccaccacatcaccctcaccgatgaatccctccagtcctacgacaccgacttcaagatgaacccgcccctgcgcacccagcgcgacatcgagggcctcctcgagggcattgccgatggcaccatcgacatcctcgcctccgaccacgccccccactgcgcctacgagaaagaagtcgaattcgatgacgcccccttcggcatcgtcggcctggaaaccgaactcggcctcttcctcgacaccctcgtccaccgcaaaatcctctccctccccgccctcatcgcccgcctcaccgtcaaccccgcccgccttctcggcctccccatcggcaccctcgcccccggcagcgtggccgatatcaccctcatcgatccggacctcgaatggaccgtggacaaagaccgcttcgaatccaaatcccgcaacacccccttccacgggcgcaccatcaaaggccgcgccatccgcaccctcgtcgccggacgcaccgtctggtccctggaatccggcatccaaccctgaaccccctcccctccggaaaaactttgcttcccccgccacgccaccccggcataactgagacccgaccatgaccgccatccttgcactcgaagacggcaccgtattcaaaggaacctccatcggcgcccccggcacccgcaccggggaggtgtgttttaacacctccatgaccggctaccaggaaatcctcaccgatccctcctacaaaggccagatcgtcaccctcacctaccccgagatcggcaactacggcgtcaacccccaggatgtcgaatcctaccagccccacgtctccggcctcgtcgtccgcgagctctcccccatcgccagcaacttccgcagccgccagaccctccccgattacctcaaggaacacggcatccccggcatcgcccgcatcgacacccgcgccctcaccaagcgcctccgcgtccagggcgccatgaagggcgtcctcaccactgaactctccgctgatgacgccgtcgatgccgcccgcgcctggcacggcctcgtcggcgtcgattacgtcaaagaagtcacctgcgcccagccctacgtctgggacgaaaacggggacgattgccccacctactacgacctctctcagctccagctcaaccccgggctggcccacctcccccccgtggcctaccgcatcgtcgcctacgacttcggcatcaaatacaacatcctccgccgcctccgggagcgcggcttcggcatcaccgtcgtccccgccaccaccccgccggaagacgtcctcaagctcaagcccgacggcgtcttcctctccaacggccccggagaccccgccgccgtcacctacgcccatgaagccgtccgcggcctcctcggcaagacccccctcttcggcatctgcctcggccaccaggtcctcggccacgccgtcggcgccggcacctacaagctgaaattcgggcaccgcggcggcaaccagcccgtcaaggacctcaccaccggccaggtcaaaatcacctcccagaaccacggcttcgccgtcaacagcgacaagctcgatcccaaagaaatcgaactcacccacatcaacctcaacgacggcacctgcgagggcatgcgccacaaaggggcctccgccttctccgtccaataccaccccgaggccgcccccggcccccatgatgccacctatttcttcgacgaattccgcaaagaagttgaacgcgccgccggtccccggtaatatcgcaactttcacatgcccaagctgaccgtcaaatcccctgagttcgccggacaggtcttcgacctcagccagcccaccgtctccatcggacgcggcgaggacaacacctaccagctcgcccaccccagcgtctccacccaccacgccgaattccggcaggaaggaggcgactacaaactggtggacctcggctccaccaacggcacccgcgtcaacgacgagcgcatcaccgagtcccccctccgcaacggggacatcgtcatgctcgggaacatgctcctcacctacgagtcggaaaccgccgcccctgcggcccccatgcccgcggcggaaaccaaagtcaaccttgccggggcgggcaccccctccggacgtccggcggacttcaaaaatctggcccccttccccaagcccaagagtggcggcggcggcggcttccccgtcctcatcgccgtcgccttcctcatcgccctggccggtttcggcctcctcatcttcaaagccttcctggcctagccccacctccccggattaaccgcgaagacgcgaaggacgcgaagggcgcgagggggggtggaatccaaggggctgttgaactcaacaaagagtctcacccaagtaaatacttccttcgcgtcttcgcggtgaaaacaggcttttgttcgtcactctgctccagcccaaaaaaacagccccggcttgcaccggggctgtgagaaaaggcttttgaccacgatgtaaccgctcttgcggcagggaaacgggttgccttgtctaactttgtcttgattccgagtataatgtaaacagtattgaccgccatggcaagtttagaattttccctagacgtcggccacagctccatcggttgggcggtcttccaatccgacccctttcagcccctgggtgctggctccgtcatctttggtgccgatgactgcctggccaaaaagcgacgggactaccggcgccagcgccgccatatccgttccacccgccagcgcatcgagcggatgaagcagttgctctcccatgtgggttttctcacacgggaacaactggatcagcccggaaccgcctggccctggctgaaagctgcagaagtcttgaaacccgaagggggcgtcaagctctccgcacaagagttatgggacgtgctgcgctggtatgcccacaaccgcggctatgatggcaatcgagcctgggcacgcgacgaaaccgaggcacaggaagacaccgcccgcgaacaagcagcgcgccagtggatgcaagatcacaacacccagaccatggcggaaacggtctgcgcggtcctggatgtcggcccaggcaaacgcagcgatgggggggacaagcgttcatccaacctccgattcaagggacgcggcgtcgccttcccccgcagtgtcgtcaccagtgaagtgcggcacatcctggaaaaccaccaaggcaaactgcccggcctggactcccggaccatccgcatcctgatggacgacgcccgacatgagaatctggctgctgaggctggaatccgtctgccccatcgctatgaaggaggactcctcttcggccagttgatcccccgcttcgacaatcgcatcatttcttcctgcccggtgacctacgaacgggaatacgcgcgcgccttggatgagggcaaaagcgaagacgaagccaagcaccaggccgtccgccaagccaaagttccggccaagaaaagccgcgagttcctgctcttccgctgggcgatgattctggccaatgtccaagtggccgatgcgagtggcacccggcccttatccgtggaagagcgccagtcactgcatcagttgatggtgaaatccggcaagctcaccaagcgtgaatttctcaaaacgctggatgccaccgtaggaagccctcggcacaacggttcggccttactcatgcctcccgatgcggacaaggcacttgtcctccgtcctgaaaaagatgccctgaagcgcctgtcggggcgtgcgccccatgcacgggtggtgatgaagcaggctgtgaaggatgtctttgccggacgccatcccatggcagaaggcggcgcacttttccgcagcgaagaactccgcgccctccaattgcgccgcaccgtcgaagaaaaaaccaacaaccaccttttgcggcaccgcctcctcattctccgccgcctggtgaaagatatgttggccacttacgccggtaatgacccctcccggatcagtcaggtcaccatcgaggtcaatcctgacctccgctcgttttccggcatgaccgccgaggagaagaaacaggaaatgggccagcgcttgggtgatttcaagaaagtggttcaaaaacttcgaggcgaccttccggaagtaactgccatttccgcagggctcatccgcaaagcccgcattgcccaggacatgaactggacctgcccttacaccggcatggaatacgatgctctcgatctgctccacggccatgtggacaaggaccacatcatccctcgctccctgcgcccgagcgattccctcgacagcctggtgctcactttacgcaccatcaacgagatgaaaggccagcgcaccgccgtccaattcatcaaagagttcgaagggcgcgaagtccaggacgggaaaaaacgctccctggaaatccttccctggagccagttccaaaaattggttgaaagcctggatgccaaaggcattcacgaccaggaccgggcccgcaaaaaaagacgcaaagccttgttgctgcaagagcactacacggaaaaagaattcgtccccaaggacctcacccagacctcccacctcgtgcgcttggcggcggaagaactgaaaaaagaattcggcggtgttcaatgttccacccggattgtttccatgccgggctcggtcactgcggagacccgcaaagcctggaagctcgaagcctgccttgcccaggccaacccggaagtcgcggaactccgggaacgccgcaaaacagaacccgcaccggtcagcatcaagcaggaactccgcgatatcagccacctgcaccacgcgctggatgcctgtgttcttgcctgtgcggcgcactatctggaaaagaagggcaacatctggaaagccctggttcaacgccgtaaaagcgaggccgaaaacctggaactgctctccaccgggctgttcaaacggggccaggacggacaagcccgcctccaggacctgcccgcccagctgaaaaaccaaattagccgtgtcctcgcagagtgccgtgtggtgcaacacatcccctctaaccggcggggcttgaaggctgaggaaactgtctggcgcgtgctggactccgaggaccatcacccatccgctgaaaaattgaggaaatgggctcaactcgctcaagtcgaattgcccaacccggacagcggcaaggtgctcttggtcaaacgcatccggcatactgccgccggagccaaagccccgaaaaaccttctccatcagggatccgaattttggtgggcttatgaagtggtggccttgtccaaactcgtcgggccaggcgcctctgggaaactcaggaaaatcaaaggagcgaagcagatcggggataactttgcagtcaccttgggccccaaaatggaagttatcccccaccaccaagtccaagagcgttggaaaggcctgggttgcccacgctatttgcgcaatgggcagatcattgagatgccgacgggaaaatattcgggcgcctggaaagtgttttccatcaaaaacgcccgccaaggcatcctcctggacatcgccagagcggacagcccgcgtgccaagcaaggcaatccaggcacaagaatcaacgtgctcttgaaaaccctggtctaggatgggatgcgcatcctggataagggactgaccggattgcctgcaggcagcaaccaaccatgactcccgagctggaagttgtttgcgatgtcgctggtaggctggatgccgccgcacttccctacatgctgaccggctccatgtgcctggccttctacgccacgccccgcatgacgcgggatatcgatgtggtcatcgccctgcatccagggcaaaccgaaaagctcactctggcgcttcagcctcactacatgattgaccccgaaatgatgcgcttggaaaccgcccgttacggcatgttcaatgtcttccatgaagccacagccatcaaagtggacttcatcattcgcaaagccgatgcctaccgcctgaccgagtttgaacgacgccggcgcgtcgaaatcgagggccgccctctctggattgtcagccgggaggacctgatcctttccaagctggcttgggctcaggagtcccagtccgattatcagctgcgcgatgtccgcgccctacttcacggaacgttcgaccgggcgtatatcgagtcttggatcggagacttgggtctgctagagatatggaagaaagttcagcaaccatgaacgacaccacccccagcatggaagcccggcatcaccagatgctcgcccagcgcacgcctcaggaacggctggaaatggcggcttccatgtatgaaacggcctgtgcgctcatccgtgcctcccttccacccggcctcaacgccgccgagatcaaactggccgtctgggagcggatgcacggccacgattcccgctgcgcctggttccggggccatctgcatgaggaagtccaccggacggcggctttgcctttgtgtcctaccacatcgtcagcatcgacagtcccgagtgcagcctcagctgccgcgatgggcaactgacctgcaaaacttcctccggtgagcgcaagctacccctggaggatgtggccgccattatcgtcaccagcttttccgcatccattcacagcaatcttttcctccaggccgccaagcacggcgtcgccctgatcatttgcgagtccttcaagcccgtcagcctggtccttccagccaaccgctccacagacaccttgctgacccgggcactcgtcgatctgccccccaggatcaaagccaggctctgggatatgaccgtcgatgccaagtgcctgaaccagacccttctggcggaaagcctgctgcccgcggacgcctgcaagtctttgcgcgaagccgccacagggcggaaggcccataaagaatccgtctgcgcccggctctactggccactgcttgcccaattcctggacctggattccttcatccgggggaggaacgaaggcggcctcaaccaactcctcaactacggctacgccgtcctcctcagcaccatcctgcaaaaactcttcgccgtcgggctcgaccccaccttcggcatcaaccacgttgtccgcgaacgcgccgcccccttggcctacgacctcatggaacccttccgcccctgcgtggattggcgggttgttcagtggctcaaagaccatcccggccagttcgaagtcacgccggaattccgcaaatgggtcaccggctttcccatcagcaaagtcgaatacatgaacctcaacctggagattcgggggtgcattgaaggtgttgtgcggagcttccgccgcgccgtaatcggaggccaagcctccctctacaagccatggacaccgaaaaattcaaaatgggctggctcgtcgtcgccttcgacctccccgtaaaaaccccgctccagcggaaacgggcgacccagttccgggactacctcctggacgatggatatcaaatgatgcagttcagcgtttatatccgttcctgcgtgaccttcgcccgccaggagacccatatggaccggttgaagaggcatttgccgcccgaaggggccgttcgggcagtctttgtcacccgcgcccagtgggaaaactcctttgtcatccatggagcccccgctcaagaaggagagccagaggctatgcccgaacagattcaactatggtaaccccctccaatggagggggttaccgatagccatcttccgcgcctcggatttggaatcaaggcaaagcgccgcatgcgaaatgcaccaagcctggaacatcttccgcgcctcggatttggaatcaaggcaacggcagcttcgcactgctcaatcctccatacgcccaaagtggcgatctcaaacagtccccccttcgcgctgcttcgcgttcttcctgtaaaaaatcctcagtccgcttccaggccaaagtagccggccgcgttccggtagcacacatcccgcaccaggccggaaagcaggcccatctcctcgggcaactccccgcgctccgcttccgtgccgaccaggttgcacaagatgcggcggaagtattcgtgccggatgtaggaaaggaagctgcgggaatcggtcagcatgccgacaaaccggctcagcaggcccaggctggagagcgcgttcaactgccactccatcccttccttctggtctaggaaccaccagccgctgccgaactggattttccccgcaatccccccgccctggaaattcccgatcatcgtgccgaacacgtaattgtccgccggattgatgttgtagaggaccgtccgcggcagctccccggtttcctccagcgcattgagataccaggacagcccccgagcctggggggcatccccgatggaatcgcagccgatgtccggccccagcgcgcggaagagccgctggttgttgttccgcagcggtcccaggtggagctgcttggtccagttccgccccgcgtcccagcgtccgaaacgcagcatggcccagccggtgaaggccgccgtgtcttgcggccccgccgcttccccgcgccgtgccgcctggaaaatccgctccgcgtccgcatcctcacacgtccccaccggacaggcttccagtccatggtcggacagccgcccgccgaggctgtggaaaaacgcatgccgttcctccagcgctgccatcagggccgccgcgctgccgcattcccgcccggtggccgccgccaactgggccagccatccgttgaacagcgccggacggtccaccgccagcgccttgtccggacggaaggtcggatacatcttcgtcttcagcttcccgggcttcgccttgagggccttgtggtgctccagggaatccaccggatcatccgtcgtgcaaaccaccttcacccggaagcggttcaaaagcccgtgcacggaaaactccggtgaggccagcttctcgttcgcctccgcccaaatgcgcggcgcacttccctcatccagcaggtcctggatgccgaagacccgccgcagttccaaatgcgtccaatggtaaagcggattgcgcagcgtccgcggcaccgtccgggcaaaggccaggaatttgtcgtaatccggcgcatcgcccgtgcagaaccgctcctcgatcccattcgagcgcatcgcccgccatttgtagtggtcgcccgccagccagacctcatagagattacggaacttgcggtccgctgccacttccgccggcggcagatggcagtggtagtcaaagaccggctcctgcgccgcatgttcatgatacaaggcccgggccgttttcccgttcagcaaaaagtcatcatccaaaaacgccatcccctcatcatccccgcccccgctttccgggcaagccgaatccaacacgtgttggcaaccgttctggcccgccctgccccccttgccgccacgcaaacgccaccccgccgccgccatcccggcactggcatccttttccgcctcccgctacgctcggagcatggaacgcgagtccctcaacccccaccagaaggctctccagatcaacatcgacccgcagcgctacggcacctttgccgaaatcggcgccggccaggaggtcgcccgctggttcttccgcgtcggcggagccgccggcaccgtcgccaaaagcatgtccgcttacgacatgaagttcagcgacgccatttacggcccctgcccccgctacgtctcccgccagcgcctggaaaccatgctggaccacgaatacggcctgctcatcgagcgcctccagcaggaacgcggcgagcgcacctgcttcttcgtttatgccaacaccgtcgccgcccgcggctacaaaagcacccatgaatgccacggctggatgggcctccgcttccagcgccgccccggtgccgcccccagcgaagtcatcatgcacatccgcctccatgacaaagaaaacctccagcagcaggaagccctcggcatcatcggcgtcaacttcatccacggcgcgctctacaccaatgaaaaccccgacctcctcatcgcctccctgctcgacggcctgacccgcgaccgcatcgaggtggacatgctcgaattccgcggcgaggacttcgcccaccttgacaaccgcctcatcaacctccagctcgtccgccaaaacctcacctccgccgtcgtcttctcccccgaccgcagcatccaccaggcctcggaaatcctctacaaaaagcccatcctcctggaacgcggccacttccgccccgtcacccaggtcaacctcgacatgatggaagcagcccaccgccccttcatggccgagccccagaacaccggcgagacccccgtcgagatcatggaaatctccgtcaacaacctgctccactccggcgatgtcgatcccgacgacttccttgcccgcgtcgatatcctcagtgccctgggcaagacggtcatgatctccaactacgccgagttccaccgcctcgccgccttcctccgccgcaacagcaaaaaaatgatcggcatcgtcctcggcgtcggcctcctcagcgaaattttcaacgagaaatactacgccgacctggagggcgggattctggaatccttcggccgcctcttcaaaaacgacctccgcctctacgtctatcccgcgctcaacgaacaccggcagctcatgaaagcttccaccctggccgtgcccggccacctgcgccaccttcacgcccatctgctggaaaaccgctgcatcgtcgatgtggacaccgagtgcccggccaccgtcaccttctcctcccgggatgtggccggacgcatcgaaaatggcgatcattcctgggaacagctcgtcgatgcccgcgtcgccgccctgatcaaaaaacaccactacttcaactggcacccccaccgcccggcccctgcggcatattcagccgcctaacccggaatcatgccgttggtttaccgcgcagagcgcgaaggccgcgaagccatcggggtgtgggactgacaaaataggttcacggatcggtgagtctttttccaccccgatgataccggggtgggattgcctttgaacatcttgatggccgatccctctagctttgtgttcttcgcgccctttgcctgaactgcatttttccggctctaaagcttattgcacggtcgcccgaaccgagaaggaagaggtctggctgccgccgctccgcccgccaccggagaagaaattccggttgaattcctcgctggccccctggaacccgcccacctgcaccacctgcccgctggccaccgtcactacggtggccagctcccggaaatcaatgacctcctggcgcgcgtccaccagggtggtaatctggggatacaattccacctccacccaatcgccccgcacccgcggcgtcaccgccatttgcgcgccgatcgagcgccaccgggtctgcaccccggtgacgtagcccaatcccagcgcgtagtcgtaaaaataatccacaaagggcacttcctgggccacccggatcgaggccgtccgcccgctctgcaccatcaagaactggttggccgtgcgcgaggacgtggtccggcggttgaccgcgtcgatttccaatccgttgggcccgggacggttgcccgcggagatgtccctcccgccgatccgcccgcgcacctccagccggcggtcatcgatgccgccagcctcctggaacatcacttccacccgcacgttcggacggggggcattgaacgcggcgatgatcgcctccgccatcggcagatactccgcctcatcctgcaccagcagcttccgctcccgcgggagcagcacggtcttgccctggggcgagagcgaggccttcaccgcggcctccacttcctgcaaatcggcatccccgatgacgaaaaccttggattccagcgcggccccggccactgccaggcccgcagcccacaccaccgccaggacgattgccttcactgaatccaggctactcccgccccgccctttccacaagccgcgtcccgcaccctcgggggtaatcacaatcggtagcaggtgcgggcacacaacggggacagtttacccgcctgaggcgggtaaactgtccccaggctgggtcgccagggcctgagtgccagcatctggccttcctctgaagccagtcggttgctgccaaactcaattgcaccccacaccctccgtcgcctgaaaaaaaaccgcaattttgcttgtctgcccacccgcttcaggcattttggaaggctctttacgaaagaaattctatgttcgcagtgatccgcaccggcagcaaacaatacaaggtcaaggaaggcgacaccatcgatgtcgagcttctggacatcgagcccggccaatccgccgttttcaacgaggtcctgctcctcgccaatggcgatgccgtcagcgtcggccagcccaccctggccggagccagcgtcaccgccgaagtcctgggcgagatcaagggtgataaagttatcgccttcaaatacaagcgccgccagggctaccaccgcaccgtcggccaccgccagcgccgcctccgcgtcaaaatcggcaaaatttccgcgaaataaccccctcccaaggaaccccacgtcatggcacataaaaaaggtcaaggcagcacgcagaacgggcgcgactccgtcagcaagcgcctgggcgtcaaaaaattcggcggcgagcaagtcatcgccggcaacatcatcatccgccagcgcggcaccaaagtccgccccggcaccaacgtcggcatcgggcgcgaccacaccctcttcgccctggccgaaggccaggtcaagttcgacaaggccaaccgccgcgtccacgtcgtcagcgcgtcctgaattccccttccggccctgacgccgccaaaaaccgccgccctccgcggcggttttttttgtgccctctggccgcccaatcaatctccctctccctctccctcttcgtcttcctcttcctctttgtctgcttcttcgcctgcttctttttaaagggaccaggcgccggagactgggaggaagacaaagagggagaggaagaactggcggatactccttcccggcgcttgccaagcgggaatcgccatccgatgctttcgggccatgtccacgccgtccccgctccagcccgcccccctcttccaagacggcgccgtcctccagcgcgagatgctgatcccggtctggggccaggccgcacccggcgccactgtccgcgcttcctgtggcggaggcaccgccagcacccaggccaatgaagacgggtcctggctgctgcgccttccccccctccccgccggcggcccgcacacactggccctggaagacagccacggccagcggctcacctatcaagacattctcatcggcgatgtctggatttgctccggccagtccaacatggaatacgccctcagcgccgtggacccccatggccgggaatcccagggcgtgaacctgcccggcgtgcgcctgctgaccgtggccacccctgcccgggccggacgccaaagcgccatcaacgcccgctggaccccagccgctcccgataccctggccgccttctccgcggtcggcggctggtttggccgcaccctccacgccgggctgggcatccccatcggcctgatcgccaacgcctggggcggcacccgcatccaagcctggctttcccgcgaggccctctcgaccgatccctccgcccggctggaactcgaaccctacgagcgcctcctctacggcatcgaccgcagcaaccccaaggtcttttccagcgcggacgaatggtttcgagccgagggccccgaagaccccatcaaccacgggctggagaacggctggcacctgcccgcctgtgaggactccgcctggtccgtcatgaccctgccccagcgctggcaggaagcgggccatgatttcaacggcatcgcctggttccgccgccgcatcgagctgcccgccgcgtggcgcggacgccccctggtcctcaaccttggcgcgatcgacaaacacgatgaaaccttcgtcaatggccagcgcgccggctccatgggctgggagaacaaaaactcctggtgcacgccccgcacctacaccgtgcctcccggcctcacccaggaggggacggtcaccgtggccgtgcgggtgcgctcccacatctaccacggcggactcaccggccccagcacccgcatgaacctccacccagaaggcgcgccggcagatgccctctccttggccggcgactggcgcttccagatcgagcagaactggggcgtggtcaccccgccggacctgggcgccaacgggcggggccccggcgagcccaatgccccttacaccttattccactcccgcctggccccgctcattccttacggcatccgcggctggacctggtatcagggcgagtccaacgccggcgaacccgggctctaccgccgcctgctgcccctgctcatccaggattggcgccgcgcctggggccagggggacctgcccttcctcatcgtccagctggccaattaccagcccgcccgcgaagaaccctgcgagagcagctgggccgaactccgcgccgcccaggccgccgccctgcgcctgccccgcaccggcctggccgtggccatcgacgtgggcgacgccgccgatatccaccccaaagacaaaaagtccgtcggcctccgcctggcccgctgggccctcagccgggaatatgggcatgcgggcccgccctccggcccgctgctgcgggcctgcctccccgccgcccccgggcgcctgcgcctggccttcgaccatgccgaaggcctcaccacccgggatggaagcccggtccgcacactggccatcgccggggccgacctccgcttccgctgggccgaatcccgcatcgaaggggagaccttggaagcctggcatccggaagtgccccaccccgccgccgtccgctacgcctgggcggacaacccggaaggctgcaatctggtcaaccgcgacggcctccccgccgcccccttcgacacccgcgagctggagacctcaccctgcggttgaagacaacctgccgcagcaccgtggcagggacagtttactttgcagcaaagtaaactgtccttgttcagtccgattttccccgaacaccttggcctggaaattcgataggccgcagagcagccagcgcacccattcgaatggattgggtattgcccctttccataaaggagccccagtccgggctggtcagttttccttgggcagaaggaaggagcgggcgggaacgaagtcctggggctggatgctggcggtgtttttctcgtaggcggtgatggagaattccttcaccgcccagtattcctggccctcccgggtgccgcggaccagcagggtgtaagtgccgggggccaggtcggcacgctcttgcaggtcacgcagttccaacgggccggaggccggaatttggaggggaatttgctcgaattggccgggaatgttcagcagttcctgcatgaagggctggattgtggcttccagggccgtctgcgcttctttcagccgttcttcataggtcgccacttcgccttccagggcctggatttccacggctagggcatc

SEQ ID NO: 4505 - DNA, 23501 bp, synthetic construct
  source 1..23501: mol_type = other DNA
  misc_feature 1..23501: note = Synthetic
ctgcggcgcccgttcgcgcgtcgtgttgcgaaacggcttccacatatccatcaccgctaggcgaatgccgcggctcttcttcgggccgagccagtcgtagaactgcgccatgctcgcctccgagcgatcctccccgccgaaccagaccggccgccggcggatcaaatcgctcaccacgatacggtagctatggcccttgcggatcgatatctcgtcgatgccgatcgccttgggccccggtctgcccgcgcgggcaagctgggcttgcatgtactgcttctccaacgtcttgaccgtatcccagtcgagcttcagctcctcggcgatgtccttgatcgtcgcctgccgacagcgctggcctacgtaatgcgcaaagcgcttcgtatcgagcgggttgtccgccaggaaatcgagccgctcgcgcttcaccttgccgcaactccggcatcgcacccgccggacctcaatctccaggaagatacgcgtgtcgccgcacggcagatcgcgaacctgacgaagtcgtcggcataggagatgacatgtgcgtggaacacctcgccgcgccccgtcaaccgccaatgcttcaagaatcggttcatgtagatgacggagagcaacggactggcgaccccaccctggggggtgccgcgagtgctgctcttgccgccgctcatgtgccgtttcccgtcgccatcccgttcctcgaccggcacttgcagccacagcttgatcagccgcagcacattccggtcgaggacgcggcgggccaccgatcggaggaggtccgcgtgcgggatcgtgtcgaaatacttcgacaagtcggcatcgactacgtcggtgtagccccggcatagcagccggtgcgtttccttgacggcatcgatcgcgctccgacgcggccgatacggccacgtctatgcggccgagcactatatcgacgcctgggtcgaggtcgccgatatcaaggattggtcgactgacgacatcgctcgattgaaaagccattttataaacaaacggcgctaaagctggcctgcttgatcgcgcccgcattcatcaaccgcaaagacgatcggcagatgcaagttgccataaagcacagtaaggcttcgtcgcgatcatcaacaaccgtcctgacggcgaggagcatagacagccgagcgcttccgagaaccggatggtcgctgagagcgcgagactcggctacagccacatcccggtcgtgcctgggcagatcggcgagagaaggtccgcgcgttccagaaggccctttccgaggcaggcggtccggtgttggcccactgcaagactggcacgcgcgcggcgacgctctacgccatcggcgaggttttggacggacgtctgcagaaggacgcggtagcgccgctcggccagtctgtcggccttgatctctccggcgccgtcaaatggttggacggccacggccactaaagcttgacgaacacacatttcttgactgaggagcgatttgcatgagcaccgtcaagccattcgtgaagggtttcttcgacaaccgcaccttttcgatccagtatgtcgtctccgatccggaaacgaagaagtgcgcgatcgtcgatcctgtcctcgatttcgacgagaagtcgggcgcgaccgcgaccggtaacgccgacgctgtccttgcctatgtcgagcagcagggactcaaggtcgaatggatcctcgacacccatccgcatgccgaccatctctcggccgcactttatctcaaacagaagacgggcgcgccgacggcgatcggcgagaaggtcgtcgaggtgcagaagctctggaagagcatctacaactggccccatttccgggccgacggttcgcagtgggacaagctcttcgccgagggcgagacgttcaaggtgggcggcataccggcgaaggtgctgttctcgccggggcatacactcgcctccatcacctacgagatcggcgatgccgccttcgtccatgacacgctcttcatgccggactccggaacggcacgggccgacttcccgggcggcagtgcggctcagctctacgagtcgatcatcgagatcctctcgctgccagacgaaacccgcatcttcaccggccacgactaccagccgggcggtcgcgagccgctgtgggaatcgacggtcgccgagcagaaggcgaagaatatccacatgtcgcggtgcaagagtgaggtcgagtttatcaagctgcgggagacccgcgacaagaccttgtcgatgcccaggctgatcctccacgcgctgcaggtgaacatgaatggcggccggctacccgagcccgaggcgaacgggagacgctatctgaaattcccgctcgacgcgcttcagggggccgcatgggacgaccagtgaagctcgatctcgctcgcgatgcggccgaaatgatcaagaatgccggagagccgccaacatcttgtcgggtatctcgtcgggctattcggtgacgggcggttttgcgcgcgccgtcgtcaacttcgacgcgggcgcaagaacaccggcacacatccgcatctgggtccagaagttcgaggccgacgcgtttgacgacaagaccgtcgcggcggacacgatcgagggcctaccaggccaggatcacctagaagcgactggtcgacaggcaggcgctggaggccgcgtggtggcgatggcaggtgacggcgtcaatgacgccccggcgcttgcagcagccgatgttggcatcgcgatgggttcgggaaccgatgtcgcaatcgagagcgccggtgtcaccctgctccagggcgatcttttgggatcgtcaaggcgcggctcctgtcgcaggcaacgatggcgaatatccgtcagaacctgttcttcgccttcatctacaatgccgccggcatccccctcgcagcaggcgtcctctaccccgcgttcggcttgctgctctcacccatcgtcgccgctgccgccatggcgctttcctcggtcagcgtcattggaaatgcgctgcgcttgcgcggatgaagctcggctgacgctgctgggcagggggcggcatggccgcgatcgaggccagttcttggtcgccaaaggactcgacttgcataggaacgtatacgaccggcccgaggtcgggaatggccgtccgagtgcccagttttgttccggaatggtagaaatttggcgcgccacagaggatgaaactgggcactcgtatgtcattggggatgtcccgggttctgttgaatttctgaagaggtcggcgttgcccaccttgagccggtaggctcggggtgctgattccacaaggagagcaacgccatgacgagagatatcacaccggctggtttgccgacgaccggagctgtggacgaagcgtttgcggaagtgcgggcgagcttcgatcggttctgccttacggcagggatcgaagtgctcggcacgatgatggaggcggatgtcacggcggcctgcgggccgcgccacggtcgcgatgcggcgcggcgggcgcaccgttggggccgaacgcggggacggatcggcttccacggcggcaagatcgaggtcgagcgcccgcgggcccggggcgtggacggccgcgagatcacgatcccgagctgggaaacggcggcgcaggaggactggctcggtcgctgggcgatgaacctgatgctgatcaatgtgtcgacgcgccggttcggtcgcgctgtccggctgcccgagggtgacgtgccggcaccgcccggatcgggggtttcgaagtcggcggcctcgcggaggttcgtagcgctgtcggcggcgcggctggccgacttcatggctgccgatctatccgcgctcgaccttctggtggtgcaaatcgacgggctgcatctcggcggcgatctcgtgctggtcgccgcgatcggggttgacggcgaaggcaacaagcatccgctggcgctggtggaaggggcgagcgagaacgccgcaacggttcaggccctgctggacaacctggtcgcgcgcgggctcgacccgacgatgccaagactgtttatcgtcgacggcgcaaaggcattgtcgaaggcgatccgccgtaccttcggttcggccgctgcgatccagtgctgccagatccacaaggcgcgcaacatcatggaacgcctgccgaaagagcatcatgcggccacccgtcgggtgctgcgccaggcctgggagctcgatgacgccgacaaggctgaaaaattgatccgcaatctcgcgcgtcgactcgaccagcaatggcctggcgtagcggccagcatcctcgaaggtctcgacgaaatcctgaccattgtccgcttgaagctgccgaaggagcttcgtcgatcactcgcctgtaccaacatcgccgagaacatgatgggcaccattcgccgcgtcacccgcaacgtcaaacgttggcgggatgccggtatggccttgcgatgggtcgccgccggcatgatcgaggccaacaagggcttccgacgattgaaggcgcacaaacaactatcggtactacgagcggcccttcaagctcaccacaatcgcatgacgatcaaaccagttgcccacgtcacgagggctgcgtaacattcattctgccaacgtcggcccgacgtagttcaacagcgatcgggacatccccatgtcattgtttgtgcgctataattcagcgctagtatgctagtgttagggaagtttggcgtccaagaggacgtgcggatagatacagatagtgtacgtcccatccgggcgacgccaaatattcatgacctgctcgacaatcatatcctcgacgatatcgccgattgcctcaaacccggacttgtcagtccatcttccaaaattctcgaagaggttattgcaggattcgtttagacgctcgaagtaaggtgcgaaccaatgattcttcagcgcagcttgggcggcaccacactctgcgacagttttttcggccgcactcattgccccaagcatatagcaggcgaacttcatcatatttccgtaggctccgaaaactggaccgacaaaaatatccgcattgccaccgctaaagcctctgacaagctcgcgtacttttccgtcggtctggctgtgcgccagaacgaaggtttcttcgtagctaggaagcggatcgtgaccaatatttgaagcaatgcggcaggcggcatattcatcccaacatgctttgatgacatcccatcgccagcagtccaggatcgtgccatatcgcttcttgaggagctcgtcagggaaacacttttcgtatgccgccgttatttcaacatgcgcgcattcatgaacgatcgtatgaatcgctaggtttgcattttccttgtcttcgtctttcaacatcagtgccacagcagcattgatgacgatatggctctttaagacgccgtcgcgcaggacggcgggagtcatcgcaactcccgttccgaactccgtggttttcgtgagcacgcgaactgtctcataaccccggtcgagatcagtcagggcatcgtcgtaatcaaaagcgaccgtcattccgtcaagcgcagagagatcgatgattttcccgaattcgtggagcatatagccaagtgtactagccgtttcctctgctgcttcttggtcaaagccacggaaggacatcgggacattgagcggtcgcgtagatggcctatcggcgggttcatcctcattggtgacagtggcatccacgaatgagctcccttctcgctagaatcgaccatctcaactatatgggctttcgtagaacaaaccaagtacgtgaattttatgactttcccgtatgtgaaatacgcaaaagttataaattgttgcattttgatgccatctaagctaaccttcccgtatgtgagatacgcgaaagttagaaaaatgcccctgcatctggttggagaaaacatcgataaagcccgcagccactatcaggctgaaacgggcaaactcgtccagctgatgcgcggcatctacgttgatgcgggagaggacatcgaggcgacggtactcaagcacgccgtccgtatcgcaaaatacctataccccaatgcctacctgtcagcggcgagcgctgtccttcttggcccgacccgcgacggtcgcctgttcctgagcgggcggagaatacagcgcacgcgattacgctcacttgaaatcatccagaatgcagcgcccgaccatccgtcggtcgcccccgcgattgtcgatgacggcatgggagaatttcgcatcgatgtctcgtcgatgcgccagcgcttcctcgaagcgttccgtctgcgcagcgagcacgccgcatccattgatgaaacgacgcgcgagacaatagcgaaccgtcttattgaagaatacggcacctctcagggggctgccgatgcaacctggtcactcgcccgcgagaacaaatggtatcgcgagggcgagcacgccgagcgcttcctgctccgccgcccagtgtcgggagagcctgcacgcaacgaagctgcgctcgatctgatcgtggcgtggcacggcgttccgctcggcaacctcactcatgatggctttgaatggcgctggaatcccaacaatcagaacggcccaccgctcgtccgccaaaccacgccgggtaaactcccgcctttcattctatcattgctgcccgaaggctggcttgagtcagtcctgaacgaccgcgacgagcgcgcgatgctgcgctccggcaagcgctacatgtcaaacgtcacaatcgttgagcgcgagagcgatctcgccgctctgccgcccgacatactgctgacccggctcgaacgcttcactgagaactcactattcaccggtaggtatgcggggccaggtcgcggcgatttagagcaaagcttcgagcgcaatctcgcggagatatttgcgcgcacggatacgccgcgattatcaggcgttcagatcaaagcgccgatgttccttgattctgacggtacgctctcccccagcaccggcaagcccttcacgcatattctgaagcctgctggcacaagcggatttgaggccctgccggttatcgaatggcagtcactcgcattgggccgcgcatccggctttctaacgcctgcgacggcgcttgttcccatgcctgacgggatgccgcccgcgctcttggtggagcggttcgatatcaggacaagccttgatgacaaacgcctcctggcgcttgaggatttttgctccgtgctgggcgtgccgaccgaagcaaaatacgacggcacgatggagcgcatcgcgcgggctctaagacccctatcaacagcgccggaagaagatgtcttgcttgtgctgaagcgagccttgttcgcctggctgattgccgacggcgacatgcacctgaagaacatggcgctcctcaaggtcgcagagccgggcagcgcgcaattcaactccgtccgcatggcaccgctctatgatgcggtcacaacccgcgtctttccaaggttggaaagagaccggatggcgctcaaactgaacggcaaagacgaccgtctgcgccgctctgatttcaaggcatttgccagcaccgccggtctcaaggctgccgatgcggataccgccatcgacgatctcgtgaccgccctcttgcgcgcgctcgatcatctggaattaccgccacttttatctgacggcactcaaggcgcgaagatcgcggagcagatgcgcgcgattgtccgcgaacgcattgaagggttcgcgtagagcgacctcaccggctgacgtttcccaggcattattcctcccgcttgtaacgatagcccttgggactgtcctgcttctgcccattggtttggccaaggcccttgtttcgctttttccagccgtctttcgcgggtgcgcctaagccttcggctggaacggtcatatccagcttgttcacttcaagctgcctcttgcgagcctgccatttttcggtttgcaggctctcggcggcgcgcagctgccgccgaaccttcgtttcaagcgaccgcctttctcgggcctctaggcgggtcagcgccttgcgccgccgctcgtgcatgaaatgctcgcgttgatgacggcgctccagcgcctcgcactcaatgcgatggcgttcagctggattgatgttcgcatttcggcgaagtggcgcgatgaccgaacgaaggccgggtatgggctgaaggtcggaaaagtcagtcgtggaaagtttgaggcgcgcatctgggaactgacagcagggcgcatcactctggagacggtgattggtacgatgctggcggcgcggacggcgttgtggtgcgcgttcaccaagctccatcgcgagatgctgaagatcgcgcgcgctgataaggtctgccggagattgatgagtacacctggcgtcggggccttggtcgctctgacctatcgctcggcggtggacgacccgatgcggtttggaaaattacttcgggcttatgccccaaaatatcaatccggtgagaccgatcgggatgctggcgtcagcaagtcggcgacgccatggtgcgaacagcgctctttgaagcggcgcacatcatgttgacgcgtgcgacccgcttctcaagcctgaagcactgggcgctcgacgtggcgaaacgtcggggcatgaagcgcgccaaggtggcgcttgccagcaaattggacgtcgtgctccaccgcatgtgggtggatgcgaccgactttcgctggagcaggaccgcagcgatggcataggagatagagcgttcggagcggagccgaaacggtgccgcttctgcagaggtcccgtcgctgggacgagggcttggcaaggtcgggcgtaatgctgtgaaagcttcggcaaatcacgcgtcctagattggcctgccggctctggatctgatggcatggtgtggcggccttcgcgctgaccacggacagaagcatgatcctggcgatgagatatcgttcagagaggacttgacgaatgaaggcccactacagaagcatttactcattgcgtcgaaccgcgccggcaaaagcgccacctctgaaacctaaattgctaagtcgcgttattagctgcttctctttcgagtgaacgtaggagcctcggcgaatggcatgccaaccggacaggagtcgattggagcctttaaacgcgaaaccgaaaagcacagaaaggatcgaaagcacgccgagtgcagcggctagaagaacggcggcctgccgagacagccggaaagactcgccccgatcatgtttccgacattggttggcggcttggctgcgcccgttctggcgggtgaaccccggcctgccgtacgatgccgagcgtcattatgcggatcttctcctccgccgaatactgacgacgggtctggcgccgaatgtcctttatcgttggtctgccggcgctttgccccggccgggggcgctgacggcaaacacccggaccgcgatgcgaacgaccgcctcggcaaattgtcgcagccgatggaacaccttgagcaatcgcgaaacgtgaccattcatcctgatgcgccattcacgcccgtgtcatgaccaaaggctttgcaccgttggtgattgacttgcagagcggcccggtcgaagtgctgtgattgacctgcggctttcaccatggcgacaggaacgaagcgcaccagcgtgggctccgcagaacaggctttcgacggattgcgtgactgtcgcaaatggaaggggcaccctgcggggtgccccattttgtgcataagcttgttaacgggaggccctcaatcaccagtccgctaaaaccagtaagtctaccaataacagctatcacacctcgtaactgtgcgcaccacttttaactttgtcaagagaagtggctaccagcaaaaagctgtagccacagtcagttcttagaatcgcagcctgaattcaaaacgaactcaaagcatattcagtggttgttgtagcgtggcgcgccacaacagcctcacgcacattgtgtgtattgaagcgattcgatttgcacgcaaacatcaatgcacgtagaaattgattttccacatttttcaagaggcgatagccatctagctatgaacaagaatgagatactcagaggctcgtctgttctgtatcgccttgggctagatctcggctccaactctctcggctggtttgtcacccatcttgagaaacgcggcgaccgccatgagcccgttgcgctcggtccgggcggcgtccgtattttccctgatgggcgtgatccccaatccggcacatccaatgcggtcgatcggcggatggcgcggggcgcgcgcaagcggcgcgaccgcttcgtcgaacgccgcaaggaattgatcgccgcgctgatcaaatacaatctgcttccggacgatgcacgcgaacgcagggcgcttgaggtcctcgacccctatgcgctgcgcaaaaccgcactgacagataccctgcccgcgcatcatgttgggcgtgcgctgtttcatctcaaccagcgccgcggtttccagtcgaaccgcaagaccgacagcaagcagagcgaggacggcgctatcaagcaggcggcatcccgccttgcgaccgacaagggcaacgagacgctcggcgtattcttcgccgatatgcatttgcgcaaatcctatgaagaccggcagaccgcgatccgcgcagaacttgtgcggctcggcaaggatcacctcaccggcaacgcccgcaagaaaatctgggccaaagtccgcaagcgtctgttcggcgacgaggtgcttccgcgagcggatgcgcctcatggcgtgcgcgcccgcgccaccattaccggcaccaaggcgagctacgactactatccgacgcgcgatatgctgcgggacgagttcaacgcgatctgggcagggcagagcgcgcaccatgccacgatcacggacgaggcgaggacggagatcgagcatatcatcttctaccagcgcccgctgaagcctgcgattgtcggcaaatgcacgctcgaccccgcaacgcgccccttcaaggaagatcccgaaggctatcgcgcaccgtggtcccatcctttggcgcagcgatttcgtattctctcggaggcgcgtaacctcgaaatccgcgacaccggcaagggctcgcgcaggctgaccaaggaacagagcgatctcgtcgtggcggcgctgctcgccaacagggaagtgaaattcgacaagctgcgcacgctgctcaaacttccggcggaagccaggtttaatcttgaatccgaccggcgcgcggcgctcgacggcgaccagaccgccgcgcggctgtcggacaagaagggcttcaacaaggcgtggcgcgggtttcctcctgagcggcagatcgcgatcgtcgccagactggaagagaccgaagacgaaaacgaactgatcgcatggctcgaaaaggaatgtgcgcttgacggcgcagcggccgcgcgcgttgccaatacgacgctgccggacggccactgtcggctcggcctgcgcgcgatcaaaaagatcgtgcctatcatgcaggacgggctcgatgaggatggcgtggcgggcgccggctatcacatcgcggccaagcgtgcaggctacgaccacgccaagctaccaaccggcgagcaactcggccgtttgccgtattatggccagtggctacaggatgccgtggtcggcagcggcgatgcgcgggaccagaaggaaaagcagtacggccagtttccaaacccgaccgtgcatatcggactcgggcaattgcgccgcgtcgtcaacgacctgatcgacaagtatgggccgccaaccgagatttccatcgagttcacccgcgcgctgaagctgtcagaacagcagaaggccgagcgacagcgcgaacagcgacggaatcaggacaagaataaagcgcgcgccgaggagcttgccaaattcggccgtccggcaaatccgcgcaacctgctcaagatgcggctatgggaagaactcgcgcacgatccgctggatcgcaaatgcgtctataccggcgagcagatcagcattgagcggctgctctccgacgaagtcgacatcgaccatatcctgccggtcgcgatgacgctggatgacagcccggccaacaagatcatctgtatgcgctacgctaaccgccacaagcgcaagcagacaccgtccgaggcgttcggatcgagcccgacgcttcagggccatcgctacaattgggacgatatcgcagcccgcgccaccggcctgccacgcaacaagcgctggcgtttcgatgccaatgcccgcgaggaattcgacaagcgcggcgggttcctggcccgtcagttgaacgagaccggctggctggcgcgactggccaaacaatatctcggcgccgtcaccgatcccaatcagatctgggtggtgccgggccgtctcaccagcatgctgcgcggcaaatgggggctcaacggtctcctgccatcggataattacgccggcgtgcaggacaaagcggaggaatttctcgcctccaccgacgacatggagttctccggcgtcaagaaccgcgccgatcatcggcatcacgccatcgatggcctggtcactgcgctgacggatcgctcgctgctgtggaagatggccaacgcctacgacgaagagcacgagaaattcgtcatcgagccgccatggccgacaatgcgcgacgatctcaaagccgcgctcgagaagatggtggtctcgcacaagccggatcacggcattgaaggcaagttgcacgaggacagcgcctacggcttcgtcaagccgctggatgccaccggcctgaaagaggaagaagccggcaacctggtctatcgcaaggcgatcgaaagcctgaacgagaacgaggttgatcgcatccgtgacattcagctgcgcaccatcgttcgtgaccatgtgaatgtcgaaaagacaaagggcgttgcccttgcggacgctctgcggcagttgcaagcaccctccgatgactatccgcagttcaagcatggcttgcgccatgtccgtattctcaagaaagagaaaggcgactatctcgtcccaatcgcgaaccgcgcgagtggcgtggcctacaaggcctacagcgccggcgagaatttctgcgtcgaggtattcgagacggcgggcggcaaatgggacggcgaggccgtgcgccgtttcgatgccaacaagaaaaacgctggcccaaagatagcgcacgcgccgcaatggcgtgacgccaacgagggcgcgaagctggtgatgcgcattcacaaaggcgacctgatccggctcgaccatgagggccgggcccggatcatggtcgtgcatcggctggacgccgctgccggacggttcaagctcgccgaccacaacgagactggcaatctcgacaagcgccacgccaccaacaacgacatcgatccgtttcgctggctgatggcgtcatacaatacgttgaagaaattggcggctgttcccgtccgcgtcgatgaactcggccgggtctggcgcgtcatgccgaattaatctctgcggttatctgtcaggattacgcatgacgacactcgacgcgccacacggcagcggtcggccgatggttcgggacgcacaggaggcccatcgcgcgttgcgagcttgacgagcaggttgttcgaaataggtcaggccgtgcgcgttcgccaccgccgccgcaacattgttagcgacaattataattatatagtggtttcaaatacataagagttcgtagttttattccgggtagcgcgccattcagaataaaactgtgaactcatatactattgaagttgctatacaattttatgaagataggctagggtggaccagactacctcgacgtctcgtccaaaaatgtccctagggagtggacgaaaagtgctgaactcgtccggtctgacccgcggcaaatgcgacggtagcggtcctctgttcttgcggcgcctggcggcccggttggatcgctcggccgcattggttgcatcaatcgctgcgtcgcggctcgccttgacctgttcgacatcctccaggctgagcagcaactggttctcgggcagcgccccggcccgccggccgaagcgatgacgctgcagctccttgatgatctgctccagccgcgcggcgcgcgcccgttctgccagcagcatcgccttaagcgtgccgggatcgtcgggaagcgtgtcggccgtcgtcgtcacgctgcgattacatcacgcgagatgacgtctctcgcgagcgccacgtgcacgccgattcactgtgccgcagctcccgctgtgtcaccctttgtatcgagcgagataagggagaatccgcctcccatgtcgtcagaacagttcgccttgtcggtcggcttcaatagccaatgcgaattctcgacagggcgttttcgtcatctccgatggggcggtccattttttcggcagccagagtgttcatcgagctcgttccaagggccgcaacgaggaagacttaggtcgctttatcgttggcttcgtgacttgttctttgagccggacgccccgaccgccagccaggctttgaccatccggactaatcaactcgatgcccgcgttgtccaaagctgaaaccagtttcatcagggaatcgacattgccacggatgacgccgtcactagcttccatgcgttgaatggtcgggactgaaagatccgccagttgagccatttgtcgttgatctatattcaggagtgcacgggcggccctgagttgattagcggaaatcatgaattggccagctccaatgcgactcacaacggaatttctgcgctatatataaaatatctaaaacatattataaagtatcaatttaaatgcgtgagatatcgtagacgatatatctccaacactttgtgaatgtcaatcgtgtcctttgccagcgcacaaatggtgcgccatgatgcctaaggattccacccaacgagcttctggtaacggggcccctcaagagccggcaagttcgaggtgacgcccgcaatggctgttaccaagtggtgtgcagcagatagctgatggtgactccacccacgaggccgatgatggaatcagcggggtcgctggaactagggtcagaacctctgtgattgccgtccgcgatgcaaaagcgtcgatgacagaggagccgaagttccgcaaggatttgtcgcgctaggcatgcgacaaacagagaagtcctgagcctaggcgtgatttgtattgcgaggtttagcgagttctgactcgaggcatgaccatgattcgacatcgatcatggacgagggacgcgtcgatcgaaacggtgctgaagttgtgaggcgtcgtcgcagcgggacatcaagcgatggatgtgtgcccgttgtttttcgctggagcatgcggcggtgagcgcgggcgcattcattggcggattgctgagcgaggaaccgcacaacatatgcagcttgccttgctggtgacaatagaggccttcactcccaacgcgtaagacgcagaggccttgcccttgcaaatgcactccacctctggagcatggaagaagcgcattcgatcacatgctcgcatgtcaaaaatcttcttgcatcgcggacagcaaccacagaaaggataatgcatgtcgctggcgatgcaactctcaccttcagcagtttaattctagcacggtctataaaggccaagtgggaaatgttttgaagaacgaagaggcgtgccagccgcatgagatggagcgatgacggagcagctgtggattgaattacctcactgagaattcggaagctttcacgtagccaagatcccctgtccttggttagtttctgggacctttttagatcgtagatgttttctatgtcgtgcgtgagaggagtatgccgtgttactgtgtccgtggcccttgtacgcagatccggttgtcttgagcggggcactcgacatcgtgatgcgctacctgatgttcacagggcgagcggctcggcgcgcagaactgcggcatgacgcagcacaagctatgcttgtcgcctggcgctcgggattaggcacaagttacaattggccaattgcggcattgccgcggtagagaaagttgctttaggagaggagttgctttcgtcttcttcttgtgccgtttaaactgactgcgcattccggtggatcgaggatggtagttagcgctatgcctcgccggcagctggccagtaacaacgtcgagccggtgttgtagcgatctctttcaacaattcccaccagatcgcgccgctgatcgaccgagaacgagaaccagtccgagctccagccatctatccgagaggtaaatcgaaagtcgatcgctccacttgagtagcctgcttcacggccgtatgcaggtcttcgatagtggatactccaaatgcacaacggtaggcggtcgtcagaccacgctttatgatgatgagggggatcgaagactgcgtcttcccgctcgcagctaccctcaagccgccggcacggggtaatcgttggtctttgtaacggagcaatgactgcgaggagacgcgaccgtaatgacttgaccccgaaaaggctaccgcttcctcttgtccatcagttgctcgacgacggcaggctgcgacgtctcaaacacgcgactggcaagaacgtcggacgctgtgatcgacttgacatcctcgacagagagaacggcgttctggtccgcgaccaggcgattggcctgacgcaggcggatacggtccaacgcgttgcggatcgaacgcgcgttggagaacaagggctgggccttgcgcaaggcgatgtagcgtacaaacgcctcgcgggcttcggggttgaatttatagttcatcttgctcagcatgacttccgcgatcgcgagcagttcgtcgttgctgtagtcggggaagtcgatgtgatgcgcgatgcgcgagcggaagccgggattgctggagaagaatttttccatacggtcggcgtagcccgcgagaatcaccaccaggtcctcgcgctgcgactccatgacctgaagcaggatctcgatggcttcctggccgtagtcgcgctcgttgtcgggccggtggaggtaataggcctcgtcgatgaacagcacgccgcccatcgcctttttcaatatctctttggtcttcggcgcggtgtgaccgatatactgtccgaccaattcgtcgcgcgtgaccgacacgacatgaccacggcgcacataaccgaggcgatggagaatatcggccatccgtaaggcaacggtggtcttgccggtcccgggattcccggtgaacgacatatgcaacgtcggagtctccgacgtcagttccattttcttgcgtatccgttcgacaagcaacagagaggaaatttcctggagacgcgtcttgacgggtttgagaccgataagctctcgatcgagttgcgcgagaatctctccgattccgacggcttcgagttcctcgcgaatgttgactttttcttgcatcgacggtggtcctgatagcctcggtcggtggcttcttttgaaaccgctcgggggagaaaagctccgtcgccatgcgagacgacggagcagtacatccggaactggacgatcgggaggatggatcgccctagtttgaaccggatggaatcatgtcacgaggagtaacgctgaccctcgggacgtgcggtcaccgcatacgacgtcgtggtgtaccggatgttgcggttgtcggactcctggcgctcgagccggaagcccggctcatccttgggcctgttgacgatgaacgaaatcttcaccgactcccagccatggctggaatcgaatgcagacatccggatgtagcggtcgccatagaccttccggcactcgttcagttccatcagcacgcctgccgcgtccttcaggtcgaacatcggcagattccacatgtcccaatacgtgttgcggggatgcggatcgtcggtgaactcgatgttcaccgcccagccctgggtgaggcagtactggatctgcttggaaatctgctcgtcggtcagatcgggcaggaacgaaaaacaaccttgagtaatacgcatataatgtcctcctttacgctacggccggggtcgttacataatcgggcgcgtcggtggattggtagttgaaggtgacgtccttccacacttcgagcgcctgcttcaacggcgtgcagcttgcggctgccttggccaggatatccggaccttcgctgacgtaatcgcggccctcgttgcgggcgaggatcatcgcctccagcgccacgcgattggcggtcgcgccggcctggatgcccatcgggtgaccgatggtgccgccgccgaactgcaacaccacgtcttcaccgagatgctggatgagctggtgcatctggccggcatgaatgccgccggaagcaaccggcatcatcttgttgaggctggcccagttctggtcgaagaagatgccatgctcgagttgcatcggattgtgctcttcgcggcagatatcgtagtagccgcgcgtggtcagcggatcgccttccagcttgccgaccacggttccggcgtggatgtgatcgacaccggcgagccgcatccatttggagatgacgcggaacgacacgccgtgattgcgctgccgcgtgtaggtcgaatgaccggcgcgatgcagatgcaggatcatgtcgtttttgcgcgcccagttcgacatcgactggatcgcggtgtagccgatcaccagatcgatcatgacgaccaccgaccctagctccttggcgaactcggcacgctcgtacatgtcctccatcgtcgccgcggtgacgttgaggtagctgcccttgatctcgccggtcgctgcctgggcgcggttgaccgcttccatgcagtagaggaaacgttcacgccagtgcatgaacggctgcgagttgatgttctcgtcgtccttggtgaagtcgagaccgcccttcagcgcctcatagaccacgcggccgtaattacggccggacaggccgagcttcggcttgacggtggcgccgagcagcggccggccgaacttgtcgagacgctcgcgctcgacgacgatgccggtgggcggccctttgaacgtcttgacgtaggcaaccggcaaccgcatgtcctcgaggcgcaaggccttgagtggcttgaagccgaacacgttaccgatgaccgacgcggtgaggttggagatcgaaccgggttcgaacaggtcgagatcgtaggcgatataggcgaagtactggccttccgcccccggtaccggatcgacgcggtagcacttggcgcgatatttctccgccgccgtgagacggtccgtccacaccacggtccaggtcgcggtcgaggattcgccggccaccgccgcagccgcttcgatcgggtcgacgccgtcctgcggcgtaacccgaaacagacaaatgatgtccgtgtccttcggcgtatagtcgggctcccaatagcccatcttcttgtaggacatgacaccggatttataacggtccttgccgcgaaccgtcagcgacttctcgttaaggacgttcatgttgttctccttctcttttctgtctctctttgtgtgatccgcgacagattcggatcgtatttcactccgcggcgacggctgtttcgccgatacgcggatcaagtttgccggcgcgatagagcttggccatttcagacaatgggatcaccctgatcttcgcggcatttccggcagtgccgaactgttcgaagcgctcgcggcagaggtcgcgcatcgcatccatcgccggttttaggaacttgcgtggatcgaattcgcttctgttgctggtcgcgatcttccgaaatacagccgtcatcgccaggcggcagtcggtatcgatattgaccttgcggacgccatgcttgatgccgcgaacgatctcctcgaccggcacgccccaagtctgcggcatctcgccgccgaacttattgaattcatcctgcagatgttgcggcaccgaggatgagccgtgcatcaccagatgcgtattcggaaggcggcggtgaatctcctcgaccactttcatggcgagaatgtcgccgtccggcttgcgcgagaacttgtaggcgccgtgcgaggtgcccatcgcgatcgccagggcgtcgaccttggtcgcgcgaacaaaatcgacggcctgatccggatcggtcagcaattgatcgtggctgaccgggccttcgataccatgcccgtcctcctgctcgccgccgccgtgttcgagcgagccgagcacacccagttcgccttccaccgaagcgccgacccagtgcgccatgtcgacgacgcggcgggtgatatcgacgttgtactcgtagtcggcggcggacttggcgtcggccttgagcgagccgtccatcatcaccgaggtgaagccgtacttgatcgcggtggcgcaagtcgcttcttcgttgccgtgatcctgatgcatgcacagcggaatctgcggatacatctgctccagcgcgtcgatcattttcgccagcatgatgtcgttggcgtaggagcgcgcgccgcgcgaggcctggaggatgaccggcgcgtcgacggcggccgcggcctccatgatggcaagcccctgctccatattgttgatattgaacgccggtacgccgtagccgtgctccgcggcatgatccagcaactgtctcagtgttatgcgcgccatgtcggttccctccccatttggctgccctgataagacgtcgcgcttcgcgcgatcatatttttggtcacgccccgtttcgacgcggccgaggctgccgcttgcggaaatgcgatcagttcactcatgcccgcctcttccggtcgataagctgaaggatcagcggcgtcaggatcaactgcatcgcgagatccatcttggacccgtgaatgacaatcgagttcgcgcgcgacatgaagctgttcggaatcatcgacagcaggtacgggaagtcgatgccgcgcgggttcttgagacggatcacgaccatcgattcgtcgggcgtgggtatccaccgggcgatgaacggatttgaagtatccaccgtcggcacgcgctggaagttgatgtccgtctcggcgaactgaggacagatatagttgacgtaatccggcatcctccgaaggatggtgtcggtgaccgcctccgtggaatagccccgcgcactgcgatcccgatgcagcttctggatccattcgaggttgatcacgggaacgacgccgatcttgagatccgcgtattgggcaacattcaccttgtcggtcacgaccgccccgtgcagaccttcgtaaaataacaggtccgagttctccggcagcgcctgccagtcggtgaacgtcccgggagggacaccgtgcttcgcggattccacatcgtcgtggacatagtaacgcgtattgccggttccgctttcgctatagctccggaacacagcctccagttcgtcgaacaaattggtctcgggactgaagtgactgaaatgcttgttgccccgatccgactcctcggccatgcgcgtgcgcatgtcggcacggttgtaacggtggaacgcgtctccttcgatgtacgcagccacgacattctcgcggcggaaaatctgctcgaaagtccgcttgacggatgtcgtgccggcgcccgacgaacccgtgattgatatgataggatactttctggacacgattgcgacagcccctcaattcaaacgcgaaacaggccgcgatgcccgaacaacggtgcattcgcttccaaagcgacgttaggtcccgtgtgcatatcttcgagccgccggacgttcttgatcgaacccatgatcagcggaactcgctgatggaggctgccgggcacgatatcgagaattcgttttcgtccggtggaggcgccaccgcccgcttgctcgatgatgaacgccatcgggtgcgcctcatagaccaggcgcaggcggccatcttcgtagccatcccgggcgtctccgggatacaggaatatgccgccgcgaacgagaatgcggaaagcctccgcgaccagcgagccgatccaacgcatgttgaaattcttgccgctcggcccatcggctcccatgaggcattcatcgatataggcgcgaaccggtaaatcccagtgccgcctgttcgaggtgttgatagcgaactcggttgcatccgccgggatctgcatcatcgatcccgtgagcttgaacaccctctcgacgcgatcgagcgtaaagatatcgacaccctgcccgagggtgaggatgagagaggtttgcgggccgtagacaacgaaaccagccgcaagctgcgcgctgccgggttgggtaaaggcggcgctggcatcgggtggagtgggcatgattgagaaaatcgtacccaccgatatgttcgtgttgatgttcgacgagccgtccagcggatcgaacgcaacgctgatcggcgcgcccggattcagaatgtccagctccgccatttcctccgaggcaagcacggcgatcggcagggcactgagagcgtcgcggatgatttgatcggcgcgaacatcgagatccttctgaatatccccgtcggtgttgcgtccttgtgcctctccggtgatcccggccaacgcgccgcggcacgtcagatcggaaatatcgatcgcagcctgcgcaagtgcagctacggcttcctttacagctcggtgaagcggatctggacccgcttgtacttccaaccgttgttgtaacgtcagctcgtggctcattcagtctccccctcggccgcacatgccaaacagtacaatttcaatatccttcatcatccttcatcgaaccaatatttcttgatctcaaagcttcgcgatgtcggcgcggtcagcaccgcaactatttcgtcccatctgcgatcagctccttcttgaagctctatccgggaatgacgttagtctgacgatcgtcaatcgccaggagatgcgtcagaccttccgtggctatgcgcttcgcgatcatggggcacccgcttcccgacaccgaactggacacccatctgatcggcgacctatggggcttccggactagcggcggtcgatcttggagctgtcttcctcaaaaagccgatgagaagcgtaaaagatcgtatcgtttccagttattaacgagtgctgagcataaaagatgatataataaacaccaattgttattttttattgagtgcattagaatcgcttatgtattcgccatgcatctgaccctcagacagctccagatcttcgacgcggtggtgcgtcagcagagctttacgcgcgcagccgacgcgctgcacctgacccagccggcggtctcgatgcagatgcggcacctagaagagcagatcggcgtgccgctgttcgaccacgtcggaaagcagatccagccgaccgacgccggtcgcgagttgcatcgccacgccacgctcatcagcgccaagatgcgcgacctcaagtctgcgatggaggagttccgtggcatccatcgcggggaactcgacctcactgtggccagcacggcca

SEQ ID NO: 4506 - DNA, 23486 bp, synthetic construct
  source 1..23486: mol_type = other DNA
  misc_feature 1..23486: note = Synthetic
cgtccatctccggcatccgcacgtccatcaggatcacgtcgtagctgaagcgggccgcggcggtcaccgcttcgttgccgtcggaagcggtgttggtctgggtcgcaaaatcctgcagcatctttgccgcgaccaggcggttggtcggattgtcgtcgacgatcagaatccgcagcggccggccgagcgcttcgatccgctcgcggaattcgctgtacaccaccggatcgtcggtgtccggcgccggcagctcgctggcgagcggcagcgtcaggcagaaccagaacgtggtgcctttgccgagcgtcgaactcacccggatctcgccgtccatctgcttgaccaggcgcttgcagatcgcccgcccgagaccggagccgccgaacctgcggctgatcgagctgtcggcctgcgcgaagtcggtgaacagcgatccgatgtcttgctcggcgatgccgatgccggtgtcgctgaccgtccactccaacgaggccgatttctcgtcggcccaccggcacttcgtcgtcaccaccacctcgccggccggggtgaatttcaccgcgttcgacatcaggttcagcagcacctgccggatccggccggcgtcgccttgcagcgcgaaggggagctgcggatcgatctcgttgcggatctgcagcccgcgcgcggcggcgcggggccgcacgatgctgagcgcggtttccaccagcgtttcgggcgaaaacgcgatggtttcaagcgacagccgtccggcctccagcttggagaaatccagaatgtcgttgagcaggtcgagcagcgcgtcgccggcgtcgtggatgcccaccacgctgcgccgctgctcggggtcgagccggctgtcgagcagggaggtggcgagcccgagcacggcgttcatcggcgtgcgaatctcgtggctcatcatcgccacgaaggccgacttcgcggcgttggcggattgcgcgtcgacgatcaactgctccttgcggatccaccagcgggcgatcacgatggtgacgatcaacagaaccacggcggtgatcgacgtcatcaccagcagcagcacggcgatctcgcgccagctctgcagcgcgctggcctcggtctggctcacggaaatcagcaccggatagttcggcagccgccgcgccgagcgcagccgcatctcgtgatccttgtcgctggcgtcgcgcagccggccgccggccgccagcgcccgctgcgccgcgcccgacgaagccttgccgatgtggtcggaggtcgggtagtgcgccagcagcaggccgtcgtcgcgcatcagcgacaccgaggtgccggccccgggcgaggtggcgccgaagaagctctcgaaatacgacagcgacaatgcgcccagcaacaggcccatgaattcgccgttcggctcgttgagccgtcgcgcgatgtagatgttccaggtgccgttgccgcggttgcggaccggcgcgctgatgaagctctccagatcggcgtcggccttcagcgcggcgaaatagtcgcgatcggagatgtcgaggtcgggaatcggccagtagcgcgagaaattgagcagcttgccgcgctcattgatcatggccacggcgtcgacctgcggcagcccggtgatcttttcccgcagcatcaggtgggtgtcctgatcggccatggtccgctgataggacgcactgccggtgacgccgcggcgggccagataatcgccgacgctggacagcaccaggtcgagcgatttgaacgagcggtcggcctcttcggcgagcgtcaggctgtagcgggcgaggttgacttccgcggtgcgcagcgtgctttcgcgcagattgttcagtacgtaaaggttggtgccgacgatggcggcgatcaggctgcagctggtgagcagcagcgcgccgagcgatcgtttgaaggagggtttcatggtcggatcaccggcggtgcgtcggcggatctgagcggcatcgatcgatcgatgtcgctcctgcgaacgcgacgatgaccgtgatggagcgcgccggatagtcggattgcgcgcgcagtcgccgacagcgccagcagcgcgccgggcaggagcgtgagtttcttgtggagacggaccggagtggttggactattcggcgaagtagctctactcagtctcatgccggttccaccagtttatcaggtgccagaccgcgtgctgcgcaagactcccgctgcagcgttctggggatggtccgcaagcgccccgcattatgcaccgaatagggcacacggaacctactgatcgtggtactctgcggcaacagagttaggtgctttcctgctagttttgcgttaatagcatgcctcgtacagctacgagggttgaaccgattagcgactcggctaaaggtgaacgcggagtattattcatgaatgtaaacacatcgggacgtgagatatttgtcgtcgacgacgacccggccgttcgcgaaaccctgtccatcgtcttgtcggcagccggctaccaatcgatttgtttcgccgatggcgatgcgttgctggcggtggcgcggtcgcgttgcccggcttgtattctgctcgacgtccatattcccggtcgctccggcctggacattctggaagagctgcacgccgaggattatccggcgccgatcttcatgatctccggcaagggcgacatcgcgatggcggtcaacgcgatcaagaacggcgcgctggatttcatcgagaagccgttccgcggccctgagatcgtcacgcgcgtcgaggaggcgatcgaagccttcacccgccgtcgcgccgccggcctggtgcccaaggtgccgtcgctgaatttccccggccgcgaaccgctgacgatgcgcgagcgcgaggtgctggagctgttctccgcgggcaacaccaacaaggaggccggccgtcagctcggcatcagcccgcgcaccatcgagtatcaccgcgccaacatcatgaagaagctcggcgccaagaacgccaccgatctggtgcggatcgtgatggccgcagtgccgagagcgtaagttcaacgatccgcggatcgttgaaccgcacgtgctgctgcgcggtgaccgcggccattgattgcggccgcggggcgcgacgggactgcagtgtcctgcgaggggccctgtccgagacggtccgggcagaaggtccttcgatcacaaagtccttcgatcacaaagtccttcgattacaaggtccttcgatcacaaagtccctcgatcagaaggtcccgggaaacgcgccgccatcgagcagcaggttctggccggtgatgaagcccgctttcgcaccgcacaagaacgcgcaggcgagcccgaattcctccggatcgccgaaccggccggccggattctcgcccatccgcttgttcatgatttcctcgaccggaatgccgctggccttggactggccggcagacaccgtccgcagccgatcggtgtcgaacggccccggcagcagcgcgttgatggtgacgttgtggcgcacggtcttgcgcgacagcccggcgacgaagccggtgaggccggagcgcgcgccattcgatagcccgagcacgtcgatcggggctttcaccgcggccgaggtgatgttgacgatgcggccgaacttgcgttcgatcatgccgtccaccgtcgccttgatcagttcgatcggggtcagcatgttggcgtcgagcgccttgatccagtcgtcgcgggtccagttgcggaagtcgccgggcggcgggccgccggcgttgttgaccaggatatcgggcgacgggcaggcggcgagcgcggcggcgcggccttccggcgtggtgatgtcgccggcgacctcggtgatctcgacctcgggatagagcttacgcaagtcagccgcggcctgcgccagcgcttcggcgccgcgcgcggtcatggtgacgtgcacgccttccgcggccaatgccgcggcacaggcgcgccccaatcccttgctggatgcgcacaccagcgcgcggcggcctttgattccaagatccacgttgaattgctcctgattgatgtcgacgaggtcgaatgccgtggacactagccgcccgggtgcagcctgcctagatcgcagcaccgcaacgctgttgcccgctcgtcaaagccgatgggtctgcttcaactgggcgatataggcggcgacgtcgggcggcagcgatttgaagccgcgctgccctgctgccgacaacaacggccgcaattgcgaaccggcgaggaacgccggttgcgcatgggcggggatcaactcgtcgaagatcagcaccatggtgatcgccaccaggccgacccgcactgcgccgagcgcggcgccgccgagccggtcgaccgggccgatacgggaaccgacggtttcgttgatcgcggcgcgcaacagcgagccgagcgcgatgccgctgaccagaaaggccgcgatgaaggtgaacgagctctgcgccgtcggcatctccgatgcggtgtcgagccgcgccccgatcagcgtggtggcccacagcgcgatcggcatggcgagcagataaccgaggatggtgacggcgctgcgcagcaaccccgcctggaagccgatcgccaccgcggcgagcagtgcgacatagaccacgatgtcgaaggcgttcatggcggctccgggcagcgggcagcgggccgcgcccgcgggacggactgttctcgtcaaattgtctgcggtttgctcctgctgcgcgccgcgctatcaggggcgcaagcaacaaccgaggaaaccgcatgtccgacttattcgacgtcagtaaagaaaccatcctcatcaccggcgcgtcgcaggggctgggccggcaattcgcccgggtgctggcggcgcatggcgccgccgtggtgctggcggcgcggcaggtcgacaagctgcagagcctcgcggccgagatcgccgccgccggcggccgcgccgcggcggtgaaactcgacgtcaccgacatcggcgggatcggcgcggcgatcgacgaggccgaagcccaactcggcccgctcagcgtcctgatcaacaacgccgggatcgcggtggaaaagctcgcggtcgagcagagcgaagcggactgggacgcggtgatcggcgccaacctcaagggcgcctacttcaccgcgaccgaagcggcgcggcggatgacggcgcgcgggcagggcggcaacatcgtcaatgtggcctccgtgctcggcttcgcggtgatgaagtatctggcgccttacaccatctcgaaggccggcctggtgcaggccaccaaggcgctggcgctggaatgggccggcagcggcatccgcgtcaacgcgctggcgccgggctatatcgacaccgagatcaaccatgagttctgggcgacgccgggcagcgaaaagctcaccaagcgcatcccgcagcgccgcgtcgggcacgaatccgatctcgacggcgcgctgctgctgctcgcctccaacgcctcacgctacatgacggggagcgtcatcaccgtcgatggcgggtttctgctgacgtaggcgagcaatgtcgcgccattgcgtatttgttcctgtagccaagggtctttgattgcaggcgttcaattcaaacgaggccgtcattccggggcgtgaggccgcaggccgaacgaacccggaatccagtattccaggtcggtgagtactggatttcgggttcactcgcagcttcgctgctcgtgccccggaatgacaggtgatatttgggccacgcatcaattcagacgcgtatcaattcgataaaagaagaggcaaactactcaattcaccctcaactcctcgcggatcatgtccgccgccttctcgccgatcatgatggtcggcgcgttggtgttgccgccgatcagcgtcggcatcactgaggcatccaccacgcgcagcccctgcaccccgtgcaccttgagttgcggatcgaccaccgccgtcgcgtcatcgacgcccatcttgcaggtgccgaccgggtgatacacggtgtcgacgcgctggcgtaggattgtgcggatgtcatcgtcgctgcgcacctccgccgtgaacatgtccttctgctgcagcgcctgcagcgccggggtttccatcagccggcgggtggtcttgtagcccgcgaccatggcttcgaggtcgctgtcctcgccgagaaaattcggatcgatcgacggcggcgccagcggatcggcgctggtcagcccgacgctgccgcggctgtccgggcgcagcaggcagacgtggcaggaaaagccggtgccccagcgccgcttgcggccgtggtcgtcgacgatcgccatgccgaaatgcagctggatatctggtgctgcgagctcggggcgggtcttcaggaagccgccgcattcggcgaaattggtggtcatcgcgccgcggccgtcgcggcgatacttgccgatcgaggccagttgccgcgcgatgccgcggaacgaggtgccggtgaaatacgggcggtccgacatgtaggcgaagatgaaatccgggtgatcctgcaaattctggccgacgccgggcaaatgatgcaccgacgcaatgccgtgctgcgccagcgcgtgcgcattgccgacgccggacagcatcagcaagtgcggggtctggaacgcgcccgacgacaggatcacctcgcgccgcgcgcgcagctgcagcgtcttgtcgccctggcgatattcgacgccgacggcgcgggtgccgtcgaataggatgcggctggcgtgggccttggtctcgacccgcagattgctgcgcttgccgatatgcggctgcagataggcgcgcgcagcactccagcgctcgccattgtgctgggttagctggtacaggccgaggccctcctgctcctcggcgttgaagtcgtcgcggatccggaactgggcctcgcgcgccgcctgcagatagatctcgtgcaccggattgtcggtgcggagcttattgacgtagagcgggccgctttggccgtgatattcgccgttgaaatcggaattgttttccgagcgcttgaaatagggcagcacgtcgtcataggaccagccggcattgccgagcgacgcccaatggtcgtagtccgacttgtggccgcggatatacaccatggcgttgatcgccgaggagccgccgagccccttgccgcgcggctgatagccgatccggccgttgaggccgcgttgcggcacggtctggaaatgccagttgttgagcttgctcggcaccatgaaggccagcgtgtagggcgtcttcaccagccaattgtcgcaggcgccgccggcctcgagcagcgccaccgaggtcgcgggatcttccgacaatcgaccggccaccgcgcagccgccggagccgccgccgaccacgatgaaatcatagctctcgctgctctcgctcatgttccgtccctatcgtttgttattgatcgccggtcggcgcgtcggccgccggcgttgtcgtcgtagtgtcggcgcgaggctacgagagccagcgcagcaaagcggcgagccgcttcagcctgccgccatagggcggatagaggtcggcgaagcggttgtagggcgagcgatagaacaccggcttcagcttgctgaaggtggtgaagccccattcgccgtgataggcgccggagcccgaggcgccgacgccgcccatcggctggttgacttgcgcgaaatgcaccaggcagtcgttgacggtgacgccgccggacaccgtgcgcgccaaaacctcgtcgcgcgcggcctcgtcggtgccgaaccagtacaaggccagcggccggtcgcgggcgttgatgaaggcgatcggttcgctggcctcgtcgtagccgaggatcggcagcagcggcccgaagatttcctcctgcatgatcttcatctcggacgtcacgcccgtcagaatcgtcggcgggaatttgcgcagcgctttccacgccgcgtcgtccggcttagcggtctgcaccacgttggcgctgtgcgcctgcgcatcggcgagcaggccctccagccgcgcaaaatgccgatcggcgatgatcgaggtgtagtcggcgttgccgggctcggtgccgaacatcctggtcatggcatcgcggaccttctcggcgaaggcctgcagcgaggcttgcggcaccagcacgtaatccggcgcgatgcaggtttggccagcgttgagcagcttggcataggcgatccgcgccgcggcctggtcgagatcggcggagcggtcgatgatcaccggcgacttgccgccgagctccagcgtcaccggggtgagattgcgcccggcggcggcggcgacgatgcggccgacccgggtcgagccggtgaacatcagatggtcgaacggcagcgcggcaaacgcctcggcgatgtcgtcgtcgatgccggtcaccaccatctcggtcgggtcgaaggtggcggccacggtctcctgcagcagggctgcgaatcgcggcgtcaattcgctcggcttgatcatcacaaggttgccggcggcgagcgccgccaccgcgggcgccagcgtcagctgcagcggataattccacggcgcgatgatgccgacgacgccgagcggctgcggcagcagccggttgttgccgggcaggaactgcagctgggtggcgatgcgccgcggcgccatccaggccttcagctgcttcgacgtgtgtttgatctcgcccagcaccgacagcgtctcggcgatctgggtctcgaccgcgcagcgatggctgaaatccgccgagatcgccgcgttgaagcgctcttcatggtcgagaatcaacgcccgcagccgcgccagccggtcgcgccgcgtctccagcgacggcggcgggctctgccgggagacttgccgcatccgatgaaagccgtcgtcgagcgccctgcgcccggcactctgcaccgcctgatccatgatgtgtcctcgccgagatcccggtctgtgcaacgccggattttccgcattttgcgcacagattgcatcgtccgcaatggtgcaaccggtaggcggttcccggccgtcataatatcttgaaaataatgcagacagcccttcccaaacccgtcgagcattggtacacacccctcgcaccacggcgttcgccctggttgccctctcaggaaccttccagatgggatcgatcggcgcccgtgggcgttggcggtggcgtctggagacggtcttgcaagggcgtgcaaaggtttatcgcggggtggagcagcccggtagctcgtcaggctcataacctgaaggtcataggttcaaatcctatccccgcaaccaaactttctaaatgatttcaatgaattagcccgcctctggcgggttttttcatgcgttgcagtgcggccacgatgccgcactgagccggacagcgtgttatcggacggcaatgtggcgccccgccgcgatcgccggccgtctcaccggccgttggcctggcgccgcgggtcgcattcattggctggcatgctttggctggcatgctttggctggcatgctttggctggcatgctttgggccgcatccttcagttcgcatcctttaagtctcgcacgtcccggcattgcgatccggaggcctcagcggctcgtccgccaacggggcggccgcgatcggagcgcctggtgaacacgtcgatgactgggtgtcagcaacgatacgtcgcgattgcgcgatcgtcggctctgcgatgcgcggaggaaagccagatccagaaagcgcatcgccctagagactagcgcgagctggtaattacggtcggggcgaaatcaggatggggttcgacgatgcgatcaactgcagacaggtagcaacggtgacgccgcaaacttcgaagtgattttttagcttgaagaattagcttgcctaaatggaaggggcatcccgcaggatgccccattttgtgcataagcttgttaacgggaggccctcaatcaccagtccgctaaaaccagttagtctgccgataaaggctattgcacgcacggattgtggaatgctttaatccggctgtcaaggcggcgggggtggtagtgcttgaaagaaaatcaaaaccatatcgtctcggtctggacctcggctcgaactcgctcggctggttcgtcacgcggcttgaaaagcgtggcgatcgcttagagccgatcgcgcttggtcccggcggtgtcaggatatttccggatggccgcgatccgcagagcaaagcgtccaatgccgtcgatcgccggatggcgcgtggcgcgcgcaagcggcgcgatcggtttgtcgagcgccgtaagcaattgctggaggcattggttcgccacggcctgatgccggcggaggcggcggcccgccgggcgctggccgggctcgatccctatcagttgcgcgtcaaggcgctcgccgaggcgctgccggcgcatcatgtcggccgcgcgctgtttcatctcaaccagcgccgtggcttcctctccaatcgcaagaccgacaacaagaagaccaccgaggacggcgcgatcaagcaggccgcctcgcgcctgcgcgacagcatggcggaagagaatgccgagacgctcggcgtgttcttcgccaaccggcatctgtcggaaaaatacctcgcgcgccaggataagctgcgtgccgaactgaaacggatcggcaaggatcatttgaccggcaatgcccgcaagaaagcctgggcgaagttgcgcaagcggatgttcggcaacgacgtgctcgatgccggcgaagcgccggacggcgtgcgcgcccgcgccaacatcaccggcaccaaggcatcttacgatttctatccgacccgcgatctgttgattgacgaattcaacaagatctgggacgcccaggcgccgcatcatccgacgatgacggaggcggcccgcgacgagatcgcacacatcgtcttttttcagcggccgctgaaggacgcgatcgtcggcaaatgcacgctcgcgccggcgacacggccgttcaaggaagaccccgaaggctatcgcgcgccgtgggcgcatccgttggcgcagcggtttcggattctgtcggaagcgcgcaatctggaaatccgcgagaccggcaagggatcgcggaaactcagcaaggagcagagcgacagggtcgtgctggcgctgctcggcaacaaggaggtcacgttcgacaagctgcggacgttgctgaaactacccgtcgaagcgacattcaatctggaatcggaacgccgcactgcgctcgacggcgatgcgaccgccgctcggctctccgataagaaaggcttcggcaaagcctggcgcggccttgcgctggagcgccagatcgcgatcgtcgaaaagctgctggaggctgaggtcgaagcggacttggtcgattggctcgagcgcgactgtggcctggagccggaagccgccgcgcgggtcgccaataccacgctgccggaggggcattgccgtctcggcctgcgcgccatcaagaacatcgtgccgatcctgcaggatcagttgagcgacgacggcgtcgccggcgccggctatcacgaagccgccaagcgcgccggctatgatcacgccaaattgccgagcggcgagcagctcgactatctgccctattacggccaatggctggccgacgcggtggtcggcagcggcgatgcgcgcgatgagaaggaacgccaatatggccaatttcccaatccgaccgtgcatatcggcttgggacaactgcgtcgcctcactaacgagctgatccggaattatgggccgccagcggagatttccatcgagttcacccgcgccttgaagctgtccgagagccaaaaggtcgaggtgcagcgcgagcaaagaaagaaccaggagaagaacaaagcgcgcgccgccgagctggagaagttcggctttccggccaacccgcgcaaccttctcaagctgcggctgtgggaagagctcaatttgcgcgatccgctcgaccgcaaatgcgtctataccggcgagcagatcagcatccagaggctgttgagcgaggaggtcgatatcgaccacatcctgccggtggcgatgacgctggacgacagcgcagccaacaagatcgtttgcctgcgctacgccaatcggcacaagcgcaagcagacgccggtcgaggcgttcggcggcagcccgacgatcgacggtcgccgctacgattgggaggagattgccgcgcgcgccgcggcgctgccgaagaacaagcgctggcgcttcgatgccaatgcccgcgaggagttcgacaaacgcggcggatttctggcccgccagctcaacgagaccggctggctggcacggctcgccaagcaatatctcggggcgatcaccgatccgaaccagatctgggtcgtccccggccgtctcaccagcatgctgcgcggcaaatgggggctgaattcgcttttgcccgaccacaactacgccggcgtgcaggacagagccgaggagtttctcgcctcgaccgacgacatggaattttccggcgtaaagaatcgcgccgatcatcgtcaccacgccatcgacggtctggtcgcggcgctgaccgaccgctccttgctgtggaaaatggccaatgcctatgacgaggagcgggagaaattcgtcatcgagccgccctgggcgtcgatgcgcgacgatctcaaagccgcgctggaaaaaatggtggtctcgcacaagccggaccacggcgtcgaaggcaagctgcacgaggattcggcctatgggttgctcaaacaaccggagctggtcgatgacggcgacaaggacggcgccaatctggtctatcgcaaaccgatcgagagcctgaacgacaacgagatcgatcggattcgcgatcgccggctgcgcgacctggtccgcgcgcatgtcgatgccgaaaaggccaagggcgtggcgatcgccgacgcgctgcggcagctcaaggggccgtcggaccatccgcatttcaagcacggcctgcggcatgtgcggctgctgaagaaggagaagccggactatctggtcccgatcgccgaccgacgcaccggcgagccctacaaggcctatagcgccggcgagaatttctgcgtcgaactgttcgagacggcggacggcaaatgggacggcgaggcgatccgccgcttcgacgccaacaagaagaatgccggcgcgaaaacgccgcacgctccgcgctggcgtgccgatcacctcggcgcccggctggtgatgcgcgttcacaagggcgatctgatccggctcgagcacgacggccagagcaagatcatggtggtgcaccggctggacgcggcgaagggtggcttcaagcttgccgcgcataatgagaccggaaatctcgacaagcgccacgccaccaacaacgacattgatccgttccgctggctgatggcatcctatggcacgctgaagaagatgtccgccgtgccggtccgcgtcgatgagttggggcgggtctggcgcatcgatccgcgttaactacgtcttgctacacgcgttgcgtgtagcaagacgcgcccgcataatctcgcctgtcgaggagcgtatccgttggaggcgagcggccatggtcgggcgcgtggtggaaattgcgaccgacggtcggcatcttgcgatcgaccgcggcttcatgaccatcgccgagaagggcggcgagcttggccgggtgccgctcgatgatctggccgccgtcgtcgccaacgcgcatggcctgacctactcgaacaacctgttggtcaccctcgcgacgcgcggcgtgccggtggtgctgtgcgcaccgaaccaccggccggccgcgctggtctggccggtggatggtcatcacgcccaatccgggcggatgagcgatcaagccagcgcatcggcgccgctcaagaaacgcctttggcagcagatcgtgcaggcgaaaatcctggcgcaaggcgcgacgctggccgcggtcggcgccgaagcgggcggcttccggctgctggcgcggaaagtccgcgccggcgatcccgacaacgtcgaagccgaggcggcacggcgctattggccgttgttgatgggatcggatttccgccgcgaccaggatggcgacggtctcaacgggcttctgaattacggctacgcggtgcttcgcgccgcgaccgcccgggccgtgatggcggccggcctgcatcccagtctcggcctgatgcattcgaaccggggcaacgccatggtcctggtcgatgatctgatggagccgttccggccgaccgtcgatcgcgaggtgcatcggctgaagggcggtggaatcctcgacgtcaccggcgaagccaaagcggcgctggcgcgaaccatgatcatcgatctggccgtggacgacgggctcagcccggtgatgacttgccttgagcggctcgcggcgtcgctggccaaagcctatgccggcgaagcggaccgcttgatcttgccgaagcccggcctgccgctcggcttttgatccatggcgccgatcggcaacggatcgccgccggccttgtcaggttatcgaatcatgtggctcgtcgtgctgttcgaccttccggtaggcaccaagaaacaacgcaaggccgcgaccggctttcgcctgaaactgctcgatctcggctttgaaatgacgcagttttcggtctatttacggttctgcgccggcaaggagcaggccgaggtctatcaacgcaaaatcgagcaggcgatgccttcgtcgggcaaggtgcatattatcgccatcacggacaaacaatatgaaaacatccgcacctaccggggacgaaaccgtgaacagagccctcagaatccggctcaatatgccctgttctgacgccgccggcgctttcaggcgctgcgtttcaacgaaaaaaggccttgtttccaaggccttaaatcatgagcgagtttagcggactggtgattgagggccaaccgaaacttgtgcgcgcttgtcgcggtggtggctgtcagtttagcggactggtgattgagggccaaccgaaacagtaacctatctgtcgcgttacacgttgaaagtttagcggactggtgattgagggccaaccgaaacttcgacgcgctccacacattggcgccgtcgagtttagcggactggtgattgagggccaaccgaaacggcacggtgatcgacgtgtcgaccgaggccagtttagcggactggtgattgagggccaaccgaaacaccccgcatctgttcgaactgcagcggctagtttagcggactggtgattgagggccaaccgaaaccggccgatggtccttgtgctcgccgccgagagtttagcggactggtgattgagggccaaccgaaaccagatccaccatgtcgacgaattcccccttcagtttagcggactggtgattgagggccaaccgaaacgggcgtgatccacgatccgaacggcaggccgagtttagcggactggtgattgagggccaaccgaaacgccatcacgaattgaccaacgtcgccggccagtttagcggactggtgattgagggccaaccgaaaccgggtttcgcgcgatcatgtcaccaactttagtttagcggactggtgattgagggccaaccgaaaccaatcagggttcatggccggcatcgcggcgagtttagcggactggtgattgagggccaaccgaaaccctgatggtcgtctgccagcttgcggtttgagtttagcggactggtgattgagggccaaccgaaacggctttcgcggcatgcatagggtccgaccaagtttagcggactggtgattgagggccaaccgaaacgccttcgctcaaggcatcttcagccgtcacagtttagcggactggtgattgagggccaaccgaaacggggtgtatgcaggctgtgaaaggccgcccagtttagcggactggtgattgagggccaaccgaaacccgacgtacggcatccagatgggccgcgccagtttagcggactggtgattgagggccaaccgaaacaaatggtacggcagcaacgtgtggggcctcagtttagcggactggtgattgagggccaaccgaaacacttaaggaaagcggtcgtcttacgccggaagtttagcggactggtgattgagggccaaccgaaacgacgccgatatcaaccaaaaaggtgccattagtttagcggactggtgattgagggccaaccgaaactgaagccattgctgcggcgaaatccgagatagtttagcggactggtgattgagggccaaccgaaactgcgaaagcacaaccgaaacatccatccggggctgatcgcagtggatatgccgtccgccaacgctgccgcaagcgcattgaggaggtgttcggctggatcaaggcgtccgccgggctcgccaaagtcaagctgcgaggccgcgaccgcgtcgatgccaccttcaccctggcactggccgcctataacgtcattcgactaccaaaattgccgggcgcaaccgcgtgatcggcaaccgaacgaacgtcaagatggtggggcgatgcgttccagtccgaggtgccgccacacatcaaactccctccagcacgctgacatgcacggcgcgggtttcggttggccctcaatcaccagtccgctaaactctgacgcccggctcgcgctactaccagaggtttcggttggccctcaatcaccagtccgctaaactagcgtcggcgatccgtccgcggtcatacgtgtttcggttggccctcaatcaccagtccgctaaactgagtcgccctatgtcggacgcaacaatcctgtttcggttggccctcaatcaccagtccgctaaactagcgtgagcgcgaaatagaccggcatctcggtttcggttggccctcaatcaccagtccgctaaactgcagccgccggccaacagcaacaagaccttcgtttcggttggccctcaatcaccagtccgctaaactggtgacgaatttggtcccgctgtacttgctgtttcggttggccctcaatcaccagtccgctaaactgtgaagcggcaccggccgctgatcatcgtggtttcggttggccctcaatcaccagtccgctaaactgccttgccgcccttcttgccgaggatgttcgtttcggttggccctcaatcaccagtccgctaaacttttgcgtcaacggtgccggtgtcgttttcgtttcggttggccctcaatcaccagtccgctaaactttaccggcgaacgacgcgatggcctcggccgtttcggttggccctcaatcaccagtccgctaaactaccccaggcaagcgaagcgagggcgtcgtggtttcggttggccctcaatcaccagtctgctaaacaaaattcaccccagatcgaccgccgtcgaacacttcttcaacagcctgctaggatttgcaaaccagatcttgcaacagcgagtctgccaagaattcctctgggattgcgacccgacattgttgcatggccgtcgtcaatgctccatcccaatgtgctgtgaccgccttaccctgcagaggcaggccgaagaatgagatccttgcggccgcggcggcgtagtcagcggcgccgaagcgccacggttcggcgttgtgctcacgcatgacttggttgccgatgtgcaatccgggccaatcgaaatcgccgtgatagcgaagccgcgcgcccgcttcgctcagttgcagcaacaggcaccgttgcgcggccgcgggcatgccatcggtacagaccagcggcgcgcaatcggcgccccagcgatcggcggcgatcgcaatcagattgggattttcgcagacatagaccgtgcggtgggccacgtcccaggtgggcggtgagcgcagcagcgcgcgcaaggatgcgtagctcggctcgcccgcgcgccgacgatcgctctccgcctcgcgggtcggaagattcaggaacagcaccgggcgcgccaactcattgaccaggatgccggcttgagcccagatctcgcggtcgcgctccacgctggcgttgcgttcgagaccgccatttgccgcggcctcaattggcgcgtcgtcatcgccgtcgtgggattgcggcgcagaccgacgcaacaccgcgagcaccagcgccgcggtggcttggccgccgtcgagcgcatgggcatcgccgagcacgtcggcagccaattgcgaacgggtgaggccctgcgcgggcagccgttgcagcaccgcctcggcgcggcgacatagttcgatcgccgccgcagcattctgtcgtgcaagacgcttgagcagtccgaggcccgccggcgactgcagcaatgcggacaggctcgcgtggtggcaggcgccaatcacatccgaccatagcgtttgtagcgcgaggcgtgcgctggcgaggtgtgtgatcgggccatcgagctgttccagcgcatcgcgcagcgaagctgcgatcccggcgttttggaacgcggcatcgagcacgcgaaggtcgatctgtaaggagccagagtagcgctgcgggcggccgagcaatgctgcgagcgcggcgtgctcctccgcggtcagtcggtcgatgcgaaggctttcgacgacgtcgtcgggcgtgtggcgttcaaagcgccggcgcagccgcttgcgcagcgaggcgagacgctcgccgccgagcaggcgctgaagccgcgcgtcggttgcggctctcatgtcggcgcaaacctgcggtcgggatcctcgtcgcggctcttggcgcggccatcccagttccagcgcgagacgaacaccgcgtcgatgccttcgcggcgctgcagctggcagatcgcgacgccgggcaattcggcgtagcagccccattcgcgttcgctggtgatgacgaagtcgaggtcgaattcccggatcagccccatgcaatgggcgcgggcggaatcgtcgatcccggcgaaggcttcgtcgagcagcatcagccgcggcgcctgcgccgagctgccctggccgtagaagctggcgatcgcggcgaatagcggcacggtgaggccgagcgcgcgttcgccgctggaggccgggccggagagtttgcgccaatgcccgtcctgccagcgctcgacgcggaaacggtgccagcgccgatagtccagcgcgcgggcgagttgctcgatcaggctgccgccgccgtccctgccgaagcccagatcggtgcgttcgcgctcggcggcgatgcgcttctgcaacatcgcgccgaccacgcggcggtcttccgccgaccacagatccgcgctggtgttcaagagccgcttgcgtgcggcgtcgagcccgaccggggcgccttcgtcctccggcagcggctgccaaaggaggcgatagcgtacgccggtggaggtcgggcggctgtgcagctccttgttgatggcgtcgcgctgaacttcagccgcttgcagcagacgctgcacctcggaggcgatctcggcctgcaggtgattttccaagacggcgcgctcgttggcggtgagcagttcgctgcgctgcgcgatctcctcggcgagccgcaccgccagccgagccggcggttcgggtcggttctggtagacgatgtggacggtcagtccccagtcggtggtttcggcctgggcctggtggccgagtgcgctgagcgcgcgctgcaattcggtgaggtcggtggccatctcccgctgcacccgcgcccagctttcctcgtcgtccttgcgttcggacagcgcctgttcggcccggcgcgccagcgtcagcgcgggatcgatcgtccatgcgctggccatatcgggtagttctgcttgcggtagcgccgctgacagcagcccggtggcggcaaaatgctggaacctggcgatcgcttcggcgcgcgcctcgctgctttcggtgaaagtcgtctccgcagtcttggatttttctccggcgaccgcgctcgccttgccggagctgatcagggcttcgcgcgcccctttcaatgcgtcatcgcccgctttgacggcggcgacggccgcggccaattggcgttgcaattgctcgaccatcgcgccgacagcttcgcgcaacacgccgagccgggtcgcggcttcttccgcttcgatgcgggccgtcgccagctgctcttgctgtgtcgcgaggtgctcgcgcgcctcgctttcgcggtcgcgttgccgctgcaggtcgagcagcgcgaaacgcaactcctgggcgacctgcgcaagctgcagctgggcatcgcgatagttgtccagcgccgccgcgatcgccggcaagtcggcgggcgacgccggcaatcgcaggtcggcggcatccgcggcgagccgttgccgcaccgtctgcagcgcctgctcggcgtcgcggcaccgcacgtcagcctcggccagtcgtcgcagggcgtcctgtgcgtcccgtgcgcaggctgtggcggcgagatgggcatggcgcaacgcctcgtcggagggcgccgagcgccattcctcggcggcccgatcctggtcgcgcgcgagctgcgcggccatcgcctgcaacgccgcgagttgggcggcgatcagtgtcaggcgctcggcaatctcggccagtcgcttcgcacgagccgcggtgcgggcggcatagccgatataggccgccgtcggcttgtcccaggcgccggtcagcgcgccgaggcgaaagcggccatcgggggcgacccaggcttcgctgtcgatcggatcgtcgtccgcgcaggcgatgcccgacagaatcgcagcaatgacatcggccgacacagggctgtccgcgggcacatcggcctgcagccaatcgccgagcgattgcgaatgtggcgaccgccgcattaattgcgtgtcgtgtaacggcctgccgccgtcgccggtctgcagcgcgccgtcgggcgaaatccacgcgtcgagcaggccggcggcttcgagcgcggcctcgagaccggcgcgctgcgtcgctgtgacgacgtcgtgaaaatcgaccagctgccacagcggagccccttggcgcgcagtccgggtattggcatcgcgtatcgcgggctgcggcggcgaggtatcgacgccagcttccagacggctgcattcgtcctgaagcgcggcgcgctcgatttcaaggttctgttgttgggcgtcgagcgtgacgcggcgctgcgcgaaactcacgctggcctgctgctgcgcggcctgcaatgcttgccgcgccggattgtcgccctgcagggcgaccacccagtcggcgagcgcggtcagcgccgcgaggccatcgtcggggtcgatgcgcaattgcgtcaggccggcgaagtggcgctcccaatcctggacaaggttttggccctgccgctcgacggcggcatcggcctgctcgcgtcggttcgcagcggcttcggcggcgtcccgtcgttcgtcgcgcgccgcttggtgttgcgcatgcagagtttcggccgcggcgacctccgcctggcgccgccgcaacacggcgatctggtcgcgtcgctcggcgaccaaagcggcaagctcggagcgcgctgcctcgaaggcgtgcggcgtcagttcggtcaatgccgcggcgtcgcagcttgccagcggattgccgccatgggccacggcaatgcccgcgctggcggcataagccgcgccgtcgcggcgcagttcggcgagctgacgttcggcttgcgccatgcgttgcgccgcctgtgcggtttcgccgacgctacgcgtcagccggcgcgccgcctcgtcggccgccgtggcggcggcctgcgacgcgcgctgccgcgcggcggcgtcgcgcgccgcggtttccagccggttggcgtcctccatcccggggccgctgcgcagggtttccagccgcgcctggtcgcgcttgagcgcacgctcggcctcgtcctgcgcgtcctgcgcgagcgcttcggcggccagcgcttgtgccagccccgcctgcgcctcgccgcgcgcccggctggcattgtcgaattcggtttgcgcctgccgcagcgcccgggcctggcgccgggtctgggtgccggcatagatccggtagcgttgctcgaagcggtcgatggctctggccagcgtctggtattcctcgagctggcggcgatcttcctccaactggccgagcgcctcggcgacgtcgccaagcaattcggtcggcagcggcggcaacgcctcggtcagcgcattcgacagcgcggtctcgtccggcttcttcgacaattgcggttggcgcaattggatcagcgtatccatcaaggcgtcgtagcgccgcgccccgagccgaaacagccgctcatcgacggcgcgccgatagctcgaggcggtgtcgaacagctggccgcggccctgcagcgcgtcgcgcagccgttccttggtcagcacgttgcgctgctcgctgatcaaccagagatcctggttgaggcgcggcgcggcgtcgctatcgtcgagcacgaagaaccagctctccacctgcggacgcgccgctgccgcggacaatccggcgccgagcgtgagataatgcggcgtgccgtcctcggcgagccgaccgaactcgatccaggcatagccgatgcgccggtcgtagctgcccatcagcaggttccaggccatcttcttgccgctgtcgccgtccggctcgacccgtgacgatttcagctgcgcgtcgagcaggaagggcagggtcagcgacagcaccttggatttgccggtgccgttgttgccgcgcagcagcagatggccgtcgcgaaaccagaactcctcgctgtcgtagtggaacagctccaccaggccgagccgcagcggctgccagcgcgttcgcgtcgggatcggcaaggctggtcttgcggtctccgcaagaaacgaagtcgggcggtcgttcatggcgatccgaaccgatccttgccgacggagccggcgcgcggttcacggctgtcgcggatttcggcgtcgccgagcgcgaagcgcgccagcgccggcagcggctgcacggtgtcggcatctcggacgatgaggtggagtttttccagccgttcgattgcgatctccgtcaactcgcgttcggcaccaggctcgcgtgccgatttgcgccagtagcgaccgaacctggtcttggcgtcgcgcaggaaggcgatgatgtcgtgctccggggtgaacgccgccgcggccggtgtcgcggcagcggcctcggccaggcgcattctgtaactgctggccaaatgctccgcgaccagcagcgtggcgtgggcgtcggtgccttcggccggcatcgctacgtcggtcagcacgccggtctcatcgaccagcgccagcccttcggcgcgttgttcggccaccaggcccgcggcgtcgcgcaagcgcgcggccatggcgccgcgctgattgacgaaataaccgcgggcgtcggggtccagcgtgtcgagatagactacgggatcgtcgagcagccggcgggcgaggtggtggcgcagcgccgtgcgccggccctcgtcgctgtccgccacgtgctcatc

SEQ ID NO: 4507 - DNA, 23444 bp, synthetic construct
  source 1..23444: mol_type = other DNA
  misc_feature 1..23444: note = Synthetic
tgctcgaccggctggattgggccgacctcctggacgctgcaaccgcactgccgactcacggcaggttttcggtgtggggcgatgcgaccttgcggcgggccgcgcagggcgacggcggctggcacctcgaccgcgccggcttcgagcgccggatgcgggccaagctgcaccgtgatgcgatcgagttccatccgatcatcgtcaccatgctggtacatcactgcgacggagtcgtgctcgaactcggtgacggccgcgtcgtgttcgccgacgcggccgtcgactgcagtggtcgcgccgcgctgtcgtcgggggccaccgcggggcggcgccgcaccgaccggctggtggcggtgtggcgtgtgctcgacctgcctgacgagaccgaggccgccgccgcgacgctggtcgaagcggtggcgctgggatggtggtacatggcgccgctgccgggccgtcgcatgatgctcggcctgttcaccgacaccgatctgttgccgcccggcgccgcgcaggacggcgccacatggaccggcctggcagcgtcgacgatcgcgatcgcttcgcggctatacagcctggggctggatgcgaccgccgcccgtgaaccgccccaggtcgcggctgccgccaccgtgacggccagccgattgatcgaggggcggatcttgcgcgccggcgatgccgcggcggcgctcgacccgctcggcgccaacggcctcgccaccgcgctgtggagcggcatggcggccgccgaggcggcgctgaccctgactgatggccagtctgagcgggcggaagcctatgagcgcgattacttgcaggggatcgcgcagcacctcgtcacccagcaggcgatgtacgccgccgagccgcgcttcgccgatgcgccgttctggcagcgccgccgcaccaatgcatcctcccatccccaccaggagacctcgccatgaacgcctctctgcgaacgctgcttgctgctgccgcccttgccgtcgcgataccggcggtggctgccgccgaatccagtgcggtcaagatcatcgcgccgaccgacaagacgatcacgccgagcggcacctggagcatcggcgcccgcgccggcgacttcgtgttcatcggcgggatgcggggcaccgaccgcgtcaccggcaagatggtcgacggcgacgaggcgcggatccggcggatgttcgacaacatgctggcggcggccgaagctgccggcgccaccaaggccgacgcggtgcggctcaccgtgttcgtcaccgacgtcgccaaatatcggccggtggtcaacaaggtgcagaaggacatctggggcgacggcccgtatccgccgcgcaccgtgctgcaggtgccggcgctcgaccagggcgacatcgccgagatcgacggtacgttctacgcgccggcgaagtaacaccgccgccccgcgggctcacgtttgaaccggtgcgggccatcgcgcgactggaaggaagcacgatttcctttcggaggcgccgatggcccggccgtattttgcccttacgtcgattttgctggcgagctgttgctggttctcggacgttggtatcagtttgtcggcccgcgcccagagcgaggacgcggcgcagaaatgccagttgccgatcacctccgtggaggcaagcttcgcggcatgcacggcggcgatcgattccggtgcgctgagcggcaaggcgctggccggtgcctatctcaagcggggcttcctgcgcacccatcgacgcgatctcgcgggcgccgaggcggatctcgacgcggcgatcgaggccaatccggacgctgcggacgcctacaccacgcgcgccaatttctggaacgtcagcggcaagcccaaccgtgcgctcgccgatgccgatcacgcgatcaagctcgacccgaacctgccgttggcgcatttcgtccggggcagcgctgaactgaagctcgggcactacgatcgcgctgtcgcggactattcgcgcgccatcgagctgcggccgaaggaaagtggcgaggtttatgcggtgcgcggctttgcgtatcatcgcaagggcgacgacgttcgcgccgtggccgactacaccgaggcattgaaagtggcgccggaggacgttggcacgctgctcaatcgcggcgatgcgcggcgcaatctgcgcgacaccgccggcgcggccgccgactacaccgaagcgatcaagcttgcaccggccgatgccgggggcttcaaggggcgcggcttcattcggctgctgacgcacgacaccggaggagcggtggccgacttcaccgaggcgatccggctgtcgccgaacgagagcggcctgtatctcaaccgcgcctcggcgctcgaactgcagaaccagagccttcgtgcgctggccgacgaggacatggcgatccggctggagccgcagcatccgctcgcctacgtcaatcgggccgagacgctgaggctgctcggggacaaggtggcggcgcgcgcgtcggtgaccaaggcattgttactcgcgccgggctttccgccggcggtcgatgtgctgaagaaactcggtgaggcgaagcgtagcaaggagccgtcacccgaggcggcgcagcaggcgtatcggcgctgcaccttcccggtgacggatctcggcccgggtgaggagggcatcaagcagatcatcaaggtctgcacgctgctggtcaattcgcagggcggcagcgacgccaatcgcgcgctggtgcacctgcagcgcggcagcatgtatcgccggcagggcgactatcagcgcgctctgatcgatttcagcgagtcgctgcgttacgatccgaaatcggcgctggcctatagcggccgcggcaacgcctatcgcgggctgaagctgctcgatcaggcgctcgccgatcacaccgaagcgatccggctcgatccgaaatacgccaccgcctacaacaatcgcggcaacgtctggcgcgacaagaacgatctggccaaggcgatcgccgatttcgatcgtgcgatcgcgatcagcccgaactacgcgatggcgtatttcaaccgcggcaactcgcggctggagtccggcgacaaagaaggcgcggtcgccgactttcagcagaccgtcaagctcagcccgcagttcaaggaggccgccgagcggctgcaggaactcggcgtgaagatgtagcggcgccacatccggcgggggcaaatgcactcgcgttcacggcgtttgttgttctatcgtaggattgcgtggcggaggcgccgcttccgcccgcgaccgaacctgatgagccagccatggaccgtgagttcctcgccgatctgttcgctcctttcggcccggtgacgatccgccggatgttctccggcttcgggatctcggcggacggcgtcacgtttgcactggtgatccgcgatgcgatttatctacgcaccgatgcggacggtgcggcgcgattcgagggcgaaggcagccgcccgttttgttacgacacccgcaccaagacggtgacggtcggctcgtactggctgctgccggagcggctgctcgacgatccggatgaactcgctgactgggcccgaaccgcctatgccgcggccgagcgtgccgctctcgacaaggcatcaaagacgcggcgagtggcaaagaagacagccaagcctgacagcagcaaggcgtcgacgcgcaccaagccgacgggcgcccagccgaagctgaagaaggccgccaaggcggcaggtccagccaagaaggcgaagacggtcaaagccgctgcggccaaacgcagccggtccgtgcgctagccgcgcgtcaggctaccgcggcctgcgtcacgcaggagaattccgggtcgctctcgcagatcacccggttgcggccgttgcgtttggccgcgtagaggcaggaatcggcgcgctcgatcagcgcttcggcgtcgtcgtgcggcttcagcgtcgagacgccggccgacagcgtcacccggccgaggatttcgccggtcgacttcttcttcagctccttggacatcaccagccggcggatgttgtcggcgacgatgatcgcctggcgcagcggcgtgttcggcagcacgacggcgaattcctcgccgccgtagcgcgccgtgatgtcctgacccttgatgctctgcttcagcgtcaacccgaccagccgcagcacctggtcgccggtgaggtggccgtaggtgtcgttgaacgacttgaagtgatcgatgtccatcatcaatagcgacagcggctgctggctggtgcttgcggtgcggatggcttcgtgcacggcccggtcgaaatgcttgcgattgccgaggccggtgagcgggtcggtgaggctctcggcgcggatcgcatccaggctgacctggagattggcgatctcctgcttggaggtcgacagccgctcttcgagcgcgctgttggcctgctgcatgtcgcgggtggtggcgaccaggcgctcgacgatcgccttgatctgatcgtggtcggtcgccagcgacagcttctgactttcgccgcgcagatcgtcgccgaagctggcggtgctgccgagggtttcggcgagcagcgccatgatgtcgtcgatctcgctggcgacgcgcgcgccgatccggtcgatccggtcggtggtgcggccgtgcgacagatagctgtcgtgaagctggtcgaggtcggcgtcggtgaggctgccgcgctccgccagcgtgtcgttgatcgccttgttcagttccggattgtagccggtggcgtagacgtaccagatctcgtaattgcgcggcaccgcgccgtggcggaggttcttgatctgggagagggccacctcggcataggccatggtgcggtcatggtcgtcctgcagcgcggccaccagccagcctccggtcgggcgttctcaacgcgtgtttgaaacggtgtaaggctacggcgcgggtggtgaagacctcgtaaacaccgccaatcgcccatcagccccgcgcgcgcaccgggcgcaacagaaacgccggcaaatgcgaatgatccccttcttccgaggaggggtcgcgggcggggggggcggagccgaaagatgcgtgggctgtcgggctcgtgggcggctggctcgtgggcggctgggcgctgcgcggctcgcggcgcggcttgcgctcgcgcggttcccgcggctcgcgatggcggccctccggcgcggcgcggcgcgagcgcgacggacgctcggcctcggtctccgcggcggcgtcggtgtcgacgccggggccgacctcggcgcgggcaatgctctggccgatcagcttctcgaccgccgcgatcgacttctggtcggacggcgccacgatggtcaccgcggtaccggcacggccggcccggccggtgcggccgatgcggtgcacgtaatcgtcgggatgatgcggcacgtcgaaattgaagacgtggctgacctcgggaatatcgaggccgcgcgcggcgacgtcggaggcgaccaggatcggcagatcgcccttgcggaacgcttccagcgcggccatccgtgcggtctggtccatgtcgccgtgcagcgcgccgacgctgaagccgtggcgctgcagcgacttcgccagcagcgcgacctcgcgcttgcggttgcagaagatgatcgcgttcttcaggtcggtggcggcgcggatcagccggcgcagcgtctcgcgcttctcgtgcggctcgcggccgcacggcacctgagactgcgtcaccgtcaccgcggtggaggccggcttgctgacctcgatcttttccggattgtgcaggaaggtctcggtgatgcgccggatttcggtcggcatcgtcgcggtgaagaacagggtctgccgggtgaacggcaccagcttgcagatccgttcgatgtcggggatgaagcccatgtcgagcatgcggtcggcttcgtcgatgatcagcatctcgacaccggtgagcagcaggccgccacgttcggtgtggtcgagcagccggcccggggtggcgatcagcacgtcgacgccgcgggtcagtttgaggtcctgatcgccgaacgacacgccgccgatcagcagggcgacgttgagcttctggccggcgccgtatttgtcgaactgctccttgacctgggcggcgagttcgcgggtcggctccaggatcagcgtgcgcggcatccgggcgcgggcgcggcccttttccagcagcgtcagcatcggcagcacgaatgcggcggtcttgccggtgccggtctgggcgatgccgaggacgtccctgcgggcgaggacgtgggggatcgcctgctgttgaatgggagtgggcgaaacgtaaccggcggcggcgacggcggcttggactttctcggaaagtcccagattggaaaaagacatcgagcctctgttgtcggggcgcggcctgatcctaacaccttcggccggaactctgggtcacgccactaaatcgaaccgccgcatggattcttcggaaatcactgtcgcgctcaaccccggagcggctagcaatcgtgcacggggaagtcggatcgcggacaggcggctcaatcagggcatcacttggacgcaataccgggccgcatcacggccggaacatagtccggaatcgcgcaaagtcaatgcgccggcgcatgaaacggctgaaaaagcttaatgtttttgcgtctcggggccccggtctgggcggcagcggcgcagcgtttcggtgggtgattccccgaacgcctcccggtagtcctgggcgaaccggctcggattggcaaagccgcagcgcagcgcgacgccgaccagcgtggacgcggcgccggtctcgagcagttccttggcgtggttgagtttggcgcgcttgatgtaggccgaaggcgagtagccgcgatgcttgaggaaggcgcgggtgagggtcgagatgctgacgccggcgatccgcgcgacgtcctcgacgctgatgtcctggtcgcggtggctctcgacgtagtgctccgccgtctgcacgtagcgcggcacgtcgtcgttcgccgcgttggcgttctccagcaggtggccgagattgtgccggctgcaatacagcagcgcggtgatgcaggattgctccagatggagcaacacgttcttcggccacaccgagtagccggagtccagccgcgcggcgagcagggtcgtcagctctctgaagccgagatagcgcggctcgtcgttggcgatcgccggctcgaacaggatcggctggcgcggcttgaagccgagcagcgacgagaccgtccgctccagcacccgctgcggcatccgcagcagcaattgccgcgagttctggccgaattcgagctgtgcgctcacgcccggcgagcaaatacaagcttcgccttgcgacagttcgacgcggcgatcaccgctgacgagtagcgcgtcgccttccaggcaaagatgcaccagagcgatctcgcgctccgggatcagcagccgggtcgctccggagctgtggaggaaatacaagccgatatgcggcagctcggcgaggttggtccgcatgaagaagtcgctgggactcaaggcgatcatctcgacgccgtagcggcgcaggatgtctctcgcttcatccggatcgtggctccgcaccagcggaaaatcctgaagtaactcctgacccgaatatgaaacgatgtcttccgaactcatctgacgctcacgctgactccagtggatggtcgcgctatttcgactcttgcgacggctttgtcgacccgtctcccggttttgtcctaactgacagaatttgtacttactcgcgcttagctgcccgctgatacagacgatgatcgatgttgtgtgttcggggcaccgtcgtcggaatagcgatctgtttgatcaatttgcgcatcgcgcgaccatgtcgtgatgcggtgagtttatcggaagtccgcgccgtcgacgctaacaacattggccagtgctcgaacgttcggtgcgacggatcggcacattaagggttggggtaccttccatgcagctttccaacgtcaaattgctctacaagatcatcgcgtgtttcgttttgctcagtgtggtggtcgggttcggactgtggttcgcgacctcgaagatggaggagatcaatcgaacctacgcgtcgatgctcgacaacgaagtgcagggcatgaaagcgaacttccgcgccaacgcccggctgtacaatttcggccggctgtcgtggcggatcatcgccgagaccgatccggccgaaatgcagaagctcagccgggaaattgcggccaaccataaggaattcagcgatttcgtcgcgctggcaaaaaaggggctcccggcctatgcggcggacttcgatcgcatcggtctgatgttcgacgatctgatgaccaagaagtacccgcccctcgagaaggccacaatggccaacaacaacgaactggcgcttcgtctggtcaaggacatggcgagcgacaaccaggccgtgcgtgaggcgcaattttcgatcagcaatcggttggacaaggagctggccgagcggtcgcgttcggcgtcggacgacgtcgccggcaccgtcagattgaccgtgatgctggtcggcggcggcttcctcgccgtgctggcgctggcgttcgcaatcgtgcagttcggcgtcgcccgtccgatcggccggctggtcggcgatctgcaggcgatggcgcgcgggcaggacgtcgaggtctcgggcaccgagcgcggcgatgaaatcggccagaccgccaatgcggtcaacggcatcaagctgatgctggccgaaaaggcccggcaagaggccgcggccaaggccgatcaggaccgcatcatcgcggtccagcgcaagcaggagatggagaagctcgcgcaccagttcgaggctgcggtcggcgaggtcatccgcgcggtgtcgtccgcctcgaccgaactcgaagcgtcggcgacgacgctgacgtcgagcgcgcagcgtgcgcaggaagtcaccacgtcggtcgcggcggcttccgagcaggcgtcggcgaacgtgcagtcggtggcgtcggcgaccgaggagatggcgtcgtcggtgaccgagatcagccgccaggttcaggactccgcgcgcatcgctcacgaggcggtgacgcaggcgcagtggaccaacgagcgggtcgcggaactgtcgcaggccgcgacgcggatcggcgacgtggtcgagctgatcaacaccatcgccggccagaccaatctgctggcgctcaacgcgaccatcgaagcggcgcgtgccggcgaagcgggccgcggctttgcggtggtggcggccgaagtgaaggcgcttgccgaacagaccgcgaaggcgaccggcgagatcagtcagcacatcggcggcatccaggctgcgacccacgagtcggtggacgcgatccgcgagatcggcgccacgatttcgaagatgtcggagatcgcctcgacgatcgcatcggcggtggaagagcagggcgcggcgacgcaggagatctcccgcaacgttcagcaggcggcgcagggcacccagcaggtctctgccagcgtggtcgacgtgcagcgcggcgccaacgagaccggctcggcttcgacccaggtgctgtccgcggcgcagtcgctcgccaacgacagcaaccggctgaagatggaagtcggcaaattcctcgagaccgtccgcgccgcataggcacggcgccgttgtgatcaagctggcgccgaacgcgacgtcggtctcggtggagctgacttatcgcgacggcggcgtgtcggagatcaagacgttcaggaagtaatccgttacgtcccgacgcgcagcagccaaaaaccatcatcacgaacggaaggggcatcccgcaggatgccccattttgtgcataagcttgttaacgggaggccctcaatcaccagtccgctaaaaccagtaagtctgccgataaggagcattgcacgttagaattgtgcagtgctgtaatgcgtccgtcaagagacggagcagataatgttggagaggcttccacaaccgtatcgcctcgggctggacctcgggtccaattcgctcggctggtttgtcaccactctccaacaacgcggcgatcgtttcgaaccggtcggcctcgggcccggcggggtgcggatatttcccgatggccgcgacccgcagagcaaagcgtccaatgccgtcgaccgccggatggcgcggggcgctcgcaagcggcgcgatcgattcgtcctgcgccgcagccaactgatggatgcgctggtgaagcacggcctgatgcccgaagagaccgcggcgcgcaaagctctggccgggctcgatccctatcagttgagggccagagccctggtcgacaggctgccggcgcatcatgtcggtcgcgcgctgtttcatctcaatcagcgccgcggctttctctccaatcgcaagacggacaacaagaagaacagcgaggacggcgccatcaagcaggccgcgtcccgcctgcgcgacagcatggcgagccaaggcgcacaaaccctcggcgagttcttcgcggatcgacgtcactcggatacctacgcggaacggcagaccgcgatccgagctgaactgcagcggatcggcaaggaccatctgaccggcaatgcccgcaagaaggcgtgggcgaaggtgcgcaagcgcctattcggagatgacgtgctcgatccggccatggcaccagaaagcgtcagagcgcgtgcgatcatcaccggaacgaaggcctcctacgacttctatccgacccgcgatctgctgctccaggaatttcatgcgatctggagagcgcaggcgccacaccatgcgacgatgaccgagggggcgtgccgggagatcgagcggatcattttctatcagcgaccgttgaaggacccgatcgtcggcaagtgctcgctcgatccggcgacacgaccgttcaacgaggacccggaaggctatcgggcgccgtgggcgcatccgttggcacagcggtttcgaattctgtcggaggcgcgcaatctggagatccgcgagaccggcagaggatcgcgaaaactgaccaaggcgcagagcgatgccgtcgccctcgctctgctgggcagcaaggaggtcaagttcgacaagttgcggacgcttctgaagttgcctgcggaatccaagttcaacctcgagtcggatcgccgtgctgcgctcgacggcgacgcgactgccgcacggctgtcggacaagaacgggttcggcaaagcttggcggggatttcccttggagcgccagatcgcgatcgtcgagaagctgatgaccgtagaggtcgaggccgaactggtggactggctggagcaggaatgcggcctcggtccggaagctgccgcgcgggtggcgaacaccagcttgccggagggccactgccgtttgggtttgcgggcgatcaagaagatcgttccggtgatgcagaatgaggttggggacgacggcgtcagcggcgccggttactacgaggcagctaagcgcatcggctacgaccacgccaaacttccgaccgggggcgatctcgactatctgccgtactacggcaaatggctcgccgacgccgtggtcggcagcggtgatgcacgcgacggcaaggaacggcagttcggccaatttcccaatccgaccgttcatatcgggttggggcaactgcgtcgcctcgtcaacgagttgatccgaacctacgggcccccgacggaaatctccatcgagttcacccgcgcgttgagattgtcggaggatcaaaaggcgcaagtgcagcgcgaacagcgaaagaaccaggacaagaaccgtgcccgtgcggccgagctggagcaactcggttttccagccaatccgcgcaacctcctgaagatgcggctgtgggaggaattgaacttgcgcgatccactggatcgcaagtgcgtctacacgggcgagcagatcggcatcgagaggttgctgtcggaggaggtcgatatcgatcacatcctgccggtagcgatgacgttggatgacagcgcggccaacaagatcgtctgcatgcgctacgccaaccgccacaagcggaagcagactccgttcgaggctttcggctccagcccgcttgtccagggccgccgctatgcttgggacgatatcgcaacgcgggcggcagcgctaccgcgcaacaagcgttggcggttcgacgccgatgcgcgcgaacaattcgacaagcgcggcggctttttggcgcgacagctcaacgagaccggctggctggcgcgactggccaaggagtatctcggagctgtcacggatccgaaccggatctgggtggtccccggccgtctcactggtttgctgcgtggcaaatggggcctgaacgcgctgctaccggaccacaactacgccggcgtccaggacaaggccgaggcatttctggcgtccaccgacgacatggagttctccggcgtgaagaatcgtgccgatcaccggcaccacgccatcgacggtctggtcgccgcgctgacggatcgatcgctgctgtggaagatggcgaacgcctacgacgacgagcgcgagaaattcgtcgtcgaattgccgtggccgtcgatgcgcgacgatctcaaggcggcgctcgacaagatggtcgtgtcgcacaagccggatcacggcgtgcagggcaagctgcacgaggacagcgcctacggattgctcgaccgacccgagcctgtcgacgacgacgatcgtgaacccgcgaatctcgtctaccgcaaagcggtggagacgttgaacgagaacgagatcggccgtatccgggatcggcggctgcgcgacattgtccgcgatcacgtcgatgccgcgaaacggaacggtgtcgctctcgcagacgcgctgcggcagttgacggagccgtccgacaatccgcatttcaggcacgggctgcgccatgtgcggcttctcaagaaagagaagacggactatctcgtgcccgtcgtcgatcgagccaccggtcggccctacaaagcctacagcgccggcgagaatttctgcgtcgaggtgttcgagaccgccgatggcaaatggagcggcgaagcggtccggcggttcgatgccaacaggtccaactgcgggccgaagacgccgcatgtgccgaggtggcgcaccgagagcgcgggagcgcgattggtgatgcgcatccacaagggcgatttgatacggctcgaacacgaaggccggaccaggatcatggtggtacaccggctcgacgcggcagccggccggttcaagttggccgcgcacaacgagaccggcaatctcgacaaacgccatgcgacggacaacgacatcgatcctttccgttggttgatggcgtcctacggtacgctgaagaagatggcggccgtgccggttcgagtcgacgagctcggacgggtctggcgtatcgacccgcgttaactacgtcacgatacacgcgttgcgtgtgtggtggtcgagtcccatgctcttgctctggtgcgtgtgcaggaccagcaggagaagatggcgatggtcggccgagtggttgaagtggcgaccgatggacggcacctcgcggtcagtcgcggtttcatgaccatcgctgaaaacggggcggaactcgcgcgggtgccgctcgacgatcttgccgcagtcgtcgccaacgcgcacggcctgacgtactccaacaatctcctcgtgacactcgctgctcgtggagtgccgatggtactgtgcggagccaatcatcggcccgctgcggtggtctggccggtggatggccaccacgcgcaatccggaaggatgagcgatcaggccagagcgtcggcaccgctgaagaagcggctgtggcagcagatcgtgcaagcgaagatccttgctcagggggcgacgctcgatgcggtcggtgccgaagccggcggctttcgcttgctggcccggaaggttcgcgccggcgatccggacaatgtcgaagcagaggccgcgcggcgctattggccgttgctgctgggacgcgaattccgtcgcgatcaggagggcgaaggcctcaatgcgctgttgaactacggctatgcgatcctgcgggccgccacggcgcgcgccgtgatggcggccggccttcatccgagcctcggcctgatgcattccaatcgcgggaacccgatggttctggtggacgacttgatggagccgtttcggccgctcgtcgatcgcgaagtatatcggctgaaggagagtggtgtcgtcgagctgaccagcgaagccaaggccgcgctggctcgcacgatggtggtcgacctgccggtcgacgacggcctcagtccgatgatgacctgcctcgaacgtctcgcaacgtcgcttgccaaggcttgcgccggcgagacggatcgcctgatcctgccgaaacccggcctgccgctcggcttttgaaatggcgaccgccgaacaccaggcgccgcccgcgctgtcaggttatcgaatcatgtggctgttggtgctgttcgatcttccggtggggaccaagaagcagcgcaagagcgcgaccggatttcgcacaaagctgctcgatctcggcttcgaaatgtctcagttttctgtttatctgcgcttctgcgccggcaaggagcaggctgaagcctatgcccgaaaggtcgagcaggcgatgccgtcgtccgggaagatccacatcatcggcatcaccgacaagcaatatgagaacatccgaacctatcgcggaagaaatcgcgaacagagcccgaaaaatccggatcaatacgcgctcttctagcccgtcaggtgcgattcgggacctcgtcgatcagaaattctccagtatttgcaagcggatggttcggtaggcagtttagcggactggtgattgagggccaaccgaaacgaagcgctcggtttcgtgaagacggctgtaagtttagcggactggtgattgagggccaaccgaaaccatcgactacaacgccggcacctacatctaagtttagcggactggtgattgagggccaaccgaaacgaatgtcgcttgctccctgattgtgttgtcagtttagcggactggtgatttagggccaaccgaaacaatataccaacattccgcgtcgaaagcatcagtttagcggactggtgattgagggccaaccgaaactcatagactgatttatcgacgccgcgtcgcagtttagcggactggtgattgagggccaaccgaaacgccggatttcttcaagctggcgcccggcgcagtttagcggactggtgattgagggccaaccgaaactgatgtcatcgccgcacctcgtccgtggcaagtttagcggactggtgattgagggccaaccgaaacttgaaaccggaagaatacaaaactggtgatagtttagcggactggtgattgagggccaaccgaaacggtgaaggcggacggcgagacctgggtgtgagtttagcggactggtgattgagggccaaccgaaacagcggggaggggcgggagatggcggacaagagtttagcggactggtgattgagggccaaccgaaaccacgtagtcacgaccatcattcgccatcggagtttagcggactggtgattgagggccaaccgaaacaggccttgatacgacgtctcgcccgacgagagtttagcggactggtgattgagggccaaccgaaacggcaatgatccgggcgtcggtgtcgagcagagtttagcggactggtgattgagggccaaccgaaacaatttcgacgccggtcaccttgccgccgacagtttagcggactggtgattgagggccaaccgaaacgtggcgccgtgtcgccttccctgatcttcgagtttagcggactggtgattgagggccaaccgaaactgcggccggcgccgtagcgtcgggctcgatagtttagcggactggtgattgagggccaaccgaaacccgcggcggccatggccgcggcgcgcggatagtttagcggactggtgattgagggccaaccgaaaccacggtggcgtcggcgccgctgcggccgagagtttagcggactggtgattgagggccaaccgaaacagaagcgggccgagcgcggcgcggtccgtgagtttagcggactggtgattgagggccaaccgaaactcacgcaacgtcacggtgcgcttatccaggagtttagcggactggtgattgagggccaaccgaaaccatcgtgtcggccttgatgccgaagccgtcagtttagcggactggtgattgagggccaaccgaaacaaaaagcagccgacgcaaacctgaggatgcagtttagcggactggtgattgagggccaaccgaaacgcgagccgaaagctcgaccatccagccgcgagtttagcggactggtgattgagggccaaccgaaacgtattgcggtcgaacaggatcggctgcggaagtttagcggactggtgattgagggccaaccgaaacggcgagcgcggacggattggcgcgcagcacagtttagcggactggtgattgagggccaaccgaaacgaccgcctcgatgcatgggcgctgatcggagtttagcggactggtgattgagggccaaccgaaacagcgcggtgaggcacagcggcttcggaaacagtttagcggactggtgattgagggccaaccgaaactccgcagggctcggcggaattcgccgcgtgagtttagcggactggtgattgagggccaaccgaaacaaggcgatggccgaggcgcagaaggcactgagtttagcggactggtgattgagggccaaccgaaaccttcttggcggccagcaccgcgtcgaagtaagtttagcggactggtgattgagggccaaccgaaacgaatcaagtatggaatccttctgcattcccagtttagcggactggtgattgagggccaaccgaaacgcagagcttccgcacgaattcgagcatttgagtttagcggactggtgattgagggccaagccggatcgtagccgcgcccgacgtccttttcggttgaaccgtgctcgggttctgaccgactatggcgcaggcggccgcgatccggccgctgcgttttgagggactggaatgcgaccgatcgaaaggccctgcacgcggcacggagctgtattgttcgcggctgtcgcctgcatgctggcgctgctggtcgccggtccggcatgggctgcgaagcgcgtcgcgctggtgatcgggaacgatgattatcgcaacgtgccgaggctgcagaaggcggtcaacgacgcgcgcacgatcggcgatgcgctgaagaggctcggcttccaggtgatggtggcggagaaccagacccgcgccgccttcagccagagcctgctggctttcgacaccacgatcgagcccggcgacaccgcgttcttcttctatgccggccatggcttcgaaatcgccggacagaactacctgctgccgaccgacgtgccggccgccaccgagggccaggaggaactggtgcgcgacgcctcgatcatggcggaccgcatcgtcgaccggctgcagaaccgcggcgcccgcaccgcgatcctggtgctcgacgcctgccgcaacaatccgttcgaacgccgcggcgtgcgcgcgttggccgggcgcggcgggctggcgccgatgaccacgctgccggaaggcgtgttctcgatcttctcggccggcccgcggcagaccgcgctcgaccggctgtcggacagcgacagcaatccgaactcggtgttcacccgggtgttcgtcaagcagttgctcgatcccggcgagaacctggtgcaggtggcgcagcgcacccgccgcgccgtcagcgagttggccgatcagatcggccacaagcaggtgccggtgtatttcgaccagatggtcgacgacgtgttcctgaacgggcggcggcagccgggcacggccgccgccggcgctgccgagccgccgcagaaggtcgccgcgctgccgccggtggcgcctctgaagccgccgaccgcggaggcgctgaatgcgccgatcgccagcttctcccggcacaatggcggctggacggtgtcgttctcgatcgccgatccgacgctcgggatctcgtggcggatcggcgacggcgaattccgcgagaccggattcatcgatgcgctcgatccgcgcacccgcaagcggatgccgaacccgtcgatccagcttcccgccgacgcgccggccggcatcatcgagctgcgctacatcgatgcccagggcgagatgcaggggccgtttccgatcaagttcgagccggaggcggcgctgctgcgcgaccagcgcaagatcctcgacatgaccgcgacgagctggctgtcgttccgcgagttcaacggcctcttggtctactacacgcatctgatgtcgtatcgctgcgcgatccgcgaggcgcggatcggcatcgacagcgcggtgcccgacaaggtgctgaagatgccgccgtgcgacatgcgcgacccggtggcgatcccgagcagcgcacagccgtatctgaagctggcgcccggggtgaaatcagtgtcagtcgagctgacctatcgcgacggcagcgtgtcggagatcaagacgttcaggaagtagctgcgacgttgtcgcggccgttctcgtctcaggagagcaggctccagaatccggtcttgcggccgtgctccacgcgcaggcgagttttgtaggtgatgtggctgtcgaagccgccgaagtcggagatcgcgccggacaggctctcgcattccaacagatgccgcgcggcatggcggtagcgggctgagcggccctggaccaaagtgaagtcgatcatcgcccgcagcgccagcgttgcggcgagcggatacttgccggcgagcgcatcggcggccggggagagaagttcgtagtgattgccgtcgagttctttggcacgccgggtcaccagtcgggcggcgcgatccagcgcgggccacgccaccagaaaggccagagccggcagcaaatgatcgaaccgctcgacatggtccagcgcgcgtcgttcggcttcgacgtcgtcgaaatccggcaggcgtttgagatgagcgcgcagatggtcgacgctcaggaacctctcgaaacacgaccaccgcgcggtctgcgcttggtcgtgccggcccagcgcgtcgaggacttcgatccgcgcgtcctcccaatcgaaattgggaaatctggatgaatgtgacttggcatcgttcacaatctgcagcgcctcgtcggcgcgaccggccgccagcaggcgccgtgcgagctccgcggcgatgccgggactcttccgcgcttcgatgctgtactgggcaatgtaggagtcgacgtcgccctggacgtcggcgatggttcggaggctcgcggcgatcatccgttcacggcgggaggacatgatctgatcgaggtagatcgggccccgtgatcccaagccgatcaccgtccggtcctcgtcggcaggcacttgcacaggctgtttggacagctcgatgagccgttgtttcagatggtcgagaccggcgctcccgagcaccgggccaagcgactcgatcagatcctcctccatgctgtaggggctctgttcgagtgccttgaaagctcgttcggccaaggcaatcggatcgcactgtgcggcttgtgcgagcggcccgagatcgcggatcgcatcgacgaagatcgggaacaggcgtccgttgctgtcgtcgctgcgctgcaagacatcgtcggccatgtcgaccaactgccacatcagatcctgtgccgccgcgggatcattggcggcgacatggtcgacaatcgtgcgacgttgcgtctccaggtccgcggcgagctccttgactttgggcccttccagcaggctttgcgcgcgggcgatctggcccagcctcttgccgatttcgccggcgaccgccttcggcgaggtgagggccgtgatctccagcttgagccgccgttttgccggagcgtcgttggcggtgatctccaacagcagttcggccagacgtggcgcgccgagcgcttccagttggcgagccgtcaacgtcgatttcggggccatggtcgacgcttccggcggctacgaccgtcgcgaaacgaagatcagcagcagcccgccgaacgcggtcgaggcgccgtaccacatccactgcgactggttgatcatgaagctctgggccggccactggatcaggccggcgccctggccggtccagaccagaccgaccagcagggcgatgacaccgatgatgagaaacagtgtgcgcataagacaattaggcaccttttcgcgcggccgttcaagggcggcgaaggtcggacggcgctagccgccgagcgagcgactgatccgggtgacgatagcgtcccatttgcgcttctcggcggccggatagttgatcagcacgcagttcatcacggcacggccgcggttgcagcggttgtaccagatgcggccgttgcggatgctcgacaccgcgaagaaccgcggcgtgacgcggcgatagatgattccggacggcggattgcggcgcgccaggaacgcggccggggaggcgccgtcgggattgggcaccgcctggacggtgagatcggcgcggccgtcggccgagacgaatcgccggcccgggccgtcctgcgccggtccgccgtcctcgctgaagatcgcacgcggcacgtcggcggccgccgaacccgcggcgacgttgtagcgctgccagtcgagcgcgcccggctgggcgtaacccaggccggggatcaggactatagcggcggcgattagaagcgcgtgtcgtgtcatcagcggtctccgacaatcgttgcaaacgccaccgcgacggcaaggttgcgaaggcaaaaggtcaggcagcctgccgcagcttcgccaaccgctcaagccgagcggtacgaatggccttgagccttgccgttcgccgtgttgagattgtcgataatcacaaaaaatgagaagaaacgaacatgcctccggtctcgcatccaggccgactgctaaaacgcgagcttgccgcacgtaagctcggcgccagtcagctcgcactccacatcggcgtgccgtcgaggcgcatcaccgacattctcaacggtcggcggtcgatgactgcggatactgcggtgcggctgggccgttatttcggaaacgctccgcagttctggctcgatctgcagagccagtacgacatcgccgtcatcgagcgtcataaggcgcggagatcgaccggcaggtgcggccggcggacgccgcctgaccgatcgagtcctcacacgtccagcatctcttcgctggcgaactcggctttctccgagatgaaggcgaagcgggcttcggccttggtgcccatcagccgttcgaccgaattggcggtgccgtcgcggtcgtcggcgagcaacacgacgcgcagcagggtgcgcttggccgggtccatcgtggtttccttgagctgcgccggcatcatctcgccgaggcctttgaagcggccgacatcgaccttggcgttggcgttgaactccttcttcagcagctcttccttgtgggcgtcgtcgcgggcgtacaccgtcttggcgccgtgggtcagccggtacagcggcggcaccgcgagatacaggtggccctcgtcgatcagcttcggcatttgccggtagaagaaggtgatcagcagcgaggcgatgtgggcgccgtcgacgtcggcgtcggtcatgatgatgatgcgcgaatagcgcagatcttcctcgcggtagttcaccccggtgccggcgccgagcgcctggatcaggtcggacagctgggcgttcgccaccactttgtccttgccggcggaggcgacgttgaggatcttgccgcgcaggggaagcacggcctgggtcgagcggtcgcgcgcctgcttggcgctgccgccggccgagtcgccctcgacgatgaacagttcggagccttcggccgcggtcgaggtgcagtcggcgagcttgccgggcagccgcagcttcttgaccgcggtcttgcgcgagatttccttttcctggcggcggcgcagccgctcctcggcgcgctcgacgacgaaatcaagcagcttgttggcctgcaccggattgccggacagccagtggtcgaacgggtccttgatcgcctgttcgacgatcttctgcgcctcggcggtggcgaggcggtccttggtctggccctggaattccggctcgcgcacgaacaccgacagcatcaccgcggcgccgaccatgacgtcttcggaggtgatcgaggacgcgcgtttgccctggccggcacgctcggcgtggtccttcaggccgcggagcagggcgctgcgcaggccggactcgtgggtgccgccgtcgggcgtcggcacggtgttgcagtaggacgacaggaagccgtcggcatcggccgtccaggccaccgcccattcgcaggcgccatgggcaccgttgcggccggatttgccggcgaaaatgtcggggtgcaccagggtgtcgttgtggatcgccgcgccgaggaagtccttcaggccgccgggaaaatgaaattcatcctcggccggaacgtcctcgatgcccttcagcagctccggatcgcacttccagcggatcttcacgccgccgaacagatacgccttcgaccgcgccatcttgaacaggcgctgcggcttgaacgccgccttggcaccgaagatgtcggtgtcgggcttgaaccggacgcgggtgccgcggcggttgttgaccttgccgaggctctcgagcttgcccttggggtggccgcgctcgaacgtcatccggtaaagctgctggttgcgcgcaacttcgacctcaagacgcgacgacaacgcattgacgacgctgacgccgacgccgtgcaggccgcccgaggtctcgtacaccttgctgtcgaacttgccgccggcgtgcagcgtgcacatgatcacttcgagcgccgacttcttcggaaatttcggatgcggatcaaccggaatgccgcgtccgttgtcggagacggtgaggaagccgtcggccgacagctcgacctcgatgaaagtggcgtggccggccagcgcctcgtccatcgagttgtcgatcacctcggcgaacaggtggtgcagcgccttctcgtcggtgccgccgatatacatgccgggccggcgccggaccggctccagcccctccagcacctcgatgtcggcagcggtatagccgtcctcggcgccgcccggcttggcggccgccttggccgcggccggcttcggcgcggccccgaacaggtcggtcgacggtttcgatttcgaactagccttcagtgccttggccatgaatcctgcagtctggtctgagatcttgcgggcgcgacgcgccgtgcgaatcattgtggctgactatgccatggaaggtttgc

SEQ ID NO: 4508 - DNA, 23249 bp, synthetic construct
  source 1..23249: mol_type = other DNA
  misc_feature 1..23249: note = Synthetic
aggaggtcgatcagcaggttgagaaggacatagagaatggccatggcgagcacgaagccctgcaccggcgcgtaatccgaggcgatcagcgcctcgaccgcataggagccgatgcccggccaggcgaagactttctcgaccaggacattggcgccgagcaggaaggaaaacaccatgccgagggtggtgaccaccggcagcatggcattccggaaggcataggcgacgacgaccttatagggcgacagcccgctcgcccgggccgtgcgcacgaattccgacgacaggacggagagcatggaggcgcgggtgatgcgggtgatcggggccagggcgaaaatccccagcgtcgccgccggcaccgccagttgcgccagggcggcgaggaaagtctcgccgtcgccgaccagcagcgtgtcgatcagcaggaagccggtgatcggatcgggcgccacggcgaagacgtcgagccggccgagcggcgccggcgcccagccgagctggtagtagaagacatatacgagcagcagcccggtgaagaacaccggcagcgagacgccggcggtggcgacgatgcggcacaggtgatcgacccacgagccctggcgcaccgccgccaggatgcccagcggcaccgcgatggcgatggcgacgaaaagcccgagcagggtcagttcggccgaggccggcaggcgttcgacaatatccttcaccaccggctggccggtggtgagcgacatgccgagatcgccggagaccagcccgccgacgtaatcgacgaattgctccggcaggctcttgtccaggccgagcttgacccggatttcctcgatcgcctcggccgaggcggcgggcccggcgaaataggcggcggtatcgcccggcagcacgcgggtgagcaggaaggtgacgatgatcacgccgatcaggctggggatcgccgtcgccagccgcttgaggaaggaggtcagcatggccgttccctccccttacgccttggtcagggcgcgatagtcgaggcggcggtggaaccagtactggtacccgccgatattcggctgcatcgcgacgttgacatagggctggtagagcggaatgcgcggcacgtcggtgaaggcgaggtcgacgaaacccttcacgtccgtctcgtaggtcgcggcatcgccggtggcggcggcgttgcgggcgccgtcgatcagggcatccatcgccgccgacttgtaacccatggtgttgaagacggaattctgcccgtggtagcaccagaagaagaaatattccgggtagtccagccagcccgagaagacgttggtatagagcggcatttccttcttgttcagctcggtgcgccagttggcacccgggatcttgttgatcgtcgccttgatgcccagctgggccaggctttcctgcaacaggatgcacaggggctcgttcacgccggcaaagccgaggtcgaaggaaatcgtggtctcgaagccgttctcgtaaccggcctcggccagcagcgccttggccttggccatgtcggtgttgaacttgtggggttgcggccaggcgacctcggtcgcggcatccgccggcgccccgaacatgggcttggccaggccgaacatcaccgcgtcgatgatcttctggtagggaatggcataggcgatcgcctggcggaccttcgggttgtcgaagggcggcttgttcacattcatgccgatatactggatgccgttgctatagggcgtggagaccagcttcagcttgccggccgacttcatctcggcgaaatccttggacggcaggtcgtaggacaggtcggcatcgccccgctcgagcagcgcgcggcggttgccggcggagggcaccatgcgccagatcacccggcgcagcgccggcagcggcccgcccttccagttctcgttgcgctccagcacgacctcggtccccgcggtccatttgatcaccttgaaggcgccgctgcccgccgtgttctgcttggtgtactcgaggccccaggggtcggcctctgtcgcgttcttcttcaccagttgggaattcaggatgcccggcacgatgaccgcgagatcgggcacggtcagccggtccttgcgcaggaaatcgacccggaaggtatggtcgtcgacggcgacgaactgttccggcttttcgagcgagcccgccttcatctggaaggtcgggaagccgccgacgctgaccgcccggtccagcgaccatttcacatccgcggccgtgaccggcgtgccgtcctggaacaccgcatccttgcgcagcttgaaggtcgccgacatgtcgccgaccgtcatgtcctcggccagctcgggcttgaacttgtcgcggtcgtaatagggaacgacgcccgggccctccttcatctcgtggccgatcaggcggtcgtagcaattccagctgacctcgtagccgggcacattggtgccgacaccctggatgtcgagattgttcgggccgctttccgagacgacgagcagggtttccttccgggcgtcggcgcgggcgggcgacaggatcgccggggcggccaccccggtgccggccaccacggcggcggttgacgcagtcttcaggaagtcgcggcggttcatggtttgccccctctggcattcgatctctgcctgggactccatcaagtcttgtgccaattccctgaacacggccccggaatttttcaatcaattgattattaaggataaaattcggcaccagggacagattccagcgctcggcatgctgcaatgcggcggttgattgattgataaataggcatcatgtgcaaagtgtatacattttaccctgcctagaaagaggtcgccgtccccccgcttcccagccgcgggcaaggcccttgccagcgatcggataggaacatatagtgaacatatgagccccgccccaccctttcacgcgcccggcggcgcaacgccttcctgtccgcgggacgccctgcgccggcagatcgcccggatcgagcgggccgcccccggcggggcgccgccgcccgtcttcgcgcccttcggcatcgccgcgctggacgatgccctgggcggcggtctggtcgccggggcgctgcatgaattcgccgggccggccggggccgggctcggccttcgcctggcgggggaacggggtgccttggtctgggccggcccggccgaggttttccgcgaccagggcctgccctatggccccggccttgccggcctcggcctcgacagccgtcgcctgctgctggtcgcgacccgcaatgcgaccgatgccctgtgggcggcggaggaagccttgcgctgcccgagcgtcgccgccgtggtggcggaactgccgggcgatggcccggtggccgacctgaccgccacccgccgcctgtcgctcgccgcgcgggaggggggcggcctcggccttctcgtccgccaccgcgccttcgccggtacctccgccgccgcgacccgctggaccgtggcgcccgtgccggggccgctggacggctggggcggcctcggggcggcggccttcgatctcgaccttacccgcaaccgccgcggccccgtcggccgctggtccctggcttggaggcgtgatgagcggtgtttcaccctcgcggcgccatctctcgatctggctgccgttcctgcccaccgaccgcatccgccgcgaccgggggctgtcctcccgcttcgccgcgccgggtgacggcccggcgctggtcaccgtcggcaagcgcggcagcgcgctgcggctgagcgccgccgatgccgccgcccgcgccctcggcctggcgccagggctggcgctggccgatgcccaggccatgtatcccgccctcgacatcgtgcccgaggatgcggcggccgatcgcaccctgctggaatggctggccgagggcatggaagcctggacgcccctcgtcgccctggatcccccggacggcctgctgctggacatcaccggctgcgcccatctcttcgacggcgaggtggcgatggccgccgccatccgccggcagttgaacgcgcgcggcatccatgcccgcatcgccgtggcgggcacggtcggctgcgcctcggcgctggcccgccacggggccgaggtggcggcggcccgggggcgggaacgcgccctgctcgcccccctgcccctggccgccctccgcctcgacgacaaccgtatccggggcctggaggaagccgggctcgaaaccgtggccgacctgctgtcgcgcccgcgagcgccgctggccgcccgctacggcgctgtcctgctgcatcgcctggaccaagccctcggccttgtcgacgagccgatctcgccccgccgcccggtgcccgaatatctggtcgaacgccggctgctggagccgatcggcctggaaagccatatcctcgccgcgcttgcggccctgggcgatcttctcggcgggcagttggagacggcgggcctcggcgccgcccggatcgaggccagcctgttccgggtcgacggcaaggtggagcggctgacggtcggggccagccggccgctggtgcggggggacgagatgcgccgcctgttcgccgaccggctggccgccctgaaggatggcgtcgaagccggtttcggcttcgaactgatccgccttgccgccgtcgagaccgcccgccgcccgccccgccagccgggcttcgacggcgccgccgccctcgacgcggaacaggccttcgccggcctcgtcgatcacctgacggcccggctcggcgccgcgcaggtgcgccgcctcgccccccgggacagccatgtgccggaacgggccatggccctggccggggcgggcgaccggccgccgcccgcgccggccccggcgcaggacagccaaatccccgcccgtcccttccgcctcttcgagcggccggaggcgatcgaagccctggccgaggtacccgacggcccgccccggcgctttcgctggcgcagcgcctggcaccaggtcgcccgcgccgaagggccggagcggatcgccaccgaatggtggcaggcggcggacgacggcctgcccacccgcgactatttccgcatcgagaccgaggccggcctgcggctctggctgttccgcgccgggctttacggccgcgagaccgaccgcccgtcctggcacctgcacggggtcttcctgtgagcgccgcctatgccgagcttgcggtcgccaccggttacagcttcctgcgcggcgcctcccacgccgacgaactggtgctgacggcgaaggccctcggccttgccgggatcggcgtcgccgaccgcaattcggtggcgggcgtggtccgggcccatgtcgcggcccgggaccagggtttccgcctgatcgtcggcgcccgcctggtctttcgcgacggcacgcccgatatcctggcctatccgcgcgaccgggcggcctgggcccgcctcacccgcctgctcgcccagggcaagttgcgggcacccaagggtgagtgccatctcgacctcgccgatctcgaccgctggcaggaggggctgaacctgatcctgtgcccgcccgccctgccggacgagggggtgaccgccgccgtgctgcgccgcttccggggccggatccggctcggcgccgccatgctctaccagggtgacgaccaccgccgcctcgcccggctgcgggccctggcacaggccgcccgggtgcccctgctggcgacgaacgacgtcctctatcacagtccggcgcgccgccccctggccgatgtcatgacctgcatccgcgagcatgtcaccctcgaggcggcgggccttcgcctggccgccaatgccgaacgccacctgaagccgccggccgaaatggcccgcctgttcgcccaggcgccggaagcggtggcggaaaccctggcctttctcgacgactgccgcttctcgctcgaccaattgtcctacgattatcccgacgagatcgtcgccggttacagcgatccccagtccgccctggcggccctggcggaacggggcatcgcctggcgttaccccggcggcatgccggacaggacccgccgcaccctggacaaggaactggccctgatcggccgcctgtcctatgcgccctatttcctcaccgtccacgacatcgtccgctttgcgcgggggcaaggcatcctgtgccagggtcggggctcggcggccaattccctcgtctgctatcttctcggtatcaccgaggtcaacccggaggaagtggacctcctgttcgagcgtttcgtcagtgccgagcggcaggaaccgcccgatatcgacgtcgatttcgagcacgagcgccgggaagaagtgatccaatatatctacaggcgttacggccgcgaccgcgccgcccttgccgccaccgtgatctcctatcgcgggcgcagcgcgatgcgcgaggtcggcaaggtcttcggcctttccggcgatattgccgggcggctgtccggcatgctgtggggctggagccggaagggcatcgccgacgacgaggccaggcgcgccggcctcgaccccggggaccggcggctcggcctcgccctcgatctggcgcgcgaactgaccggctttccgcgccatctgtcgcagcatgtgggcggcttcgtcatcacccggggccggctcgacgaactggtgccgatcgagaatgcggcgatggcggaccgtttcgtcgtcgaatgggacaaggacgatctcgatgccctgcgcatcctgaagatcgacgtgctggcgctcggcatgctcacctgcatccgcaaggcgctgggcctgatgcgcgaccgttacggcctgtccgggcacatgggggatattccccggaacgaggccgcggtctacgacatgctgtgcacggcggattccgtcggcctcttccaggtcgaaagccgggcgcagatgaccatgctgccgcgcctgaagccgcgcaattactacgacctcgtgatcgaggtggcgatcgtccgccccggcccgatccagggcaacatggtgcatccctacctgaagcgccggaacggggaggaggtcgtcgaatacccgggcccgaaggacggcgacccccgcgaattggagcgggtcctgaagaagacctgcggcgtgcccctgttccaggaacaggcgatgcagatcgccatggtcgccgccgaattcagcggcgacgaggccgaccggctgcgccgggccatggcgaccttccgccggaccggcaccatccacctctaccaggaccgtttcgtcggccgcatgatcgagcgcggctatcccgaggatttcgccaagggctgcttcgagcagatcaagggcttcggcgactacggctttccggaaagccatgccgccagcttcgccctgctggtctatgtctcggcctggatcaagtgccggtacccggatgtctttgccgccgccatcctgaacagccagcccatggggttctacgcccccgcccaactggtgcgcgatgccgccgaacacggggtcgagatccgccccgtcgacatcaatgcctcggtctgggacaacgggctggagcccggcggccaaggccgcctgcatccccgcttcgcggccatggccggggcgatccgggcaagccatgcgcttcgcctcggctttcgccagatcgacggcttcaaggaagaagacgcccgccggatcgaggccgggcgcggcgccggcttcgattccatccgcgacctctggctacgcaccggcctgccggtcgcggcgctggagcggctggccctggccgatggcttccgctcgctcggcctcgaccggcgcgacgcgctctgggcggtgaagggcctgcgccgggcgggcgacaaggacgacctgccgctgttccgcaccgcggccgaccccggcacggtggaacccgacgcggccctgaccccgcttaccccgggccagcaggtgatcgaggactaccaccgtctgcatctgtcgctgaaggggcacccggtcggcttcctgcgcgaccgcctgcgtgccgccggcgccgtccgcaacatcgatctcgcaagcctgaaatccggccgccgcctcaccgtctcgggcctcgtcctcgtccgccagcgcccgggcaccgccagcggcgtcatcttcatgaccctggaagacgagaccggcatcgccaatatcgtggtctggccgaagatctacgaacaattccgccccatcgtgctgggggcgcgcctcgtcaccgtcaccggccgcctgcaagccgcggaaaacgtcatccacgtcatcgccgccacgatcgacgaccgcaccccctggctcgccgaaatcgccaggggcgaccgccgcagccccgccaccgccctgcccaagggccggaattttcattgaggcgagaggcgtttattccagaaaaaaattgcccctcaacgtctctataaaatattcggcgcgatcaataattatttcgacatccttggaatcaagaacgccccctcgataatcggcaatcaatctcatttcctcggccctcttcaaagatcttccaagatccttgccgaccaggccagtcttcacgaaatgcaggctgaatgcattgattacgccagcgtgagattttccatgtttttcatgagggagaaatttggccagaacggcgcatcccgcgtcaaacatggcataataagcgcgattgcaagcgccatcccgatcaccgtgattcagcagcaagcgagcggaactgcacgcctgaacagccttatccatcaggcgcatggcatcggggccggccgtcacaggcgcacgccttccctggcgatattttcgagcagttgaggattggagtaatcctcagggcgggcccattcattcagccatatgggcaagggcgaaatattgacacccgtttcaagcaggatgtcgtaagcaatatccgacatgtccagcttcgtcgcgacaaagcgctgaggatccccgcccaggatcaccgcgacatcggcatcactatccggccgatgcgtgccccgcgcacggctgccatagacgatgacatccagtggttcatagcggtcgtgcagcaagctcgcaaagcgccgcacggcatgctcggttacggggtcgaggtcgcgcataggctctctcttaaaggtgactaaggatacttccttcccttctcacctcgcaatcaagcccgatcggcatggaaagccgcaaaacaagaagggcgacaggccgcagcctgtcgcccatttgacgcctttcggcttgttagcagagggcccaattagcaaagccgtctgcaactcagctaccctagcgccgatttttaatcggagtaagaagtaagctgatagagatttacatggaaagaaatatttctaaaaaataatatttacgaattctagatttcgaaaattttatgaggagtttttaataaaatcccccatgcaattgctctcgcaggaaaccctacattgccaaccactctcgccgacgatatgctgagaaaggctaaaaaaattcaccgaaatcggcaactaggttagctgaacaaactggaaaaggtgtcgtgccaaaaaataccccttgactcactcgtaaagtaatgagaatgaattcagggtggagtgtgagcgatcgatttggaagtgacgctcacactcctttcactctgttggaaaagagtcggcgatgtggcatatcgtcacaatataaccaaccgccccatttatggggccccatccacaataaccctaccttgttgactcggaagagtccagcgggtgctgctgtgagttaagctcacaaacaaagaaggcgacaggccgcagcctgtcgccattttttgcatgtttcagcgtgttaacgatcagaaccccagtcaccagaccgctaaacgtatcttgtgattttcctaaccgctaatcgtcagtgtatgaatttttccacttggaagtgtctctgtcaagtctcatcctgagcggcctatcgtttcaaaatcacaaccaggaagaagcgtatgcctcaggtgcgacggccctatcgtctcggtcttgaccttgggtctacctccctcggctggttcctggtctggctcgacgggcggggcaatccgaaggcgctcggccccggtggggtgcgtatcttccatgacgggcgcgaggcgaaatcgcggaagtccagtgcggtggcgcggcgggtcgcgcggggcatgcggcggcggcgggatcgctatgtccggcgccgggcggcgctgctgcaagccctggtcgattatggcctgatgccggcggatgaaggcgggcggaaggcgctggaggcgctcgatccctatgacctgcgtgtcgcgggcctggatggccccctgcctctgcatcatttcggccgggtgatctttcacctggatcagcggcgcggtttcaagtccaaccgcaaatcggaaaagggtgacggcgaggccggcctgatcaagcaggcggcaacccggctgaaagcggccatggccgaggaaaaggcccgcacgctcggcgaattcctgcatcaccgccgccttaagggggagacggtgcgcgtccgcctgaaaggcgcgggggccaaagcctccccgacccgcgacgatctggccggtggccttgatggcgatggacgggccaaggcctcctatgatttctacccgacccgcgacctgatcgaggtggagttcgacacgctgtgggcggcccaggccgcccaccaccccgaactcaccgccgccgtgcaggcggcgctggcccgcatcatcttctatcagcgcccgctgcgcagcccgccgccgggcaaatgtgccctgctgcccgcgcgcgacaaggacgacctcgaaggctaccgcgcgccccgcgcccatcccctggcccaacacttccgcgtctggcaggaggtgcgcaacctccgcatcgagatggccggcaccccccagcgccgcctgatgcccgaagagggggagttggtcggcaaggccttgcttgccgccaacagcctgtccttcgacaagatgcgtgccctgttgaaactgcccgccgaggcgcgcttcaacctcgaaagcgaaaagcgcgaccggctgaagggcgacgagacggcggaacggctggcggccaagaaaatcttcggcaaggactggcgccatttcccgcctgcgaagcaatgggcgatcgtcgaccgcctgctgaacgaggaagacgaacccaccctgatcgactggctggtgaccgaggccggcgcctcccgcagcgttgcagcagccgccgccggcaccgccctgcccgatggctatggccgcctcggcctgcgcgccttgaagatcctcgtgcccctgatggccggcggcctcagctatgacgaggcttgcgtcgaggggctgggcaaatcccattcggtcaaggaccggggcgatctgctgccccgcctgccctattacggccaatggctgcaggacgatgtggtcggcaccggcgatccctgggacacgcctgaaaagcggttcggtcgcctgcccaacccgaccgtccatatcggcctcggccaggtgcgccgcatcgtcaatgctctgatcgaccgctatggcccgccggcccaggtggtggtcgaaatgacccgcgacttcaagctctcgccccggcaattggccgaggtcgagaaggaacaggccgccaaccagcgccggaacgatgcccgccgcgagaagttggccgagctgggcgtcgccgtcaatgcccgcaacctgctgaaactgcgcctttgggaagagctttcgccgcgcgacagcattgagcgggactgcccgttcacgcccgagaaaatcgggcttcgacggctgttttccgagaacggagaggtggagatcgaacacctgatccccttctccatttctttcgacgacagtgcggcgaacaagacggtggcgctgcgccgggccaaccgggacaagggcaatcgcacgccctggcaggctttccacaacgatccgcgctacgactggccgggcatcgccgcccgcgccgcgcaattgccgaagaacaagcgctggcgcttcgcccccgatgccttggaacgtttcggcgacgaggagggcttcctcgcccgccagctgaacgagaccggctggctggcgcgcatggccaaggattacctgagcgcggtcaccccggccaatcaggtctgggtcattcccggccggctgaccgccctgctgcgggccaaatggggcctgaacggcctgctgcccaacaattacggcgacagcaagagccggctggaccaccgccatcacgcgatcgatgccctggtcgccgccctgaccagccggcgcctgctgctcctgatggccagcacctatgacgaggagcgcgaccgcatcgtcgtgcccctgcccttgcccgacctgcacgacagcctgagcgcctggcgcgaccggatgaccgtctcccacaaggcggaccacggcgcccaggctggccagcggaccggcaacgccacctcgggccggctgcacgaggaaaccgcctatggcctcgtccgcgatcccgcggccgaggacggcatgaacctcgtctaccgcaagacgttcgaggcgctgacggaggcggaactgccccggatccgcgaccgccgcctgcgcgatctggtcgccgctcattgggccgaggcgaagccaagcgggcagaagctcgccgacgccctcggcgacttcgcccgcatggtcaaggatccccatatcgccaacggcatcaggcgcgtccgtattctgaagaaggaaaaggctgaattcctggtcgccatcgccccggacggcggcgggccggcctacaaggcctatgccgccggcgacaatgccttcatcgacatcatcgagacggcggacggcaaatggatcggcgaggcgacctccgtcttcagtgccaacacgccctcgaaccagccggcctggcgccagtggccggacgcgagcttcgtcatgcgggtgttcaagggtgaccttttgcggctgaactggaagggccgggactgcatcatgatcgtccgccgcctggacgcggcggcgaatcgcttcaagctggccctgcattgcgaggcgggcagcctggacaagcgccacgacgccgaggacgaccccttcgaatggctgatggccagctattcgaccctgaaggccatgggggcgcaaaaggtccgggtggatgaactgggcacggtctggcggctggaccccgccgatgccctgaagcgcctgtaacgtcaaggggcgcgggcgatggtcgggcgcgtgatcgatatcgcgacggacggccgccacgtcgccctgaaccgcggcttcctcgtcgtctcggacgggggcgcggaagtcggccgcgtggccgtcgacggtatcgccgccctggtgaccaatgcccacggcctcaccttcaccaacaatgtcctggtcgaattgtcgcgccggggcattccggtcgtgctgtgcggcccgaaccacaggccggaagcgatcgtctggccggtcgacggccatcaccagcaatcgggccgcatggccgaccagatcgccgccagcacccccttgaagaaacgcctgtgggcacagatcgtccgggccaagatcctggcgcaaggggccacccttgccgcggtgggcgcccgccatgccgggtttcagctgctgtcgcgcaaggtccggtccggcgacccggacaatgtggaggccgaggcggcgcggcgctactggcccctgctgttcgggcccgaattccgccgcgaccgggacgatcccggcatcaacgggctgctcaactacggctatgccgtgctgcgcgccggcgtcgcccgggcggtgatggccggcgggctccaccccggcatcggcctgatgcatgccaatcgcggcaatcccatggtgctggtcgacgacttgatggaacccttccgcccggccgttgacctcgaagtctggcgcctggtgcgcgagggtgcggcaggtgtcgataccgcggccaagacggcgctggcccgggccatggtcctcgacctgccgaccgcccagggcctgagcccggtgatgacctgcgccgaacgcctcgtcgcctcgctggcccgggcgcatgccggcgagggcgaggatctcgccctgcccctgccccgcttgccgctggagggctgatgtggaccaaagcccggccctcagcgcctatcgcatcatgtggctgatcgtcctcttcgacctgcccgtgggcacgaaagccgaacgccgggccgccacccggttccgcctgggcctccaggacctcggcttcgaaatgtcgcaattctcggtctatcttcgctttgccgccggcaaggaaaaggccgaagccctgtgccgccagatcgaagccctgatgccgaagagcggcaaggtccacgtcgtccagatcaccgacaaacaatatgagatgatccgcacctaccggggaagaaaacgtgaaccaggcccgaaaaacccgaatcaacttgtcctgttctagccccgccacggcccggcccccgcctccctccagaaagaaaaaaggccctgaaatcagggccttagttcatatcgcagtttagcggtctggtgactggggtccaaccgcaacccatgggtggattacttgcccttctgaccgagtttagcggtctggtgactggggtccaaccgcaaccagcagcggcaacggcgcccagatcggcagagtttagcggtctggtgactggggtccaaccgcaacccgaagccgcccgggcctctgcgctggcgcagtttagcggtctggtgactggggtccaaccgcaacctagaccggcgcttcacgcgccaggccgggagtttagcggtctggtgactggggtccaaccgcaacataaaccgacccctcgtcaccgaccagatcagtttagcggtctggtgactggggtccaaccgcaacgaaatagatgtcggaggcattggcgagcacagtttagcggtctggtgactggggtccaaccgcaacaggccgcgcagatcgccgcgcgtggcttcaagtttagcggtctggtgactggggtccaaccgcaaccaacctgggggacgatggattggtggtagcagtttagcggtctggtgactggggtccaaccgcaacacgcaaggccgacaagctgtccgagctgaaagtttagcggtctggtgactggggtccaaccgcaaccgttacgtaactcgaagtacgctagcgggaagtttagcggtctggtgactggggtccaaccgcaacggatacggaagccctcggcggcggcgaaatagtttagcggtctggtgactggggtccaaccgcaacaacgctctcgaactgttcatttgccatgttagtttagcggtctggtgactggggtccaaccgcaaccagccgccccttttcgtcgagccccggttgagtttagcggtctggtgactggggtccaaccgcaacaaaccccaataggagtcgttgccgtcgacgagtttagcggtctggtgactggggtccaaccgcaaccgccgtaatcgccgaagcggatcacgctgcagtttagcggtctggtgactggggtccaaccgcaacaagccgcgcgatcgagaaagccaagcgcgaagtttagcggtctggtgactggggtccaaccgcaaccagccgatggtttcgtagctggcaatcaatagtttagcggtctggtgactggggtccaaccgcaacaccgccgccggcgaaacggtgggggggaagagtttagcggtctggtgactggggtccaaccgcaactagaactatcaacaatagtatttccactaaagtttagcggtctggtgactggggtccaaccgcaacacctcgggcgccatgaccctcgccgccggtagtttagcggtctggtgactggggtccaaccgcaactacctcgagcggcagggcctgatcagcgtgagtttagcggtctggtgactggggtccaaccgcaaccagcgctgcggcttggtcctgtatcagcttagtttagcggtctggtgactggggtccaaccgcaactcggcccagcaggtgctgagcgacctgcgcagtttagcggtctggtgactggggtccaaccgcaacctacgataatcggccagcagcgcgcggtggagtttagcggtctggtgactggggtccaaccgcaacgatgcacacccaggactgcccggtgccgcaagtttagcggtctggtgactggggtccaaccgcaacgtcgatggcgaccaggtcgctcctggacgcagtttagcggtctggtgactggggtccaaccgcaacggcggatcgcgcgatcgcaaagcgtgcggaagtttagcggtctggtgactggggtccaaccgcaaccggcagcgggagcggatcgccaatggcgacagtttagcggtctggtgactggggtccaaccgcaaccatggtcgcgatgtccttgcccgccagcagagtttagcggtctggtgactggggtccaaccgcaactgccgttcgtgtcgccagaaaacgatcagaagtttagcggtctggtgactggggtccaaccgcaaccttgccggtcagggcaagatcggcttccatagtttagcggtctggtgactggggtccaaccgcaaccgcccgctccagcgggtgcatccgggccccagtttagcggtctggtgactggggtccaaccgcaaccaacaggcgccgcgttctacggctccggcgagtttagcggtctggtgactggggtccaaccgcaaccgtaacgatcgcgggttccagtgcggggatagtttagcggtctggtgactggggtccaaccgcaacgagggttacactcatgtattttttcacgccagtttagcggtctggtgactggggtccaaccgcaacgaagcaagatcgcacatcggctcgccagagagtttagcggtctggtgactggggtccaaccgcaaccgagccaacctacgccgaccttgacggaatcagtttagcggtctggtgactggggtccaaccgcaacgaggccgtcgagccattcagaaaacgcggaagtttagcggtctggtgactggggtccaaccgcaacgccgagaccttcgcatcggtgaaggcctatagtttagcggtctggtgactggggtccaaccgcaacggcatcatgcagcgcggcgccctgaaggcgagtttagcggtctggtgactggggtccaaccgcaaccagggaagccgtcgtcgacctagcgcaggaagtttagcggtctggtgactggggtccaaccgcaacttcttttaagttacgtcctttagacttgaaagtttagcggtctggtgactggggtccaaccgcaaccgtactagccgccgaaacggcaatcgggctagtttagcggtctggtgactggggtccaaccgcaacggacttctggcgcgccaagcccggcaaggaagtttagcggtctggtgactggggtccaaccgcaacgctatggcgccttcgggcgccaggtcaaggagtttagcggtctggtgactggggtccaaccgcaaccgcggggccgataccatcgacgaagcgccgagtttagcggtctggtgactggggtccaaccgcaacgaagaaggccgaggcgcggcgcgacgggcgagtttagcggtctggtgactggggtccaaccgcaacaatcagtcggtcgcatcgtcgaagcccttgagtttagcggtctggtgactggggtccaaccgcaacggcggcctgatcgtggcccgatggttcgggagtttagcggtctggtgactggggtccaaccgcaacaagacgatcaccacgggcgtgaaggcagcgagtttagcggtctggtgactggggtccaaccgcaacgcgccgcttcatcgaaaacgaattcggctaagtttagcggtctggtgactggggtccaaccgcaactgaacgcttgcccacattgcctttcgtgtcagtttagcggtctggtgactggggtccaaccgcaactggcgcggattctggtcgcaaggcgacggcagtttagcggtctggtgactggggtccaaccgcaacaccgcggtcggcatcgatatcgatccgaccagtttagcggtctggtgactggggtccaaccgcaatggacgagcgcgtactgcgcaccttttgcggagtttagcggtctggtgactggggtccaaccgcaacgcctgcgcctctcttgttcaatctcgtcttagtttagcggtctggtgactggggtccaaccgcaacgctggagagcttcaaacgctacaacctgcgagtttagcggtctggtgactggggtccaaccgcaacgtgcggtagaccatacctatttcccagccgagtttagcggtctggtgactggggtccaaccgcaacaaaagcgcgcaagtatttgcttgatcatatagtttagcggtctggtgactggggtccaaccgcaactcgaagccctgcgtgaacggttgcgcgacgagtttagcggtctggtgactggggtccaaccgcaacgacagggctcgcggcgagaccgtggccatcagtttagcggtctggtgactggggtccaaccgcaacctgggctgcggcaagacgccgaccgcctgtagtttagcggtctggtgactggggtccaaccgcaactacgttgaagaacgcgagaaacccgccctcagtttagcggtctggtgactggggtccaaccgcaacatgttaatatgttagttgacgctctcccccagtttagcggtctggtgactggggtccaaccgcaactccttccactcgccgctggccttgtccttcagtttagcggtctggtgactggggtccaaccgcaaccgaggttgccgatggcgcgacctggaaatgagtttagcggtctggtgactggggtccaaccgcaacgcgtctgcaacgccgccagtgccggtctcgagtttagcggtctggtgactggggtccaaccgcaacccagcagcgactgagcgtggcgcatcgcttagtttagcggtctggtgactggggtccaaccgcaacgccacccggaaccgggcggcactggcgatgagtttagcggtctggtgactggggtccaaccgcaacgccaaggtccagtgctgcgcgaaaatcggcagtttagcggtctggtgactggggtccaaccgcaacggtcaggcaaccccggtcgtcgcggccgcaagtttagcggtctggtgactggggtccaaccgcaaccgccatgcccttcgcccgtccacgcgcgatagtttagcggtctggtgactggggtccaaccgcaactattcattgcacatgcctgcacgatagccgagtttagcggtctggtgactggggcccaaccgcaactgcgccttcgacatggcctcggcggttgccagtttagcggtctggtgactggggtccaaccgcaaccaagtccggcgctttgccgaaaagctcgagagtttagcggtctggtgactggggtccaaccgcaaccccatctgcgagcccatcacgaccacgaccagtttagcggtctggtgactggggtccaaccgcaacttgccccactttcagccgtcatgcgctttgagtttagcggtctggtgactgggtccaaccgcaacgccccaggggagcggcggcgttatagtcgcagtttagcggtctggtgaccggggtccaaccgcaatgcgagccgggacgaggtgcatcgcgagtgcagtttagcggcccagcagctgacgtccaaccgcagcgcgccgttgtggctttccgaggtcccggcggcggggggccgccggggtcggttggttcatgcggcgggggcgaggccggcggtgggcaggaagtggggcagttgggcgatgcgggcgatccaggcgcggatgaagggatagggggcgaggtcgatgccgccctcgcctgccagggcgacataggggaagacggcgcagtcggcgatggtcgggcggttggcggccagccagtcgctgcggaccagatgggcttcgagcaggcccagaatgcggtcgccggtgcggcgggcggcggcctcgtccagggccatgccgaatttgcggatcaggcgggccgtgcaggggccgtgctggatttcattggccgcggtcgacagccattggacgacctcgccctggcggcaggcatcgcccggccaccaggcttcgccgccatagcgccgggcgagatagacgaggatggcctggctgtcgcgcagcaccacgtcgccgtcgaccagcaccggcagttccccccaagggttgaggccgatcaccggctcgcgcttgtggtcgccggcaagaaaatcgacgggccggcgctccagcgggatctgcgccaggctggcgaaaagccgcactttgtagcaattgcccgagggctcgagatcatagagcaccggcgcccggccggcggcgatcgtgtcggtcatggggtctgtccttccttgtcttctctgtcttctatggcttctctggcttttccatcttcgatgagctggtcgaattcgagcacattgccgtccgggtcgcggatgaagagggcgatgcgccgggggccgatccgttccggcccctcggtgatgcggatcccctcggccgccagcaggtcctgcagccggccgaggtcgtcgacgatgaaggcgggatgggtgatgccgggcaatttcaccggctcgtcgagcaggacattgcgcgcccccgggcgcctggccccgttgaagatcaggttgatgcgcagcccgtcggccgaaaccatttcgttcgcctcatgcccctcgaaccgcaagcgctcctcgaagccgaggcggcggtagaaggcgagcgcccgttcccggtccgtgaccctgatgccgacatggtcatagccaagcagcctgaccgcagccgtgttcatgcccatgttcatgcccggtcccatccttccatggccgccggacgaactttgtcttatgctccgcttgcgatgaattcctcattcgtcagttcactatcgcggatttcgcagcaatccatcgaggcgagcatggacaagttccgcgccatggccaccttcgtgcagatcgtcgacgccggcagcctgaccgcggccgccgcggcgacgagccaatcgccgaccggcgtcgtccgcctgctggcagccctggaggcggcgctgggtgtccgcctgttgaaccgcaccacccgccgcctcgccctgaccgatgaagggcgggactatctcgcccgctgccgccggatcctggccgatgtcgaggacgccgaacatctgctgtcggcgcggcagcaccggccggccgggcgcctgtcgctcaccgcgccggtcatgttcggccggcgccatgtcgtgccggtggtcaatgaattcctggccgcccatcccgacatgcaggtgcagttgctgctgctcgaccgtgtcgtcgacctgctggaggaaggcatggacctggcgctccgcatcggcgggctggcggagtcctcgatggtcgcgctgccgctcggggcgacgcggcaggtggtggtggccagcccccgctacctcgaccgttacggccagccgcaggtcccggcggacctgggccggcaccgctgccttgccttcgatgccggcgaccggggctggagcttcgagatcgaaggcgaacggcgggtcgtgcccatcgccccggtgctcggcaccaatcaggtcgatgccgcactcgatgcctgccttcaggggctcggctgcacccggctgctgcactaccaggtcgcggagcatctggcggcgggccggctggtccgcctgctgcgcgccttcgagcggccggcggtaccgatccaccttgcctatccccaaaagcgcctgatgtcgctgcgggtccgggccttcatcgatttcgcccgcccccgcctccgcgccgcggtgcccggcgacgacggcgcgaggattgcgcctgccggccccggcgtctagattccccccgcgacaacgacgaggggaacgggaatggcggcattcctccatttcgaggatttcgacgtgggcagcgtcgcgacctatggcgaaaaacgggtggaagcggccgaaatcatcgccttcgcgcgcgaattcgatccccaggcgatccataccgatccggtggcggcggccgaatcgcccttcggcggcctcatcgcctcgggcctgcattcctgttcgatgatgatgcgcctgatgtgcgacggttacatgctgcgttccgcctccatgggctcgcccggggtggacgaggtgcgttacctgctgccggtgcgcccgggcgacgtgctgcgcgtgcgcgtcaccgtgaccgaccggcgccgctccgcctcgcggcccgagatgggcatcgtcttcgcccgccatgaattgctgaaccagcaggacgacgtggtcctggagatgaccagcaaggtgatgatgggctgtcgtgacgccggcggtgccgcatgaccgcccctacccgcatcgtcccggcccgcatcgcccctacccgcatcgactggctggaggacttcatccccggcacccgcacccatgtcggcacgatcgccttcaccgccgaggagatcgtcgccttcgcccgccagttcgatccccagagctttcacatcgacgaggacgcggcgcgccgctcgccctatggcggcctgatcgcttcgggctggcatacgatgtcgaaaatcatgaaactggtgtcgcaggcagcactcgaccggggcggcgccggcttcatcgtctcgcccgggttcgaggacctgcgctggctgaagcccagccggccgggcgacgtgctcgatgtctggaccgaggtggtatcggcgacgccctccgccagccgcccggaccggggcctggtgatccagcgcttcagtgcggtcaatgcggcgggcgaaacggtatgcagcgtgaccggcaaagtctttttcaggaagcgcgagggcagcgacaacgggggacgccatgagcggtgaatggatcgaactggaagcgaccgacggccatcgtttccaggcctggcacatccgtcccgaggacgagccgcgcgccggcctcgtcatcgccatggaaatcttcggcgtgaacggccatatccgcgatgtcgccgccggtttcgccgccgagggctatgaagtcctggcgccccagcttta

SEQ ID NO: 4509 - DNA, 23195 bp, synthetic construct
  source 1..23195: mol_type = other DNA
  misc_feature 1..23195: note = Synthetic
tgaatgtgagatctacgtttcgcgcactgatgaacctcacccctccagccccggaggtgatgatttgaaacggcccgagatcgatcgtgctggaaatatcggaggtgaattgcccggccgaaacgccggcagtccctgaggtcggcgtgatgctggtggtcagtgaattgaccagcagcgtggccgcggagggatcgaccgcaacacccgccgacacatctccagtgcaggtttgaaccgttccgccgattgagcagccggcccgggctgaatccggcgcgacgatcagacccagcagcgcaaaaacgccggcacgcagtccgaccaggacaagcgagtgtttcacaatgaactctcagaaacagtaagaaactaccggaaatatagtcgcaagccgacgcatgccgcaatctgatcttgcaccatacgcgcattgaatcctgcaggtgcaccggcgggcccccaagaaggtgtctgccgacgtgcctcgacaatcgacgagcttggacagggcgtcgcttgtctcgcgcgccaaccacaaccaagggtattcgtcaagaaagcggcctcaacgccgaccggcgccgccagcccctcaattgttcggcggcagctcacccggcgggtattgctgcttgcccgtgttgaaatccatgatcttgcgcgtcacgcccggcagcatcgccgagatcggattgatgcgcaccaccggctggctcggcgttcccacgacctcgtaggtcacgccaaacagaccctcattgctgccgccgaggaacagaccgacgatcggaatctggttgaacatgttgttcagcccatacagcggcacgatcgtgccggaggcgcggacctggttgacgttgtagtcgatgctgccttcgagggtgaggccgagcgtcggtcccttgacgacgccgtcacgaaccgagagcagcccgttctgccgtgtgaactccgcgcgcaacatcgtgaaggcgatgccttgcgaggcgccctgcaccgcgccggacgcggcgcgatcgagcgcctgctcgcccctgacggtgaaattgcgaacgatcgccagcccctccttcgggctgctgtcggccgtcggcggctccatcgcgagctccagctcgccacccgccatcttcgtataggtatcggcaaagcgcagcagcgcgccggcatcattggtcacgagatagatcacctcgcgtccctgccggcgggcgcgcggatcggagctcggcgcctcgcggccgacccgaatatccgcggtgaccggcgtatcgcgcccgaccttgccgctgagattgaagctcttgaaggcgccgccgcgcctggagagcttgacatcgacgctgcgcagcgcctcgccattgaagccggcgacggctccgagcttgacctcggcatcgaaatcgagattggaacgcgccttgttcttctcggcatccttgttggtgcccgagatcgccgatttcaggaagccgcgaccgtcgaacacgtcgccgcgcatcgacagcttcaaaacgccgtcctggccgcgctcggccttcagctgcgtcttgtcgccctccgatggcgaataggtcgggaagttggcgttcatcaggtcgccgttctggtcgacctcaagcgagcctttgatcgcgaccccgccgccttcgacgttgatgtcttcgaagcgggtcgattgctgcttggcgaccacgttgaaggtcgccttgcccgccttgcccggattcttgacccaacccggcagcagattgtcgagcttcagcttggtcagatccgcttcgacgccgagccggctatcgcgatcgggagagccggcgatcttgccgttcagcttgagcggcacgtcaccggtcacggccgtgccaagatccatgccgagccgcgcacggctggcatcgtcgagcacggcctgcatcttgatgtcggcgtcgccctcggtcggcttgcgatagtcgagcgtcgccggttggccgttgatcttgacgtcgcccttgacctgatagcccgcggtattggcgacgatcttcagcgtattggcctcgagcttctggttcatcaccagcttttcggcggcgaagccgctgaggtccgccgtgaccgtataattggtgtcggccttggtcagctcccccttgaccggcatcgcgagcgtgacattggcctggaacgtgcccttggtctggttcggatcgatcggcaccgacgagaggtcgttgagccgatcagaggcgagaatctccgctgccgcggcgacctgcccgtcgacgcgcatgcgcagacgcgacggcgacggcttcggcgccatgtccggcacttcgaacacgacgtcggagaagttcagcttgcgccccgcgggcgtgtcggccacgccctgcccgatggtcaccgtggcggtacgccccgtgacatgcgccttcatgtcggcatcgcgcaccgacggcaggccgtcgacgggatgcaccgtgacattggtcgccaagatgttgacgtccagtccgtcatccgggatcggcggtcccttgcgcggcaggttgcgggtcggcgagttcaccgcgacgtcgacgcgctgcacgttgccgcgctcgatccgttcgatgatccaggcccgcacctccggcacgatcagcgccggccagatccgcttcaacgccagtgccggcatcggcgtggcggcaaagccgagcttcagccgcggctcgccggcatattcgacgctgccggtcccggcgacaccgatctcgccgttggacacttcggcctgcgtgagcaccacgcgcttgccctcggtgtcgaagcggaagttgatcgagattcggttgaagatcagcggcgcctcgttctcgatcgcgccgagcaggatggtgccgccgctcagtccgagccgccaatcattgacggcgtcgttgggtggctcaagattggcgttcagcgtgatccggttggcgcccgagatcaccttgaacggtgcgaccagcacgcggcggccggcatcccattccatactcatctcggcggagtcgatcgccatcggataatccggcgtatcggtatcgatgatgttgccggcgccgatattgatcttgccgcgcagataggtcggcagcccgtcacgggcgagctcgcccttgatctcgccggtcagcggcaggtcggccatgtaggtcaggtccttcaggcgcagcgccagaaggatgttgctggtggagaccttgtcggccttgatgtcgatcgagcgcacgccgttggagggcggtccgaccaaaacccgcagcagccacggcttggcgccctcctcgcccaggctcagcgcgacgccgccgccggagggacggcgcaggctgaggctgatattttcgaatgtccatttgttgccgcgctgctggtcgtcgacgatcagcacgccgttcttcaagccgatctcgttgaggttctggccatcgaggccagtcaggctgaggctgtcgagccagtcgagaccggccagcaggccgctctgggcgctcgccggcaccgcggtccctgcggcagccgggttcgcgggcgcagcttgctgggtcgccgcctcgggcgcggtcggcggcgtgacgggctggcccggccgcgggaaggtcggcggcaggcctgcatcacgcttggaggcaacgccggtggcaagcggcttgctggtctcaccggtggagaccgtgaccgtgccgtccggggtgatgcggatcgcgagctcggcatcgaccagcttcaggctttcggcccggagctgacccatcaaaagggcagcgccggacagccgcacctcggccttgggcgcgctggccacgatcgcctgctcctgatcgcgaacgacaatgtcgcgaatccggaccgcgatccggatgcggccggcgcgctcgatctgcgtgccgccgacctcgaccgtattgccgtgaccgatattgtccgcgatcgccgcggcgagccaaggcgtcgcaaggtcgaggctgatcgggccggcgccgagccgcagccacaagccgccgaacccgatcgccaggatcaggaccagagcgaccagcgcaatgccgatgcgccgcgccaggccgcccttgcgcgccttgccggaccggcccgacagggcagccgagcccgaatcgtcgcgcgacagcagcctgcggacgcgttggccggcgatctcgtcatgcgctgcatccgcgtcgtgggggtgagccgtatcccaatcggcgtcatcccactgttggccctgggtgtccgcctgcagatggggccggtggggggatgtctgtcttgccattgcctctcggtgctggcccctggtgttggatgcgtaggtgacaatctggcccgagccagattggtcgccgatgttgccccgcccgttcacaggctgcgcgcttcgatcgccggcatcgccgcttccccgcccgtcccactgaaacgggcccaatcgagccgcctgctgtcgtcaattccgcgacgcggagaagacgatgcacaaactcctcgtcactataccctgccgccgtgaggtttgcccacccgctcgtgccgacgaagctgcgcttcaccatgaccggtcggaatatgtgacggggacagctgatccggagacggtacgagagtcgtcattgctttggtactcacgcgtgctggtatccgtgattttcacgtcgtcgcaagaggcgtcgccccccgcgtgcgccgaagcacggatgcaagatttcccgggacaccggacaaggaccgagacactctcatgattgagctgcggaaagcgacgaaaggaaggcgtatgtcaaaggaatcacgaaagaaatcctccaatccgggagtccgcgatgggatcgcggggaaccgggccgcaatggccgccaagaaggccgtcaaaaagaccgccaagcccgtgacgacgaagcctgccaaggcgaccaagacgacaacagccaagacgaccgtcgccaagaaggcagccaagcccgcgaccaagccctcggcgaaggcgaagcccgcatcgaccatccccgctgcaggcggaatcgtactggccgagggcgccaaggcccctgccttcaagctgccgcgcgacggcggcggaaccgtttcgctggccgactatgccggacaaaagctggtgttgttcttctatccgaaagccaatacccccggatgcaccaaggaagcgatcgacttcacccgcctgaccaaggagtttgccgccgccggcaccgcggtgctcggcgtatccgccgattcggtcaaggcgcaggacaatttccgcgacaagcacgatctggccgtgccgctgatctccgacgagacgcacgagatgctggaggcctatggcgcctggggcgagaaatccctctatggccgcaaattcctcggcatcatccggagcacggtgctgatcggcgccgacggccgcgtcgccaaagtgtggcgcaacgtcaaggtcgacggccatgccgacgccgtgctcacggcggcgcgcgagctctgagattgcaacgcatggtgttggggaaaaattaaccatgcaggggtcaaatccctcccgtaaatgacgccgctggaaacgatgagctccggccggcgcgggagtgtcgatgtcgcatcgttccggccagtacgccgaatatccccagcaccattcgcatgaccgcgggcgcgccgtgcagcagcggcgctctccggtcggtcaccctgcccccgctccggccacctcgcagagcgactacacgctggtgcatgccggccgccaggtccgaatcggcccggtcgtgttctggatcgtcgtcggcaccgtcagcctgctcggcctgtggtcggcggcgaccgccacctatttcgcattccgcgacgacgtgctgacgcgcctgatcgcccgtcaggccgagatgcaatacgcctatgaggatcggatcgcggagctgcgcgccaaggtcgatcgcgccaccagccgtcaattgctcgaccaggagcagttcgaccagaagctcgaccagatcctgaagcgccagaccgcgctcgagggccgcgccaccgcgctgggcagcattcccgatgtgaccggcgcgatccgtccgccggcgcgcggccccgcgatcgagccgtccgccgcgccggccacgccgaagccgtcgccgatcagcgataccgtgatcttcacggcgccgccagaccgtgaggcgcggctggaatcgcgcagccccgtgctggcgaacgtgcaaccgaaccaggcgaccaagctcgccggcgtcgacaatgtgctgacgcggctgacgcgctcgctcgaccaggtcgaagcgcggcagctggcaatgctgtcgtcggcggaagagacgctcgaatcgaagctgcgccggatgcgcggcgtgatcaccgatctcggcctcgacatgggccagctcgaagctgcggccccgaagggcgcgatgggcggccccttcgtgccggtgaagctcggcgccgaatccggcccgttcgagcgccagctctatcgcatcaacatcacccgcgcgcaggtcgagaagatgaaccgcacgctgtcgctggtgccctatcgcaagccggtcatcggagaggtcgagttcacctccggatttggcgtgcgctccgatccgttcctcggccggcccgcgatgcacacgggcctcgatttccgtgcagccacaggcgatccggtccgcgtcaccgccaatggaaaggtggtcaatgctggctggtcaggcggctatggccgcatggtcgaggtcgatcacggcaacggcctgtccacccgttatggccatctctccgagatcaacgtcaagatcggccagcaggtgaagatcggcgacatcatcggtgaggtcggctcgaccggccgctcgaccggcccgcatctgcactacgaaacgcgcatcgacggcgaggcggtcgacccgcagaaattcctgcgcgccggcgtgcggctcagcgccggttgacgcggccatctgccgacaccgcttctcccaagtttcgccaatcttgcaagccgcgtgatcgcgggtagcatcgcattatcgcttggccggcagcaggaacacctgacccggatagatcaggtcgggactgcggatctgctcgcgattggccttgtagatcacggcgtagcgcgtcccaccgccgagcaggcgccggctgatgtgccacaggctgtcgccgcgggcgacggtgacggtgatcatcttcggctcacctccgccggcatgagcgaccgtgtcctgggaaccacccgcggctgcgagcgctgtgcgctgagctgccggactgccgttcgccttgcctgcagctcccgcggctgatggcagcgaggcggtcgtcgagtcctccggcagacttaacggcacctcggcccgggcctgaaccgatcccgacttcggatccacctcgtcgagccggatccggtcgttgctggcgcgcgccacgtccttgccgatggtgatgttcaaacgtccatcggcggctgcggtcgccgaggagatcaggcgatcattcaggtaaagtctcacggtcgcccccggccgcgcgcggccgctgacgcggaggatgccgctcggctcgacgtcgaccgcgtccaccgcgagcgcctgcgggatcgatcccgaaggcttcgagagaacgcgggtcggttcgccgggcgcgagcagggccacggtcgccggctgtcggccagcctcgacgatgacggcaacgctctgtttcgaggacagctctcgcccatccgcgagcttcgcccgcaaggtcagatcgtaggtccccgcagggagccgccgtggaaccatggcaaactgcccggaacgatccgcaacggtgcgatcgtggacctcgccattgcgcagcagttccacggcggccccaggcgtcgcccggcccgcgacgacggcgtcacccgatgggtcgacattgaccacgtcaaacgccggcaaatcgctatcggcactcggctgaggaacgagcgggctcagcacgtctgcgagaccacccgcctgctgctgcatcttggcgagcgggcttgcagcgcgatcctggtcctgagcgccaggagtttgcacggcgaccccgcccgatccggactgggccggcgcccctgcgcccgctgccgtcttctccctggcggagggcggaaaatcaaaattgatggctgggtcgaacacgaagatcagcgcgaccgccgtcacggcgacggccaccacgccgaggacgatgcggatcaccgctttgccgctgacgatcatgcgtcgctccatccctggtcgatttcgctcgtgcttgcgccgagccattacgagccccctctatacaccatcgcggccaagccggcacgattccgcaaaactccggaccgccgcgcccgatgtgagccgccacgaggttaacgagcgcagctcagccggacccgagcgccgcaagaaagcgcgtgaggtcctcccagagttcgtttggctcttcgaggccgatgctgagccggaccaatccctccaccggattccaagggcgcaccgtgcggctggccgcgacgtccatcggcgcgatcaggctgtgggtgccgccccacgacgcgccaatcgcgaacaaccgcagatgtccgagcgcaacagggatccgcgccgtgaactccggccggatcacgatgctgaaaacggcgctcgcgccggtgtaatcgcgcgcaaagatctcgtgacccggacaggacggcagcgccggatgcagaacacgcgcaaccgcaggcacgctctgcagccgttcggcaaagtcacgcgcgacacggccgctatgcgcgatgcgaacgcccatcgtctcgataccacgcaaggccagcgccgcctcgtcgggcgagacgccgatgccgagtacgcccagcacctgcttgagcgcgctgtgcagagccagatccttgaccgtgatcgagcccagcagcaggtcggaatggccgccgacatatttcgtcagcgcctcgatcgcgaaatcgacgccatgcgccagcggcttgaacaacaacggactggcccaggtattgtcgcagcccgtcagcacgcccctcgccttcgcgacggcagcgatcgccgcgacatcctgcacctccattgttccggagcccggcgactccagccatatgagcttcgtgctggcatcaatgaggtcggcaataccggcgccgatcagcggatcatagaccgcgtaagagatgccgcgcgacgcgagatagttcgcgcacaggtcacgtaccggtggatagacgtgatccggtatcagcaccttgtcgcccggcttgagcaccgcaatcatcgtcaccgcgacggccgcctgcccggacggaaccaacacggtgcgttcgccgccatgcagcgccgtcagttgcgcttccaaggtccgcgtcgtgggcgttccatgcaggccgtaagtgtagccgtccaggccgcgctccgcgcgatgcgcgaacgcctgcggatcgctatagacaatggtcgaggcgcgaaaggtcggaaccgcgagcgacgaaaagccgtcatgagacactgtggggtgctgaacacagcgggtgagatcgtgcatgaaaatcctcgtgaggagacgtcgcaacgatcgtagccaaacgagatcacggatgcgagcgcagcgtctgcaaggtccattacgctggattccttgcgtcatcgaactgactcgcgccagtgcgcccaccaaatggaaggggcgagccgcagcccgccccatttggtgctctattcgaacttgttaacgggaggccctcaatcaccagaccgctacgtcgttggcaaaacctctatccacgcattcgacatagataccaccaccagcatctattccccttgaggttgtgtcaatccgacacctggggtgcaatcgagaacaaagcagccggtcctcagagttgaatcagcgctgcgtccatcgaacaatgacggctcggttgtctgctccttcctcggagcaggttgagtaatgagtcatcatgaagagaacgagtttacgggcctaccgtctgggcgtggatctcggcgccaattcgctgggatggttcgtggtctggctcgacgatcacggacagcccgagggccttggcccgggcggcgtcaggattttccccgacggtcgtaacccgcaatccaagcaatccaatgcggccggtcgccgcctcgcacgcagtgcacgacgacgacgagaccgctatctgcagcgacgcggaaagctgatgggcttgctggtcaagcacggcttgatgcccgccgatgagccggcccgaaagcgattgaaatgcctcgatccctatggtctccgcgcgaaagcgctcgatgaagtgctgcctttgcatcatgtcggccgggcgctgtttcacctcaaccagcggcgcggcctgtttgccaatcgagcgatcgagcaaggcgacaaggacgccagcgcgatcaaggccgcggccggcagactgcagacatcgatgcaggcgtgcggcgcgcgcacgctcggcgaattcctcaaccgccgtcatcagctccgcgccacagtgcgcgcccgcagccctgtcggcggcgacgtccaggcgcggtatgaattctatccgacacgcgcgatggttgatgcggagttcgaagccatctgggcggcacaggcaccgcatcacccaacgatgacggccgaagtgcatgacacgatccgcgaggcgatcttctctcaacgcgcgatgaagcggccgtcgatcgggaaatgctcgctcgaccccgccaccagccaggacgacgtcgacggctttcgctgcgcctggtcgcatcccctggcgcagcgtttccgcatctggcaggacgtccgcaatctagccgtggtggagactggccccacgtcttccaggcttggcaaggaggatcaggacaaggtcgcacgggcactgctacagaccgaccaactcagcttcgatgagatccgccgccttctcggattgccgtcggacgcgcggttcaaccttgaaagcgaccggcgtgatcacctcaagggcgacgcgaccggcgcgatcctgtccgccaggaggcattttggcccggcatggcatgaccggtccctggatcgtcagatcgacatcgtcgcgctgctggagagcgcgctcgatgaagcagcgatcatcgcctcgctcgggacaactcaccgccttgatgaagcagctgcgcagcgggcgttgtccgccttgctgcctgacggatattgcaggcttggactgagggcgatcaagcgggtcctgccgctcatggaagctggcaggacctacgcggaggccgccagcgcggccggctatgatcacgctttgctgccgagcggcaagctctctcccaccggctacctgccctattatggacaatggctgcagaacgatgtcgtgggctcggacgatgagcgcgacaccaacgaacggcgctggggccgcttgccgaatcccaccgttcacatcgggatcggccagttgcgacgcgtcgtcaatgagctcatcagacggcatggaccgccggccgagatcaccgtcgagctgacgcgtgacctgaagctgtcgccccgacggctggcggagctcgaacgcgagcaggccgagaaccagcgcaagaacgacaggcgtacctccctattgcgcaagctcgggctccccgcgagcgcgcacaatctcctcaagcttcggctctgggacgagcaaggcgatgttgcaagcgaatgcccctatacgggcgaggcgatcggcctcgaacgtctggtctctgatgatgtggatatcgatcacctcatcccattctcgatcagctgggacgacagcgcggccaacaaagtggtctgcatgcgctacgccaatcgtgagaagggcaatcgaacgccgttcgaggcctttggccatcgccaaggcaggccttacgattgggcggacattgcagaacgcgcagcgcgcctgccgcgcggcaagcgctggcgcttcggtccaggcgcgcgggcgcaattcgaggagctcggcgactttcaggcacgcctgctcaacgagaccagctggctggcgcgcgtcgccaagcaatatctcgcagcggtcacccacccgcacaggatccacgttctgccgggccggctgacggcgctgctccgcgcaacatgggagctcaacgatttgctgcccggaagcgacgacagagccgcgaagagccgcaaggaccaccgtcatcatgccatcgacgcgctggtggccgcactgacagaccaggcgctgctgcgccgcatggcgagcgcgcatgacgatacgcgacggacgatcgaagttctcctgccctggccgacgttccggatcgatctcgagaccaggctgaaggcgatgctcgtatcgcacaagcccgatcacggcctccaggcccgcctgcatgaagacaccgcctatgggaccgtcgaacaccccgaaaccgaggatggtgcaaatctggtctatcggaagaccttcgtggacatcagcgaaaaggagatcgaccgcattcgcgatcgccgcttgcgagacctcgtcagagcccatgtggccggcgaaaggcagcagggcaagacgctcaaagcggcggtgctgtcattcgcgcagcgcagggacattgctggtcacccgaatggcattcgccatgtccgcctgaccaaatcgatcaagccggactatctggtaccgatccgcgacaaagccggccgcatctacaagtcctacaatacgggcgagaatgccttcgtcgacatcctgcaagccgagagtggccgatggatcgcgcgggccacgaccgtctttcaggccaatcaagccaatgagtcgcatgacgcgccagcggcgcaaccgatcatgcgggtcttcaagggcgacatgctgcgcatcgatcacgctggcgcggagaagttcgtgaagatcgtcaggctttcgccctcgaacaacctgctctacctcgtcgaacatcatcaggcgggcgtgtttcagacccgccataacgacccggaagattcctttcggtggctcttcgccagttttgacaagcttcgcgaatggaacgccgagcttgtccggatcgatacgctgggacagccctggcggcgcaagcgcggccctgaaacaggaagcgaggacgccactcgcatcggctggacgcgaccaaaaaaatggccctgaagccagggccatgcactgaggcgaagatagcggtctggtgattgagggccaaccgcaactgtgctccacaccttcaacgcgccggcgcatcatagcggtctcgtgaacgaaagccacgcgcaacttggccgtatcgctgatcgcgcatgaaacctcgcgcgcggctgcgccgcctcgatctgcgggagaggcgtccccgtggttgtccggcggctgagacgcccggcgatttcttccgcgcgcctgcgccacgaaggttttggttaattttgtcctgctagctctgattcaatcttctctgacagtggattcgggaccccccatggctttcttctccggcaagtcggctgatcgcgcgcacaacctcttgatgaccgaagtcttcgaacgcaatcgcgatgccattctggtgatgtccgagggcaagatcatcgcctgcaacgaaacggcagtccgtttcggcggcttccgcagcaagcaggacctgctgtcgcgctcgcccgccacgatggcgccggagttccagccgaacggcaagcggtccgccgacatggtgcgcgagatggacgcccaagccaggcgcgaaggccatgccagcttcgagtggaccaccaagcgcgccgacggcagcccggccctggtgcagatcacgctggtgccgacgcaggtcgagggccagacctacgtcatgagcttccgccgcgatctctcggatctggtcgccgcccgcgaggagaagaagcgcgcgctggaccgaatcgccaaggatttcgagaccagcgtcggcgcgatcgccaatgccatttccggcgcctctcgcgaggtggaaacgacggccgcctcgctgaccgcgactgccgaccaggccgcgcagcgcgtggcgctggtggcttcggcgtccaactccgcctcctccaacgtccagtcggtcgccggcgcgaccgaggagctgtcgagctcggtcagcgagatcaaccgccaagtcgcgacctcctcgacgatcgcctcagaggcggtcgaggcctcgtcgcggaccaacgacctggtcaacagcctggcggatgccgcggccaagatcggcgccgtgaccgacatgatcaacgccattgcgagccagaccaacctgctggcgctgaacgcgaccatcgaggcggcgcgcgccggcgatgccggccgcggcttcgccgtggtcgcctcggaggtgaagagcctgtcgagccagaccgcgaaagcaaccgacgagatctcggcccatatcagcgccatgcagcgcgcgaccagcgacacggtcgcggcgatccagggcatcggcgggaccatcggccagatcagcgagatcgccaagacgatcgcgaccgccgtcgaccagcagggccacgccacccaggagatcgcgcgctcggtcagccaggccgccagcggcacgcgcgaggtcgccaccaatatcggctcggtcagccagacggtggaatccgccggcggcgccgcccggcagatgctgggcgcggcgggccagctcgccaggcacgccgacgagctgcgcagcaaggtgaaggactttttgaacgccgtgcaggcggcgtagggttcgatcgtccacgtatcacgtcgcgtcaagcagcgctgcggagctacgagttgggaggcgccagcttcaaacgcggtgtcgtcccgggcaagccacagcggcgcgaggcgccgcgcaggcgctgacccgggacccatacgccgcagcagatgtggtagaacgagatcggagtcaccggcgtgccgccacacgcgatcctgtggtgatggatccccgcttgcgcggggatgacgactgagggtgaggcgccgactgaggtcgacaatcggcgagcgatgcggccttacgtcgacgacaccgccggcttgcggccgtagatcgcatcggcgcgcttttcgaacgccgccgacatgcgcgcgaagatggtgtcgaacatcgagcccatcagcatcgccagcatgcggctcttgaactcataggcgatgaagaacgtcacctcgcaggcgccctgctcgcgcggctcgaagctccagcggttctcgaggctcgaaaacggcccgctgacatattcgaccaggatcttgcgtcccgcacggtcgagcgtgacgcggctggtgaaggtctccttgaccagcttgaacgataccgtcatgtcggcgacgatcacctcgagaccatcgggcttctggctgcgctgccgcaccaccagccgctcgcacagcggcacgaattcagggtagcgctcgacatcggcgacgaggtcgaacatctggtcggccgtgtgcggcacgcgccgcttgttggaaaatctcggcatctcgtctcgatcagcgcgcgagcgcgtcgcgcgcggccttcagcttggcgaagtcctcgccggcatgatgcgacgagcgcgtgagcggactcgccgacaccatcaggaagcccttggtgtaggcaacggtctcgtagttggaaaactcctccggcgtgacataggccatcacggcttggtgtttcttggtcggctgcagatactgcccgatcgtcagaaaatcgacttcggccgagcgcaggtcatccatcacctgcaacacctcgtggcgctgctcgcccaggccgaccatgatgccggatttggtgaagatggtgggatcgatctccttgacccgctgcagcagtcggatcgagtggaagtagcgggcgcccggacgaaccgagagatagcgcgacggcacggtttcgagattgtggttgaagacgtcgggcttggccgcgacgacctgctccagcgcaccgtccttgcggagaaagtccggagtcagcacctcgatcgtggtggtcgggcatgtcgcgcgaatggcgcggatggtcgcggcgatatgggcggcgccgccatccgcgagatcgtcgcggtcgaccgaggtgacgacgacatgggcgaggccgagcttgaaggtggcttccgcaacgtgctcaggctcaccggcgtcgagcgcggccggcaggccggtcttgacgttgcagaaggcgcaggcccgcgtgcaggtgtcgcccatgatcatgaaggtggcgtgcttcttgtcccagcactcgccgatgttcgggcagcccgcctcctcgcacacggtcacgaggccgttctcgcgcacgatattgcgggtgtcggcatagccgcgggtggtcggcgccttgacgcgaatccagctgggtttcgccggcgagatggaatccggccggttcgctttttcggggtggcgcgggcgcagcggcgtgttcgagagcgtgtcgacgatggtgaccatggggacctggcaaacctctgttgcgccctagctattccgtgccggggcgcgccgcaaccggctggccgaggataccagggcatggcagatatgggcagcgcggaacagcgctcatcgcggcggattttctcgagaatggcgcaaaaaccggcaaaatcccccggagtttcacggcctcggccgatggccgcaggccaacgactcacccgggcgttcttcgcccgcgccgtgctggaggtcgcgccggagctgatcggggcgacgttcctggtcgacggcgtcgggggcgtgatcgtcgaggtcgaggcgtatcaccacaccgacccggcggcgcattcgttccgcgggccgacgccgcgcaaccaggtgatgttcggcccgcccggctttgcctatgtctaccgctcctacggcattcactggtgcgtgaatttcgtttgcgaggccgagggctcggccagcgcggtgttgatccgggcgatcgagccgacgctcggcgtcgacgagatgcagcggcggcgccggctggaggatgtcagggcgctgtgctcagggcccggcaagctgacggaggcgatggggatcacgattgcgcacaacggcctgccgctggatcgtcaaccgatcgagctgttcgcgcgcccggccgatgtcgaggtcgtcaccggcgtccgcatcggcatcaccaaggcggtcgagctgccctggcggttcggcctgaagggctcgcgcttcctgagcaagccgtttcctccgtcatcgcgaggagcgtaagcaacgaagcgatccagggctacgcgcgggaccctggattgcttcgctgcgctcgcaatgacgacggagagagcggagctaccccacgccctgcagccgcgacagcgcgtcctggaacttggccttgcgggccagcgccgcctcgcgcttttccttctcttcctcgacgagctcttccggcgcgttggcgacgaacttctcgttgccaagcttcttgtcgacccgctcgatatcggcgtcggccttggcgatttccttggccaagcgggtgcgctcggcggcgagatcgacgacgcccttgagcggcagggccgccacctcgccacgcaccacgagttgagcagccccctcaggcgcggtgtcggcgaacgagatgtccgaaaggcgcgcaagccgtttgatcacgtcgctccagcgcggcgcgcgctctttcgtctcggcggacgcaccgaccagcgccagcggcatcagggtcgcgggcgggatgttcatctcggcccggaccgagcggatcgccgtgacgagatcgaccacccagccgatctcggcctcggccgcctcgtccttgaagctggcggcgttgaacgcgaccaggaccggcggcaccagcggatcgccgaagctcgcggccgacagcgcggcaatctcggcgacggtcggcacgtccgtgcgatgcggccagggcgacagggtcagcaggccgtcgcgcttggcggtcgattcccacagcgcctcggtgatgaaaggcatgaagggatgcagcagcttgaggatctcgtcgcgcgcccaggcgaccatggcgcgggtctcggccttggccgggctgtcctcgccgagcaaagtcggcttggcgagctcgacataccagtcgcaatagacgtcccagacaaagcggtagatcgcgttcgccgcatcgttgaagcgataggcctccaaagcttcagtgacctcgcgcgtggcagcggcggcctcatgggcgatccagcggttgagcgtctccttggcggaggccggatcgaagcccaccggcaccgtgcagccgttcatctcggcaaagcggctggcgttccagagcttgttggcgaacttgcggtagccgtcgacgcgctgggtcgacagcttgatgtcgcggccttgggcggccatcgccgcgagcgtgaagcgcagcgcgtcggcgccgtgctcgtcgatcagtgccaagggatcgatgacgttgcccttcgacttcgacatcttggcgcccttctcgtcacggacgagcgcgtggatgtagacagtcgagaacggcacctccttcatgaagtgcaggcccatcatcatcatgcgggcgacccagaagaagatgatgtcgaagccggtgaccagcacgttggtcgggtagtagcgcttcacctccggcgtatcgtccggccagccaagcgtcgagaacggccacagcgccgaggagaaccaggtgtcgagaacatcttcatcacgtgtgatgaagcccgcgcgcttgttgcggtcgagggccattgcgcggccctgctcggccgtgatgacctcctgctcgacatagtacgcaatggcgtggctgacggcctcctcctcggtctcagcgacgaacaccttgccgtcgggaccgtaccaggccgggatctgatggccccaccacagctggcgcgagatgcaccagggctggatgttctccatccactcgaaataggtcttctcccagttgcgcggcacgaacgtcgtcgcgcctgacttgacggcggcaatcgccggctttgccagcgtcttggcgtcgacataccactggtcggtgaggtacggctcgatgacgacgccggagcggtcgccatgcggcaccatgtgggtgttgggctcgacgcgctcgaggaagccgaaggtctccagccgctccaggatcttcttgcgcgcggcgaagcgctcgacgccgtggaactcccgcgcaaactcctccgagccctcgggcagcccgcgcagatagtcctcgttgtcgacgagggcgatgcaaccctcgcggtcgagaatgctgatctgcggcaggccgtggcggcggccgacctcgaaatcgttgaagtcatgcgccggcgtgatcttgaccgcgccggtgcccttctccggatcggaataggtgtcggcgacgatcgggatctcgcggccgaccagcggcaggatcacgcgcttgccgacgagatgctgatagcgctcgtcatccgggtgcacggcaaccgcgctgtcgccgagcatcgtctcgggacgcgtggtggccacgacgatgaaactggtcggatcctcggggttgaaggttttgccctcgatcggatagcgcaggtaccagaggttgcccttgacctcgatctgctgcacctcgagatccgagatcgccgtcagcagcttcgggtcccagttgaccagccgcttgtccttgtagatgaggccggcgcggtgcagctcgacgaacaccttcacgacggccttcgacaggccctcgtccatggtaaagcgctcgcggccccaatcgcaggaggcgccgaggcgcttgagctggttgatgatggtcccgccgctctcgtccttccactgccacacgcgtgcgaggaacttctcgcgacccatctcgcggcggcccggctgctggcgttccatcagctggcgctcgaccaccatctgggtggcgatgcccgcatggtcggtgcccggctgccacagcacgtcccggccgcgcatccgctcgaaccggcacaggatgtcctgcagcgtattgttgagtgcgtgccccatgtgcagcgagccggtcacgttgggcggcgggatcacgatcgtaaagggatcggcatcccggcgatcgggacggccggcggagaatgcgcgcgcatcctcccagaccagggacatgcggccttcgaggtcggcgggctgataattcttgtcgatcatcacatttccagcgggcgcagggccggccgtccaattcatctatcgcggaactcgtcttggccttcggtcgcgacctgaaaaagctcacgcaagctgttgggacttggctatttttcgactgatgcccggtccgggatcgcgttctcgggagagcacgctgcgatccgccgggcctgcatcagcttgaacgggctagaaagccgccacgcgccgccaagtcaacagcggcggcgaacattgatggcaaacggagacaacgccagccctcttgcgtgaggaaccgggtcgcgaaaacagccggcctgcgtcaggagaccggcagcccgcgcgacaagatccgccgctagcggccgcgcgagacccgctcgatctccgccttgacgatgcgctcgaccagggccggcagattgtcatcaagccacgatttgagcatcggccgcagcatttccttgaccagatcctcgagcgtccgggcattgttgctcaacacggtattggcgagcgcattgaacgcggactccacggcgttcaccgtggacggcgcaaggatcggctgcttcggcggcatggcctcgaaggccgattcgaaagccggggccgctgcaggctgcggcgctttacgggcaagacgtccggattcaatgaactcgatatcgtcctgcggctcgaccttgcggaaggaagccgctgcgggggctggagcgggggtcggtggggccactgccatgtcgtccgtcaactcaagtacttcaggttcgggatcaggctcaggttcagccggcggagcctcggccgccggcgcagtcgtttcatccaaacccgccagcaatgcgtcaatgtcgtcctggctgttacttgcgggcgccggcgcgggcgcaggggccggcggagtcacagccttcgccggagccgccgccgcaatcttcgacggcggaacgtcgttcatcacaggcttcggtgccggcgcagccggcttctcggccttggggggctcaggtgcagcagctttttcggctgccgggggcttggcctcatcatcggcaatgatccgccggatcgacgccagaatctcctccatcgagggttcttggacctttgcaggctgcgtcatttccgactccaaatcagcgacgccgccgcacgcgtcgtcttagcgcgaatgcaaaaagcgccggatccaagtggctcggacttcgctgtggtcatgccgacttgtcccagacgcggcctcaatcgatgcaaacaacggaacgatactgaccagatcggagactattcttagaacaacatccgacgcactgcgaatcgttccgcggccattttgaggctatgtcatggcaacatttgaatgcaagcaacggccgcccgcaaccgggggagcacggaaattgacggagaagcgtcgcccgccgaccacaacctgagcatgtgccacaaacgcaaatccctcggccaatggccgagggatcaagaatcgaagttaagatccgactaacggccgtcgggagtgcggacgccagcccagctgtcacgaatctgctggtagtgcacggttggatcatacgtcgtcgtgggcagccgcagcacttgcggcgacaggcgaccgaccgtctgcagcacggtgtaggatgcaacgacgcggtcatgctgggcgttcacaagcgagttccgcgcattgacaagcgcctgctgcgcgttaaggacgtcgagcgtcgtacgctggccggccttggcctcctcgcgaacgccgttcagggcgatttccgaggccgccacctgcgcctgtgccgactgcacctgcgccttgccggcgagcagcttgccccaggccgaaaccacgtcggaccggacctggtcgcgggtctgctcgagcgcgagacgttgctgcgccagcgtctccttcgactgccggatcaaggcatattcgccgccgccctgatagatcggcacagtgagctgtgcggccgcgccggcgctgaaggagcgataggaggtcagctgcgattcgtaggcctgcgttgccgaggcctggacggtcacggtcggcagcaaggctccttcgttgatcttgacctgcagatattgaacgtcgatgccatacatcgccgaggttacgctggggctctcggtcagcgccgtctcgatcgactgctgcagcgagggcggcaggtaacgatcgacgggagagcccggcgcgaggttctcgggatcgttgccgatgatacggcggaagttcgagcgcgtggccgtcagattggattcggccgtcagttgctgcgtgcggccggctgcgagttgcgcttcggactgcgcaacgtcggtgcgcgtgacctcgcccacattgaagcgatcgcgcgtctgtttgagcgtctgttccagaacccgcgtattgctgcgctgaacctcgacgatcgccgcatcgcgcagataatccatatagatggtcgcagcctgcagcagcaccgactgttcgagcaccctgagggcctcgcgctgacccgacacactcgcctcggccttgcggacgccgttcgccgtctgctggccgttgtaaagcgtctggttcacggtcaggccgacgctgcggggcctcaataggccatgggccgccgcagtcccgggcgcgacctgcccgtcctgatactgaactccacccgatgcttgaagattgaccttcggccggtagcccgaaagtgcctgcggcacgccttcgtcggtggcgcgaacgagagctcgctgcgcgttcagctgcgggttgctctgataggcgcgcaccagcgcagcctcgatcgtgtcggccaacgcaggcgtcgggcctgcgcaagccatcacgaggaccgcagccgccgctgcggtgacgaccttcaccccaaacatccctgttccattcattgttgttaccggctcgaacgccaaagccgggccgtaaacctgttagagactcccgcgcacctcacaccttatt

SEQ ID NO: 4510 - DNA, 23189 bp, synthetic construct
  source 1..23189: mol_type = other DNA
  misc_feature 1..23189: note = Synthetic
catccctatctgaccgaagaagcgcaggaccgcatcatcgccgccgtccgctcggcggcctgaacaaaaacagcaaaagaaaaggcgggaggtcgaacctcccgcccacgttggcacctgccgcccaccgatggccttggccgccccccggcagccagctctgtcctcacgcgggggcatcgcgcccggacaggctttcgacatcatggcttcgaggatcggctttccttgccccccggcacaggaaagcggcgtcgatcgacccggcaccacgatgcgaaacggcacatcgatggcaggcagttctgccgaaattgaagctacgccaggccgcgccgcgccggtatccccggaacaggggtattcagggggtcagaccaggccgcgccgggccgcctccagcgccgcttcggcccgcgacgagacctgcagcttgcgatagatgctcttcacatagccggccaccgtctggtcggcgagaccgagcacgcccgccgcctcgccgacccgaagaccccggccgatcagttgcagcacctcgatttcccgcttggtcagggcgacctcgtcgagcatcggcgccggcatcgccgtgggcgaggacacgcggaaatgacccagcatccgccgcgcgatggagggcgacaacggcggctcgccctgacgcatccggcgcagatagcggccgaggacaccagcatcgagatccttgagcagatagccctgcgccccggcggccagcgcctcgaacagatgggcatcgtcgtcgaagatggttgtcaccaccggcatcacccttggataacccccggcgagcagatgcagaagctcgatacccgagccgtccggcagcgcgagatcgacaagcgcgatggccgcgctttccgcctgcagatggccggcgatccagccccgcgccgcgcccagggtctcgaaggcatgaatgtcgatgcccggaaaggtctcgtgcaacaccgcgaccagggcggcgcgcgtgtccggctgatcctcgatcacaaggccgaggcgataagggccatccggcgtcacgcggcgcccgccttggcgtgcagcggaatggcgagcgtgacccgcgttcccgcctccaccggcggaaagtcgatccagccgccgatgtccctcatgcgatcggagaggttgcgcaggccattgcccgagcccttgccaccaagaccgaccccgtcgtcggcgatgctggcccgcagtcgccggttatcccagtcgatggcgacggaaatgcgctgtgcgctggcgtggcgcaggcagttgctgatcacttcgcgcaccgccgacacgaggtggcggtacagcgcgtaatcgaccatgacctcgggcaattgcgcctcgtccgccagcggccagtcgagggcgaggcccgccgcctcgacccgttgcgctgtctcgtgccgaaggtcggcaaggaccgacgacagcggcagccggtccccggcgagggcgccggcaatggtcctgatgtcggcgatggcctcgcgcaggattttccgtgtctcgccgatatcgccgcgatgcaggcccgacagcaggcgggcgccgacatcgtcgtgcagatcgcgggaaatgcgctgccgctcctcggtcgcgccccgctcataggcatggcgccccacttcggcctcggccagcagatgggtgatctggcgggcaaggccaagatgaacgggcgagaacagcgagcgcccgccgaagggatggcgcagcatcagcgccggcccgtcggcggtcggcggcagccgcatttcggtgccatcgttcagcaggcggacagtgccgaccggatcgcggatcgactggacctcgagcggatcgaacagccggaccagcagcttctgccaacgccccgcccgctcggccggagaagcggaaaaggcgacctcgaccacagcacggaacaattccgcttccggcatccgctttcgcgccaccgtgcgccgccacaggtaatcgcgcagcggcagataaaggaaggcgacaaggatgagcgaaagacccagcgacgactcgtgaccgagctgcagcagatagatgaggccggcgtcgagcaacagcatggcgaagaccgcgccgccatagaacagcacccggaatgaccattcgccgatggcgaacagccggtagcgccgaagcccgagcgcgatgccgagatagatcagcaggaagaagccgaaggcgtaaccctgggacatcacgggttcgaatcccgacagtgccggggccgcgatcaccaggatgaaacagccggcaccgatcgaaatcgtcagccccagccagcgcagcgccgcccgcgccgccgcgtcgcgccgggtcgcgaaccattgggtggcgacaaaggcgacgatcatcgccatggtcgccgcgatggggacatagcgcagcaggctctggttctccggcacccgcagcacgtcgagcacgaccacgggcaccagcacggctggaatggccagcaggagcgcgggccggaccagcggcctggggtaaagcaggaacagggccatggctgtgccgccgaagccgagcgagccgacgaaattcagtgccgagaggacgcggaacaggtcactgccgatggcgagttcgcgcgaactgtagatcgccgccgcatgggccgacagcaccatggcgataccgctgatcatgaacaggcggggcggccagtcccgcggccggatggcatagacccagccgcaaatcagcagcgacccggcgccagtcagcaattgcacccagaaatcggccggaagatcctgcaacggccggtcggtggggcgcaccgtcacgacctgcccgccgtcgagaccgatggcgatctccccgccatgcagcatggcggacagctgatcctggcggtgcaggaaacgctccacctcggcataggtgccgaggacgtcgggttcgtgaatgatgtcgccggcttcgagggcgatcggggcgccggtcgcaccgcgcagggtgaccacgcgactgcccggccggatggcggcgccgggtccatcttcagtgacctcggtgacgacgacgccgccgtcggccgtttcgccgaagcgaagccccagccacggctgatgaagcgaaagaacgagggtgacgacgatggcggcaaggcagaggccgacgatgcccagcatgtaaagcgccggcctatgggctgcccctgcaacggattcagcggacgacagcaccggggcctcggccccctcgacatgctccgccccgacggacatcgacttcatgcccttgtcttacaatgaattttccctcatgggcagggtctagaaggccttgcccccgccttaactggcgagggcgctgcgcacggtttcgaccagctcctcggaagcgaccggctttcccagaatatgggatgtcaaggggcgcagatcgtccatcgactggggcgcattggcactgaccacgacgacaggcacgccaagatcctgtaccagatgcctcgtggcgtgaacgccgtcgatatcgcccttcagccggatgtccatcagggcgagatcgggcctctcctcggcggcgaggcgcatggcgacgcgggcgtcgtcgaccgggccgatcacttcgtaaccggcatcggtcagcacggaatcgagatagaaggcaatgaaagcctcgtcctcgaccaccagaatgcgttgcgccatctttgcagtcccgttagtccggccgcactggccgtcgcttgcgggatgaaatgcggcgaagctgcggcaagttcccgtccgcccgacgcacgcgcccatgtgttgcacgcaaacctcactttcccgtccccgcgggggtggagcgccgggccggactcggcaatactgccgccatcgcccactgacgccggtgtcctccgacttgtccagcgaaccgacttccgccctcccgctgcgcaatgccccgctccgcattgccatgtggtccggtccccgcaacatctcgaccgccatgatgcgcgccttcgagaaccgggccgataccaccgtggtcgacgagccgctctacggtcattacctggcggcgaccgggatcgagcatccgggccgggacgcgatcgtcgccgccatgaactgcgactggcgcgcggtcgtgcgcgacctgaccgaagcccccatcgcccgtggcaccgtgcattaccagaagcacatgacccaccacctgctgccggtcatcgaccggggctggctcgaccgtgtggtcaattgcttcctgatccgcgatccggcggaagtcgtcgcctcctatctcgagaagcgcgacagcgtcagcctcgccgatatcggcatccgcgagcaggcggagattttcgagcgtgcggccgaccggctcggccaagccccgccggtgatcgaggggcgcgacatccaggccgatccccgcgccttgctgaccgcgctttgcgccgccatcggcattgccttcgatcccgcgatgctgtcctggcccgccggccgcagggcgacggacggggtctgggccccgcactggtatgccgccgtcgaagcctccaccggcttcgccccgcccagcccggcgaaaccgccaccgcccgggcatgaagccctgatcgacgaagcccgcccctattacgagcgcctgcgcgcccaccgcctgaccggagcagcatgacatgtccatcggcagccagtcctacgccgacgatccgcgcaacgagaccgtcctcgtccatgtgaacgggcagctggtgccgcggagcgaggccagggtctcggtcttcgacgcgggcttcgtgctgggcgacggggtgtgggaaggcttccggctggtgcgtggccgcgtcgccttcatggaacgccatctcgaccggctgttcgccggggcccgcgccatcgacctcgacatcggccgcagccggatcgaactcgccgccgcgctttacgagaccgtggtcgccaacgacatggtcgacggcgtgcatatccgcctgatggtcacgcgcggcctgaagaagacgccgaaccaggatccgcgcatgaccgtgggaccggccaccctcgtcatcgtcgcggaatggaaggagccggcccctgccctgttcaagcgcggcctgcacctcgcctcgaccccgatccgctgcaccccggccgatatgttcgacatgcgcctgaacagccattcgcgcctgaacctgatcatcgccctcaaccatgccatcaaggcaggcgcggacgaggccctgatgctcgacccgcagggcttcgtctcgagctgcaacgcgaccaatttcttcatggtgaagcgcggcgtgatcctgacctcgaccggggactactgcttcaacggcatcacccgggcccatgtcatcgaacaggcgcgcgccaacaacatcccgatcgagctgcgcaatttcaccctgtccgatgtcgccaacgccgacgaggccttcgtcaccggcaccttcggcggcgtgaccccggcgaccaagctggacggcaaacccatcggcaccggcaagccgggaccacggacggaagccatggcgaccttctacaagcgccttcgggacgccgaaggcgcctgagttctggcggcaaaggccgccgggttacaagcgtcttcgggacgccgaaggcgcctgagttctggcggcaaaggccgccgggttacaagcgtcttcgggatgccgaaggcgcctgaccccgcccgtcaggctgcggcccggactgccggggccgcccggccgaggatcatgtccgccgccttttccgcgatcatgatcgtcggcgcgttggtattgcccgagacgacattcggcatgatcgaggcatcgacgacgcgcaggccctcgatgccgtgcactttcaactcgggcgagaccacggccatcggatcggtgcccatgcgcgccgtgcccaccgggtgataggcggtttccgccttggccctgatgtaacggcggatcgcctcgcggctcgagcaatcggggccgggccggacttcccgcccgcgatagccatcgaaggccctggcggcgaaaatctcgcgtccgatcaggatgctctcgaccatcacctcgaggtcttccggcgcctccaggtaattcggctggatgagcggcgcggccagcggatcggccgaatgcaggccgaggaagccgcgcgaggccggccgcaccggatagaaatcgagctgcgaacccttgccgcccagatgctggcggccatgatcgacggcgaggctggacaggaagaaaccctgcaggtccggcgcctccagccccgggcgggacgaggcatagaccccggattcgaaaccgtggctcgcccccgcgcccttcttggtgaagacatatttcgccagcgtgcggatctggccccagggcgtcagcagctcgtcgtaagaaacaccggccgggcaatcgtaatagagcccgatgccgaggtgatcctgcaggttccgccccacccccggcaggtcgaggacgacgggaatgccgtggcggcgaatctcctgccccgggccgatgccggagaggaggaggagctggggcgaattcaccgccccaccggacaggatcacctcccgcgacgcccgcaccacctcgcgccggccgcctcgggcgatctcgaccccggtggcgcggccgccctcgaccagcacctttgtcgcctgcgcccgcgtgatcacggtgaggttcgtccgcccttcggaggcgccgaggaaggcgcgcgcggtcgaccagcggcggttgttcttgcaggttcgctgatagacgccgacgccatgcagatggtcgccgtcgttgaaatcggcggtatggggcagcccggcttgcttgcccgccttgatgaagacatcgacgaggggattgggttcggcgaaatcctgcacgttcagggggccgccctgaccgtgcgacgcatccgccccgcgctcgttgtgttcggagcgcatgaaatagggcagcacctcgtcccacgaccagccacgacagccggcctgcgcccaattgtcgtaatcggaacggtggccccttatatagaccatgccattgatcgcggaggagccgccgagcaccttgccgcgcggccagaacaggcgccgcccgtccagatgggcctgcggctcggtctcgaaatgccagttcaccgatttgccgccgaccagcaccttcatgcccgtcggcatgtggatgaagggattccagtccttgccgcccgcctccagcagagcgaccttcacggcggggtcggccgacaggcgatgcgcgaggacgcagccggcggagcccgcgccgacgatgacatagtcgtacatgtttcctctcccccgcccttgtcgatgcaggcggttattgtgattattcgtcacattctgccgcaggaaacgagagcgcggcaaggggagagaaacatgaacgacggtctctacaaggcggtgctggttttgctcggtctcggcttcgccgtggccttcgcggtcatctgcctgccgccgctgatcgcgaacccggatatcctcggcgcgctcggccaggggttcgtcaatccctattcgaccggctattcgctcgacgtgctgacctgctgggccgtgctcgccgtcttcgtcctgtgggagcggcagacgctcggcatccgccatggctggatcgccctcgcgctcggcgtcgcgccgggtgtcgccaccggtttcgccttctatctgctgctgcgcgcccacgcgctgcgcggcagggcttgattggcggggcttgaccggcggcggcggcgggcagatggtcggggcatgatcattcgcgccctgccccttctcggcttcctcctcgcgacgccggccctggccgccaatccgcctcccggcggcagcgtgccgcttggcctgcgcctgctcttcgtcgccgtcgaccgcaacgccgacgggcggattgacgatgccgaggcggatcaattcgtcgaccggctcttcgccgccgccgataccaatggcgatgcccgggtcagtctggccgaagccctggccttgcaggaaaagctcgcccccggcgcgcagagccggaaacaggtgagcgcgcagttcaagcgcctcgacctcaaccgcgacggcgtcctcgacgggcgggaagcgaacaaggccgccctcgcccatttcgcctttctcgacaccgacaaggatggcgcggtcacgctcgccgatctggccggccgcgacctgaccgcccccgacctcggcacgctgtccgcgcgctgaagccccttgcctcacccgccggccggccacaatctgcggctgtcgcgatcacggaggggccgcatgagaaaccacatcctggccctgctggccaccgtcctgctcgcgggctgcgcggccgcggacgtgcccgccaccgatgatccggccgtaaaattgcagcaggcccgtcagctgttcagcgtggaaggccgcccggcccaggcggagcgcctgattcaggaagccatggcgacctatcgggagagcggcgatgcgcagggtctcgccctcgcccaccgcgaatacgcctatttcctcagcacgccgggcaccgatgcgatcatcgccaatccgggcggcgcgcaggccccggcatcgcccgagcgtctgaagcgggcgctgggcgaaatgcgcgaggccagcacgctctttgcccagctgaatattttcgaccgtctgtccaacaccgccatgggggaagcgcgcatcgaacatgatctggacgacacggccgccgcgtgcgcgtcgctgacccgcagcctcgcggcgagcgataaacagaccgcgctccatcccgaccggaaacccaatctgccgccgggcatgaacagtttcgccgatctgatcggccacttccgcaaggaatacggttgcccgccgtgacccgccgcccccgcctgatcgagatcgccctcgtcgccgcgctggccttcggcaccgtggtcgtcgccctggcggcgccgctgatcgactggtcgcggctgcccgggcgggccagcgtgcggccgggctatgtcacgatctatctgccgccggcgcagatccggggcatcgacatcggcttcgcccccctgcccctgcccgcccccaaggacgaggcggactggcagcgactggaggcggataccgccctgccgcgcctgttgcggaacggcgccgtggcggcgctggtcggcggggtggccggcttgccgcttctgctgatcctcgccctgcgccgcatcctccgcagcagggcctgaggtcaggcgccccggatcaggcgcagcaggccttccgccccggcgcagacatcggcccaggcgatttcgaaatcgcgctcgccgccataatagggatcggccaccgcttggccctgccgccccggcacgtgatcgagcagcagcgacagaagtgcccctccgtccgccgggcgcagccggcgcaaggcggcgagattgtcatggtcgagggcgacgacgtggtcgaagcgccggaaatccccggccgtgacctgccgcccgcgcaaggtcccgatctcgacgccatggcgccgcgccaccgcctgcgccctcgggtccggcgcctcgccgacatgccagccgccggtgccggcggaatcgaccgtcaccgccaccccgtcccgcgccgccagatggcgcaaggccccctcggccagcggcgagcggcagatattcccgagacagacgaaaagcacggatggcacgaggcaggctcccctgatggcgcaagcccggcttaaccgccggaccggtcccgatcaagcccggaagtcatgcccccaaaacaagaaggggacaggccgcagcccgtccccatttggtgcctgttcggcttgttaacggatgcccccagtcaccagaccgctaaggaatttcaggtgtttggccaaccattaatcgacagtgagacgagttttccactttgacctgtggctgtcaaccggcacgctgggggcacggaaacaagaacgacaaccggaagacgattcatgagcgctgcccgtccctaccgcctcggcctcgatctcggctccaattccatcggctggttcatggtctggctcgatgccgtgggcgagccggtcgaactcggccccggcggggtccgcatcttccccgacgggcgggacgagcgttcgcgcgagtcgaatgccatggcacggcgtctggcgcggggaatgcggcggcggcgcgaccgtttcgtgcggcggcgcacccggctgatggcggcgctgatcgagagcgggttgatgccggcggaagcagcggcgcggaaggcgctggagccgctcgacccttatggcttgcgggcggcggcgctcgcggggcccctgcccctcggccagatcggccgggcgatcttccacctcgaccagcggcgcggcttcaagtcgaaccgcaagtccgacaaggccgacggcgaatccggcctgatcaagcaggcggccgggcggctggaagaggcgatgaaagcagcaaacgcccccagcctcggccattatctggcggggcggaaggcggcgcggctgccggtgcgtacccggatgcagggcagcggcgccaaggcgtcctatgatttctatccgatgcgcgacatggtcgaggcggagttcgaggcgatctgggcggcgcaggcgccccatcatcccgagatgacggcggcggcccatgaccggctgcaccggctgatcttcttccagcgtcccctgaagccggtgccggccggcaaatgcagcctgtcgcccgccgtggcccgcgacgatgcagagggcttccgctgcccgcgcgcccatccgctggcccagcgtttccgcatctggcaggaggtgcgcaacctgcgtgtccagatcgccggccaggccgaccgcgccctgagcatcgaggagggcgaccgtatcgccctcgcgcttctgggctcgaatggcgtgtccttcgacaagatgcgcgccttgctgaaactgccgtccggcagccgcttcaatctggaaagcgagaagcgcaaagagttgaagggcgacgagacggccaagtgcctagtgaacggcaagctattcggcaaggcctggcgcgcgtttcccctggagcggcagatcgagatcgtcacccgcctgatcgaggaggaggacgagagccgcctgatcgactggctgcgggcggaaaccggcgtcgatgcggaggtggcggagaagatcgccggcacgctgctgcccgacggctattcccgcctcggcctgcgcgcgatcaaggcgatcctgcccgagatggaaaagggcctgccctatgacaaggcctgcatcactggcctcggcaccgcccattcgccccgcccgaccggggagcagcgggaccgcctgccctattacggcgaatggttgcagaacgaggtgatgggcagcggcgagccgtcggacccgccggagaagcgtttcggccgcctgcccaacccgacggtccatatcggccttggccagttgcgtcgcctcgtcaacgcgctgatcgaacgcttcggcccgcccgccgaagtcgtcgtcgagatgacgcgggaattccgctactcgccccagaagctgaaggagatcgaacaggagcaagccaagaaccagcggcgcaacgatctgcgccgcgaggaattgacgaagttgggtcaggcggtcaatcaccgcaacctgctgaaactgcgcctgtgggaggagttgaaccgcaacgatccagccgaccgccattgccccttcagtggcgagcggatttcggtcgagaccctgctgtccgacgcggtggagatcgaacatctgatccccttccagatcagtttcgacgacagtccggcgaacaagaccgtggccatgcgctatgccaatcgccacaagggccggaaaacgccccatcaggccttcggcaacagcccgacgatcgagggcaaatcttacctctggtcggacatcgtggcccgcgccgcgcttttgccccgcaacaagcgctggcgcttcgcccccgacgcgctggaacgggcggaccgggagggcggcttcctcgcccggcaactgaacgagaccggctggctggcccgcatggccaaggattacatgggcgcggtctgcgaccccaacaaggtctgggtcatccccggccgattgaccgcgctcatccgggcgaaatggggcctgaacttctccgacgccaaggaccgcaacgaccaccgccaccacggcatcgacgcgctggtcgccgccctgaccagccgcagcctgctgcaagccatggcctcggccttcgtcgaggagcaggaccggatcatcgtgccggaaccctggccgggcttccgcgaccaggtgctgcgctggcggaacacgatgaccgtctcgcacaagccggaacacggcaccgccggccgcctgcacgaggacacggcctatggcctcgtgcgcgatccggcagcggaagggggcaagaaccttgtctaccgcaaggccttcaccagcctgaccgagaaggaaatcggcaatatccgcgaccgccgcctgcgcgacatggtggcggtgtattgggcgaccgccaaggcatcgggcatcaagctcgaccaggccctgcaggatttcgcggccgaagtacgcgaccgcgacccgcatgtccgcgacggcatccgccacgtccgcctgctgaagcccgagaaggcggactatctggtgccgatcaaggggccggacggcgtgccctacaaggcctatgccgcgggcgagaatgccttcatcgacattctggagacggcggacggccgctggatcggcgaggtgaccacggtcttcgccgccaaccgcccggattaccggcaggcctggcgtgacgatgccggccttcgtttcatcatgcgggtgttcaagggcgatttgctgcgcatcgaaatcaatggccagcacaaaatcgtagtcgtgaggcgtctggagccttccagcagtgaattgcgaatggcagatcatttcgaggctggaaaattggctgaccgacacgcaaatccggatgactcctttgaatggatacgtaaacgatactcggcactaaaacacatgaacgccgaacgggtgcgagtggacgaactcggcacgatctggcgcatcccgccggaagaaggcctgcgccacatcctgaaccgggaacagcgcgatgatcggccgcgtcgttgaaatcgcgagtgacggccgtttcctcgccctcgaccgggggttcctgaccgtctcggacaagggcgaggaggtgggccgcgtgccgctggacagtatcgcggccgtggtcgccaatgcccatggcctcggcttcaccaacaacatcctcgtggagctgtcgcggcggggcgtgcccgtcgtgctgtgcggggcccatcaccggccggaggcaatcgtctggccggtggagggacaccatcagcaagcgggccgcatcgccgaccagatcgccgcctccctgcccctgaagaagcgcctgtgggcgcaggtggtgaaggcgaagatcctggcccaaggcgccagcctcgccgccgtcggcgcccgtcacggcggcttccagctgctggcggcgaaagtgcgcagcggcgatcccgacaatgtcgaggccgaggctgcgcggcgctactggcccctgctgctgggggccgactttcgccgcgaccgcgatgccgcgggcgccaacgccctgctgaattacggttacgccgtgctgcgggcaggcatcgcccgggcggtgatggcgggcggcctgcatccctccctcggcctgatgcacgccaaccggggcaatgccatggtcctcgtcgacgacctgatggagccattccgccccatcgtcgacatcgaggtctggcgcctgctgcgggccggcacggccgaggtggaccgggaggccaaggcggccctcgcccgggtgatgatcctggacctgccgaccatcgaaggcaccagcccggtgatgacctgtgcggagcggctggtcgcctccctcgcccgcgccttcgccggcgagggcgaccgcctcgccctgcccctgccccgcctgccgctggagggatggggtgaatgacgcccgcccacccccgccagctccccccgcgccggccccgggcgcgctcagcggctatcgcatcatgtggctgatcgtgctcttcgacctgcccgtgctgaccaagccggagcggaaagcggcgacatcgtttcgccacgccctgctcgatcttggtttcgagatgagccaatattcggtctatctgcgcttcgctgccggcaaggaacaggccgatgccctgtgccgccagatcgaagccgcgatgccgcgcagcggcaaagtccacgtcgtgcagatcaccgaccggcaatacgagatgatccgcacctatcgaggaaggaaacgtgaacccggtccgaaaaatcccggtcagctcaccctgttctgaccccgagtcgcgccgtgcgccaacccggccagacacgaaaaaaggccttgtttccaaggccttgatccgtagtccagtttagcggtctggtgactgggggccaaccgcaactgcagggttctcatatacgcgcacgcgcgaagtttagcggtctggtgactgggggccaaccgcaacacagatcgcccgctatatcgacgaccccaaagtttagcggtctggtgactgggggccaaccgcaacctcggccatagtcacttcttctccaggggtagtttagcggtctggtgactgggggccaaccgcaacagtatatgcccggcactgcgtcgccgtgcaagtttagcggtctggtgactgggggccaaccgcaacccggtcacctacgtcgtcaataccgactacagtttagcggtctggtgactgggggccaaccgcaacgcgcgacgtgagcgagatgatctcgggagaagtttagcggtctggtgactgggggccaaccgcaacaacccagcccggcatgttctcgtagcgggtaagtttagcggtctggtgactgggggccaaccgcaaccaagcaggagatcaggaggccatccgaactagtttagcggtctggtgactgggggccaaccgcaacccaatgggtgggcagatggattttgatgggagtttagcggtctggtgactgggggccaaccgcaacaagatcatcgagcggtcctggtgggccggaagtttagcggtctggtgactgggggccaaccgcaacggatttcctggccgatcttggccagggccgagtttagcggtctggtgactgggggccaaccgcaacaacggaacggattgggcgccaaaatcggcaagtttagcggtctggtgactgggggccaaccgcaaccggtaaaccctttttatagttaacaaactaagtttagcggtctggtgactgggggccaaccgcaacatcgccgcatcgcgctgcgcgttcagttggagtttagcggtctggtgactgggggccaaccgcaacctgatagccattcgggcgcgacatcagcacagtttagcggtctggtgactgggggccaaccgcaactcacagggcgacggctgggcgcgtcgagatagtttagcggtctggtgactgggggccaaccgcaactgcagggccgtcggcggggaggagagggacagtttagcggtctggtgactgggggccaaccgcaacttcatcttgctcaacttccgattcccggccagtttagcggtctggtgactgggggccaaccgcaacggacctggccgagggtcgcagcgtcggtatagtttagcggtctggtgactgggggccaaccgcaacgacgctcattcggcaataagcccggagtttagtttagcggtctggtgactgggggccaaccgcaacctggtacaccatcgacatctcgaaggtcgaagtttagcggtctggtgactgggggccaaccgcaacgagctgttgaagcgagcgatcctcttcgtcacgcacgaggatatggctgccgagcaggggtaaggaaggtgcaccgcctgctcacgctcgccaatttcgagggcaagctctaccggggcttgatgatggtgaaggaaacgacaagcggccggttcctgtacgagcaggcgctgacggaatggcaggaagtcggagccagcggcattgggtacagggcggcttcgacccccgcggaggtctcgtccctgatcacaccggctccggaggtcaatctgcgttcgctggcatccgatgtaaagatcaatttttcgcgcggcaccccccccagcctgtagttcagcgatccgacgaatgggggccaaccgcaggcgaactgccccctcgcccttgcctcagaacaatcggccgccgttggggacgtcgcgttcgggggtgacgaggacgacggcgccggtctcgtcgggcaggccgaggacgaggacttccgagatgaaggggccgatctggcggggcgggaaattgacgacgccgagcacgcggcggccgatcaggctttcgggtgtgtaatgcaccgtgatctgggccgaggatcggcgcaggccgatctgcgggccgaagtcgaccgtcagcttgtaggcgggtttccgggcggcgggaaaggcttccgcggcgacgatggtgccggcccgaatgtcgagcttcaggaattcgtcgaaactcgcgagctcggtgctggtggattgttgatccgcaggcatgacaggcagctctccaccgatacacaaggcgcgggacgcgggcagcccgagggggccgcccgcaggcgccttacttgtcgcccttggccttggcggtcagggacttcagctcttcgatcgaatcggtgacgcgcttctggatcacgtcgaaggcttcggaattggccttggaggtcatttccgccaactcgcgcatgttggccagcgccgcctcgaacgccttcttcagcacttcgggggcgaccttggcgtcggacggattgcccgacatgacgttgcgcagcacgctcgccgcctcggtcatggtctcgcgcatgatctcgacctggcgcttggccaccgcctggaagccctcgaaggcgatgcggttggcctgggtcagcgcctcgatgttcttgcgcgacgaggcaacgatcgaatcgagatccacgttgggcagcttcagatcgcccgcgaatttcttcacgtcgaaattgaagaacgggaattcaggcttctcggaggccataacgaatcctttcgtcggaggcgactgtgccggtgtgacgtgggcgaggctggactatatccgccgccataccgcgactgcacaaaaatcgacggcggcgcacaataacacaattattccttcttttcccgcatccccttcaactcggtcagcgtcgccttcatgcgctcgttgatcagggacagggcttcgccattggccttggacgctgcctcggccagatccttcatgttctggaccgccatgttcagcgccatcttggcgatttcggtcgaggacgggccttcggcgccgctgtcttcgccgctcttcttcgcttcgcgcttggccttgatggcggcctgggccatgtccatcgtgttctggaaaatctcgacctggcggcgggcgaggctggtatagccatcggtcacggaacgctgggcggcgatcagcgcgtccatgttgcgacgattggtctcgatgagctggccgacgtcgacgctcggcaggcggaagctgccgagcagcttgccgacatcgagcccgagcaggttggaattggtcttttcgtcgctcatcggcttccgtcctccgtttgtcgccccgagtcgtggggatttatttatttactatagccgagcgtcatgtcgcgtcgattgcggaactgcgacggaacagcccggacgggagtcggcgcagcagcgcctccgcctgttttgtccgccggtcgagcgcgaccatggtgcgcgacagatcggcgctgtcgtcggcgagaaagaccggcaccacggacaggaacatggccgcgacaccgccccggcaaagccagcccggcccatcgggatcgccgtcgcccagatgcgccgcgcgcgccatccacgccatcgagcgcgcgaggccgggcagccgcgcaagggcggtcagcggcgcgcgccgctccgccgtcaggatcgaggcgagaccgggacggtaaggcgccagcgcctcgaagcggcgcatcagcacatcgaacaggcggtcgcgcagcggctcggcggcgaggctgacgtcgtcaccggccagaaccgcgcggtcgatcatcgccatgaaggcttcgagcacagcctgccggctgccatagcgaggatagagcgcggctagctcgacccccgcccggcgcgcgatcagggcgagactcaccctgtcccacggcccttcggcggcaagggcgagcgcggcccgcgcgagacggtcgccgacatcggccccctcttccgcgtcgcatccgccctgctggtccatggccatccccttcgtcatgctgcgcagcatgaccgggaacagcggcgaattccagcgccggaatttcagcccgcaagttcgcgcgaacgcgccgtggcggcttcgatcgcgcggtcgaacaggggctgcaggccgtccgccgccatcagcacgttcagcgcccgctcggtcgtgccggccgggctggtgacattgcggcgcagctgatcggcgggctcggacgacaggcgggccaattcgcccgagcccgagacggtctgccgggcaaggcgcatggcgagatcgggcgaaaggcccagcttctcgcccgccttggccagaacctcgatcatcaggaagacataggccggcccaccgcccgaaagcgcggtgacgacgtcgatcagcgcctcgtcctcgacccagccgatctcgccgacggcggcgcaaagacggccagccaggtcgcagtccatggcgccggcggccccgccggcaaccagcacggtcatgccccggccgaccgcggccggcgtgttgggcatggcgcggacgaccggcgtgccggcgccgaaggccccctcgaacagggcaagccgcttgcccgcggcgatggacagaacgaggctgcgcggcccggcgatgccggcgagcacgggcaggaccttgtccatggtctggggcttcaccgcgacgacgatggccgccgggtcgagccccgccggcacctcgtcgaggctggacagcacggtaatgccccgggcggccagcgcgggcgcgcccgccggctcgaccacgaaggccttttcgggcgacagcccccgggccagccagccctccagcatcgccccgcccatcttgccgcagccgatgagcagcagcggccggtccagcgcgaagccttgagccggcgcagcttcacccgtcatgtcgaacccctgtcgagaaaacgatcaggcctcgcccatcgtctcgatcatcgacgcggccagggcctcctgcgcgctcttaccgccccagaggacaaattggaaggccgggtagaagcgttcgcaggttgaaatggcgatgtcgatcagttcttcgcagacactgaccgagacatcgtcgcccatcaggctggcgtggcggtagagcagcgtgccgtcgtccgaccacagatcgaaatggccgagccagagctgctcgttgatcagccccatcaaatgatagatctcggcccggcgcgccggcggcacgcgcatgtcgaaggcgagggtcagctgcagcgcccgctcgggctcgcgccaggaaaaaccgaaatggtaatcgcaccaggagccgttcacggcgaccgaaagctcgccatcgccggcacgatcgaagggccattcgttggcggcgacgatctgctcgatcacgtcgatcgggtcgacgccggactgttcgtgttcggacaacagcattcccatggccctactcctcgtgctgagcggccggacggcgtgccatccggcggtgcggactagatcagaatgtgggagtctcttgtgcattgccacataaataccgcccgccgatccggtgcccggggcatccggcatatattgtgggtcgggtctgcggcatccaccatggataagaggctgcccaagcccgcgattcggggcaaggccgtatacccgagcgaggcgctaaactttgatgacggcggcggacttcaccgtccggcttgcacatcggggcgcgaatccatatgttcccgccactcgcgcgaccgggctttggcctcgcggtcctgctggggcgtcgccaagtggtaaggcagcggtttttggtaccgccattcggaggttcgaatcctcccgccccagccagcaagccatgaacggcgaggccctcgtccataggcgctacgccttggcccaatcctccagtctcaaaccgtccacgcgcgcgaattccggcgtgttgttggtcaccaacaggcagtcggcggcaagggcatggccggcgatcaagatgtcgttaccgccgatgggcgttcccttcattgttaggcgacactttggatgagcacaccggggatccgggatttgccgggatattcggggaccaggtgggacgccacccggaattctccattataaatcaatggcattcagaaaaaatttgtccgccaacagcgtgtgctcaagcaaagcgtcgcgacgttttgaaattgcgctatcgggtctagagcgggttgcccaggtgatccgtcagcctaatgatcgagctcgccgtgggcctgccgctgtcgaagatcgcgacgtcgcactgcgcaatgccccggagtggaacgcccattcgatttttcgcgtcgaaggttatttcgtacacggcatcgcggccgatggacgtcctctccgaggagacttccttcacatcaagaaattcaacagatgagggggagacagccatctgccgaattttatccttgcagtctgaaaccccgccatcgaggtcgcatccacacagaataagagcgaatattaatataaattttttcattttccctatctcgccttatggccccaccacacaacctgcccaataacttgaatttcagtggatgtgttgtggtctatctcctctgggtcataatctttgttgtcagaaataagtttgatgatgccagaaacggataattgtatccgtttcaccagaagagttcccgccaccgacagcgcgtaaatcttgccgttcgtaagcagtcggtcggtaatatcaatcagcatctcgtcgccgctactgatcgttggctccatgctgtcaccctcggcttgggccataattaggttctttggcgaccgacccgtgacgcgacgcacccaatcctccggcagcttaacatcttggctccattcattttccggcggcagaagaccttttcccgctgaaaactgggcatcgtagagggggatggctctggttgccggtgcatcaagttgtggttggctcactggtgcgggcattggcgccgccggggtgcccgttatcaaccaggcaatatcgcaacctagttcagcaagtcgctgaagatacgcaaatttcggcgtagacgagccagattcatagctctggaatgtcctgaacggcacgccaattttcgcggccatttcctgctgagttaggcctagggcctctcgaaaggccctaattctatccccggcgttcacgggcatgaaagtgcgaacacaatgttcgcacttcccttcgcggttcgcgctttctggaatgcatttgtcaccaatgacttacgctgtttttcgcgtatcgaggtcatgggcgaaagtgcgaacgctaaaatcggcgttgacacgctaatttcggcgcgccaatctccttggcatgacaaacaagcgtccaaggctagacatccccaaaaagcccgccgaacggcgggcgtggatccagtatcgtctgcggctcatcggctcgaacttccgcgccttggggcggcagttgggcgtcagccagcaggcggtgtcatacgcagcggcgggctacccctcactggccattgagcaggcgatcgccaaggcgatcggcgtgcctcaccaggagctgtttcccgaacatttcgacgatgcaggggggcgcataccccttgcccgtacaaggcaacgcaagcctacccgcgccgcgtcgcagcgcaatgtcgaaagttcggaggccgcctgacatgacaagcaatcggaacgagaagccgaccgaggctgcgatcgccgcgatcgaggctgtcgtcgagaagttggcccgcgcctgcctggatgcggcctatgtccatcgagcggcagttgaggccgcgcaggatatgggcgtggccagtgctctagctctgcttgaggccgagcgggcgcatcattcggccaggcgagtgatgcacggcgcttgcctgtgcctcgtcgccgtgaaggccggggaggaaagtaggagcagcgaggcgcaagaaaacgaagccgagcgcaacgggcagatgcgcgcggtcatttggtcgccgatgtcatctacgaaaggcgggcaggctgcactggcgcagcagcgaaatctggtcgatcgcgccctgcagagagtcaaatgcgcgcggcgtcggtcgattgaatctctcgctgaagaagcgaaatcgcccgaccaaggacgatccgcttgatgtccagcagcgtcatatccggcggcacgatcagcaaaagttggatgctgatctcttggcccaactcgtcctgcgcccagtcagagaatgaaatggtcacggaagttcttgggtcgtctgtttgccgcggccgaggcgctaccatcatcaccgacaattccaaatccgggtacatgctttcctccatcgactcggtctcgcaaccgtcgatggtaggggccggccgggccggcgtcacctgcttccctgctcccccgcaggtggtgccggcccgtgtcgcgcggagggccgcctgaatggcggcgcgaggccatcgcgaccctcggcagggcgatctgctgggctgggagccgccggccctggtcgagcgctatgacgagcggcgggtgcgggcaggatcgttgcgcggtcagatcgcgcgggccgtggccgagacgctgacagacagtgagctggaccgggatgagatcgcccggcggatgtcggactacctgggcgaggatgtgtctcgatcgatgctggacgcctacgcgagccaggccaaggaagatcatacgatca

SEQ ID NO: 4511 - DNA, 22775 bp, synthetic construct
  misc_feature 1..22775: note = Synthetic
  source 1..22775: mol_type = other DNA
gggccgtcgggatcaggcaagtcgaccatgatccgctgcatcaaccggctggaggagcaccagcagggcaccatcgtcgtcgacggcatcgagctgaccaacgacctcaagcgcatcgacgagatccgccgcgaggtgggcatgtgcttccagcacttcaacctgttcccgcacctcaccatcctcgagaactgcacgctggcgccgatctgggtgcgcaagatgcccaagaaggacgccgaggaactggcgatgcacttcctcaagaaggtgaagattccggagcaggcgaacaaatatcccggccaactctccggcggccagcagcagcgcgtcgctatcgcccgcgcgctgtgcatgaagccgaagatcatgctgttcgacgagccgacctccgccctcgacccggaaatggtgaaggaagtgctggagaccatggtgagcctcgcccaggaaggcatgaccatgctgtgcgtgacccacgagatgggcttcgcccgtcaggtggcgaaccgcgtcatcttcatggatgccggccagatcatcgagatgaacgagccgaacgcattcttctccaatccccagcacgagcgcaccaagctgttcctcagccagatcctgcattgagggcaccccgtcgcggcagagcggccccggtcgttcatgtctcaaggtcgccacctgcaaaccgcgccgttccgccgctttcggctggacggcgcagtgttttgtgccatcttgctgccccaacgtccgatggaagggggcttctcatgacggtacgcagaaatctcggcgtcgcgctgcggggcgcgctgctggcgacggcggccattgcgctcggcggctcggccgccctggcgcagtccgcgcaggcgctgaaggaaattacggccgacaaggccaaggtcgccggctcgatcgtggtcgactacaattcgcgttcggaacgctcgaacagcggtgccgatgtctatgagatcggcgagatcgccgtcgccgacatgttcctgatgaagggcaccgtccagcgcatgccgggctccaagctcgtctattcggtgcgctacgacgtcatcaacccgagcaatcccagccagatcgcccgcgacgtcgccatcctgcgcggcgaaatggcgatcgacaacaatggccgctatacgcccgagactggccagctccgcctcgacgtggtcaagggcaaccaggtgaccagcaaggtcgccggctcgatccagggccgtcaggtgacgcgctggtgggaggtcggcgagctgatccgcaaggccaagaccgaggccaccaaggtctattcgcgctatgtcgacggcaaggtcgtctcgatccaggtgaagaacccggacccgctgcgcttcgagcgcctgatcctgccgtccgggccgttctccttcctgcccgagacgcgcgtctcgggcaatctcgactacgactacgagctcggcaactggctgaccgaccagaacggcgtgaccatgacctacacgctggccgacaagagcttcaccgaccgcatcaccggctcgatccgctatgtcgaggaagagggcaacttcaccgatagcaagggcaagaagcgcgagtttaccggctactatgattataatctgcgctggaatgagcagcaggcgagtggtgacaatttcttcgacgagagcacggcggcagcgcagaccgatgcctttttctcggcctctgaccagaccaagccggggctttatggccgcgtctactatctggacagcgaagacgcctgcaagcgcgtgaagaacggcgagggcggcctcgactgcgtcggcccgacccgctcggagatcacctacgacctcaaggcggtgaagctgaactaccagcagctcgcgagctggatgaagctggagctgctggtgatcggcccgttcaccgacgaataggccggaagcaggcggcggccgcttggtcgttgtgacgtagcgggcagccgcggcgtctcgtccaagagatcaacgtcatcctgaggtgccgcggtaggcggcttcgaaggaggctcgtctcgtgcgcccaggacccatccttcgaggcccgacctacggtcgggcacctcaggatgacgtggctccgctgggggaggggaacgctacttcgccgggccggtctcgatcggctggtcggaggagccccattccgcccatgagccgtcatagagcgcccgcggcggcttgccgatggagtcgagcgccagccacaggatcgccgccgagacgccggaaccgcaactggtgatgacgggttcgtcagggtcgacaccggcgtccgcgagcgcggcgtcgatggcctccggcgcagccagccggccgtccttcaccacttcgccgaagggcaggttgcggctgccgggcatgtggccggcccgcacgccggggcgcggctcgggcgcctcgccgcggaagcgcggcgccgggcgcgcatcgaccacctgcgccgagccgtccttcagccgctgcgccacctcgccgatgtcggcgatcatggtggcgtcgacccgcggcgtgaagcgcatcggctggcggcggccgttgccctcctcgaccgggcggccctccgcctgccatttcgggaagccgccatcgaggatcaacacgtccttggcgccgaagacgcggaaggtccaccacacgcgcggggcggagaacaggccggcaccgtcatagacgacgatcttcatgccgtcgccgatgccgagcgcgccgaccgcggcggcgaaatcgtgcggcttcgccagcatgtgcggcaggccggacgaggtgtcggcaatggcgtcgatgtcgaagaataccgctccggggatgtgcgccgcgagatattccgtgcgcccctcgcggttggcgccaggcaggtgccacgagccgtcgaccacgatgaggtccggcgcgtcgagattggcggcgagccattcggtggagaccagccagcgggagctggaggcggcggcttcaggcatggacgttctcccgcgggaatggcatgacgctcaggcccagccgagccgcacgcggcggttctgctggcctttcttctcgatcttggtgacctgcaccgccccgatctcgccgaggccgcgcacatgcgtgccgccgcagggctgcagatcgagcccggcgatctcgacgagccgcacgcggcccgtgcccatcggcggcttcaccgacatggtcttcacgaggcccggattggcgaggagctcctcatcggtgatccagcgctcgctcaccgccgcgcccgtcgcgatcatcccgttgacctgcgcggtgatcgcgtccttgtcgagcccggcatcgggaatgtcgaagtcgagccggctctcctcctcaccgatcgagcctccggtgaccggatagggcagggcgacggaaagcagatgcagcgccgtgtgcatgcgcatcagcttgtgccggcgggtccagtcgagccgcagcgtcaccccctcgcccggcacgggcagcgccgaaccgggggcggggacatgcaccacctcgcgcttctccggaccatagacggcggtcgcgatcggtatctcgccgccggcgtgcgctagcacgccggaatcgcccggctggccgccggcggtcgcgtagaacaccgtgcggtcgagcacgatgccgccctccggcgtcaacgccaccacggtggccggcgtctcggcgcgataggcgtcctcgcggaacagcagcgcggtcatcagacgagcacgttcggcacggccgtctcgcgctccagccaggccggcaccggcaggcccttctcgcgcaggaaggcggggttgaacagcttcgactggtagcgcgtgccgtagtcgcacagcacggtgacgatggtgtgccccggccccagctcgcgggcgaggcggatcgcgccggcgacgttgatgcccgaggaaccgccgaggcagagcccctcatattcgagcagatcgaacacgatctgcaccgcctccgcatccgggatctgataggcgagatcgatcggcgcgccctcgagattggcggtgatgcgcccctggccgatgccctcggtgatggaggagccttccgccttcagcacgccggtcgtgtagtagctgtagagcgcggcgcccatcggatcggcgaggccgatcttcacgcccggattgcgctccttcagcgccatgccggtgccggccagcgtgccgccggtgccgaccgcgcagacgaagccgtcgaccgtgccatcggtctgcgcccagatctccggcccggtggtctcgatatgcgcctgccggttggcgacattgtcgaactggttcgcccatacggcgccgttcggctcgctcttcgccatcgcctcggcgatgcggcctgagactttcacatagttgttcggattggcgtagggcaccgccggcacctcgaccagcgtcgcgccggcgagccgcagcatgtccttcttttcctggctctgcgtgtccgggatcacgatcaccgaccggaagccgagcgcattgccgaccagagcgaggccaatgccggtattgcccgcggtgccctcgacgatcacgccgccgggccgaagcgtgccgcgcgccaccgcatccttgatgatgaagagtgccgcgcggtccttgaccgactggccggggttcaggaactcggccttgccgaggatgtcgcagccggtggcctcggaggcgcgctgcagccggatcagcggcgtattgccgaccgtatcgacgagaccgttacgaatgtccatgggagtcgcagtgcagggttcgaaaatggcgcgtggcgaaggccgacgaaactagttgagccttaccgaacgggcaacctccgaagccgggaaacacgccgcacgcttatcaggatgccgtaggcatcgttcctaccccttcaccgcatcataggcggcgagggctcgtgcccgcgcgctcgcgtggtcgacgatcgggtgcggataggtcaccccgagttcgacgcccgcccggctcagcacctcgcggtgggccgcccacggcttgtggatcgcctccgccggcaaggcggcgagctctggcacgaagcggcggacataggcgccgtcggggtcgaacttctcgccctgcagcaccgggttgaagatgcggaaataaggcgcggcatcggcgcccgaaccggcgacccactgccagctcgcggcgttgttcgccgcatccgcatcgaccagcgtgtcccagaaccacgcctcgccctcccgccagtcgatcagcccgtgcttgacgaggaaggacgcggcgaccatccgcacccggttgtgcatccaccccgtctcccagagctgacgcagcccggcgtcgacgatcggatagccggtgcggcccgtctgccaggccttcaggaacgccgcgtcgtcgcgccatgcaaaggcgtcgaagcgcggctggacgttcttccatggcagctcggggaaatggaacagcaggtgataggaaaattcgcgccagtagagttcgctcacgaatttggcgacgtcgcgcgccgaggccgtgccgcgctcctccgcgctccgcacggcggccagcacctgatgcggcgagacgttgccgaagcgcaggaagggcgagagccgtgaggtggcctcgcgatcggcgcggtcgcgggcgtcggcatagcccggcaggccgtcaccgaggaaatccgccagacgctgccgcgcgccgctctcgcccggcgtccagctcgcgcgaagcccgcccgcccaatccgggcatgacggctccagcgcccacgcctccagcgcctcgctcgcgacgggcgccgcggccggtatgcttgcgggcatacgggtcggccgacggacctcccgcgccgaggcggcgcggaagaacggtgtgaagacacggaagggctgccgggccccggtgagcacggtccacggctcgtgcagcagtgacccgccgaagctgcgcacctcggtgccccgcgcggtcaggctctccttgatcgcgcggtcgagcgcgatctccgcggcgccgtagcgtcggttccagtagaccgcgccggcccggctttcggcgatgacctcgtccagaaccttcgccgccgcgccgcgccggtgcactagcgaaagcccatgcgcgcgggcggcctcgccgagcgccgcgagcgagcggccgagccaccagcgcgcggcgccgccgagcggccggatgccggggctttcctcatcgagcacatggagcagcagcaccagccggccgctctgcgcggccgcatcgagcgccggattgtcggcgaggcgctgatcgtcgcggacccagacaagggcagggcgatggtcgggatcggagctcatcaggggcggcgttcgcgagggttagtgccgtgctttgtgcgtggccggcaggcaagctgcaacgtctttcgcgtttgccggttcccggcgccgtggcgtcttgagctttttaaatgatgatcataatttaagagcagatcagtcgcgatgcgtgccgggcacgccgcacacaaacacggagaagtcgcatgagtggtaatggcgcagcagggaagggcacggcggccgtcaccggcgcgtcctccggcatcggacggatctatgccgagcggctggccgcgcgcggctacgacctcgtcatcgtcgcccgcaacgcggagcggctggaggctcttgccgccactatccgctccgccaccggcaggagcgtggacgtgctccaggccgatctggaaaagccggccgacatccggcgtgtcgccgatcgcgtcgccggcgatcgcgcggtaacgctcctcgtcaacaatgctggggcgggcaccgaggggcccgtgctcggcaccgacatcgatcgcgtcgaggcgatggtgcagctcaacgtcgtcgcgctgacccgcctcgcagtgacggcggtcaacgcgttctccgcgcggggcggcggcacgctcgtcaatatcgcctcggtggtggcgctgatgccggaggtgctgctcggcgcctatgcgggcaccaaggccttcgtgctcgccttcacccagtcgctgcagaacgaactgcagggcagcccggtgcgtatccaggcggtgctgccggggttgacccgcaccgagttcttcgaccgtgccggcctcgcgctcgacagctatccgcaggagatggtgatgtcggtcgaggaactggtcgacgcggcgctggcggggctcgatcagggcgagctcatcaccatcccctcgctgcccgacgccggcgatttcgcgcgcgtgagcgcggaccgcctcgcgctggtgccgaacctctcgcgcaaccacccggccgagcgctaccggcagtgagccggggcggtcgcccggcgatcgtctcgctcggcatgtccgggcgggcgcggcagatcggccaacctgcgctatagtaccgtccgccgggacctctgcccatcgggccggggtctgcgaggaaggtcagtgtaggacggatgccgccgatgcgttctgcccgtgagccggtacctgacgtcgtcgcgccgctccccgatggagcggcgcgccttgtgccgcatgccggcagcatcgctcctatcttcctgatcgcattgaccggcggtctcaccgcactgatcgtcgccgcgccgctgatggtttattcggtgacactggcgaccttcggagcggcccatgtgctctccgagctgcgctatgtcgaccgccgtttcggccgccgcctgcctgttcggcagatcgtgctgatggcgcttttcctcgccggtgcggtggcagcacgggcgagcggcctgttcgggctggtcgatccggccaaggctttgatgctggagctgtcatgcgtcgtcgcactggcgctttcggcggctgccggcggagtcgcccagcgggctctggcgctcgccatcgccggtggtctcggcctcgcgaccgccttcgctccgttcgacacggcggtgtcgctctccatcctgcacaacctgacgccgctggcgctcatctgggagatcaccccggcgccggcgcgccggcgggtcatgccgctggcgttgctggcctttctcggcctgccgctgctggtcgccagcggtctgccgagacttgcgctgcaggccgcgggtctgtccggacccggcctcgaccccatcggcgcggggacgctcgaggatcacctctatgtctatgtgccgcgcccgctgctcggcggcgcctcggcggtcgacctgttttccgcctcggtcgtcgcccagtgcgcccattatgccgctgtgatccttgtgcttcccatgcttttggcgcggcgcgatccgcaggcgagggggctcgtgccctggccgcgcggcggcgtcttcgcgctgatggtggcgggcgtttccgccttcgttctctatcgtttcacgaccggcttcgtgccggcgcgcgcgctctatagccttgccgcctcggtgcatgcctggatcgaaattcccttgatcatcatagcgctgacggcgcgctctcaggcgaccatcagcatgccgagcgcgccggaagcgacgttggcggcgagcgatacggcgaaggcgtgccgtgccgcgagtccgcccgcccatccgatgatggccgcttccacgaccaccaccaccgcctccgccgcaagcaccaccgccacatagtcatggagcgcggcgaaatgctcgacggcgaaccagagctgaggatgggtagcggcggtggccagcgccgtcgccagcgcgacatggccggcgccgcggctcggccagtcggcgatcacgaccagcgcataggcgaccggcccctcgatggcgaccgacagcagcatggcctgaagctcgttcatgcccgtccaccgttctcgttcgcctttccctgcaaccttaagccgcttcagcgaggagcgccatgatacgccaccgttcgggacgccgtgccgtacccttccgtgcccttctcatcatccttgcggcgaatgtcggcggcatcgcgcgtgccgatatcccgccgccgcgtcccaagcctcctccgcctccggaagggccggcggccgggaatgtgcgcggcctgcagcttcagcggatattgaccggcagcttcatcggacgttgggagacgatcatccgagcctgcgagggggcgtgcgccactcccagggtggtcgactgcgtggtgacgggtgcgaacggcgtccggatacgcggcggcgacatcgccgctgttctcaccgccgggcagatcgcggccggaaagccgatcacgctcacgctcgaacactgcgccctgccgcagatcgaactctcggcgggcggctgagcgaggcgtggcgccaaaaatggaaggggtagcccgcaggctaccccatttggtgcttttcagcttgttaacggaggaccctcgatcacccggccgctaaaccctggtaagtcgttccgaactggctttgtacaccaagggtagcacggtacaatttttctatcagatcaagggttagccgcagttcggttcagatgctggaaaaacgcttcgggccctatcgtctcggtctcgacatcggttccaattcgatcggctggttcatcgtctggctggagcgggacggcgacaaatggcgcccgaagggtaccggccccggaggcgtgcgggtctattctgacgggcgcgacccgcaatcgggtgcctccaatgccgccgaccgccgcctcgcacgtggcatgcgccgccggcgcgatcgctttgtcgatcggcagaagacgctcatggaagcgctcgtcgccgccgggctgatgcctggggatgtcgcggcgcgcaaggcgctggaggcgctcgacccttacgagctccgcgccgccgcgatcgacgggccgttgccggcgcatcatgtcgggcgcgccctgttccacctcaactagcggcgcggtttcctctccaaccgcaaggccggcaacaagggcgacgacaagggcgcgatccgggaaggcgagcgcaagctcgccgaggagatggagaagatcggagccggcacgctcggccagtatctgtggagccgccagaaggagcgcagcggcgtgcgtgcgcgcggcaaggtcgccggcaccaaggtcacctacgacttttatccgacgcgccggctggtggaggacgagttcgacgccatctgggcgaagcagtcgccgcatcatccctcgatgacggccgaggcgcgggaggcgatccacgacgccatcttcttccagcgtcccctgaaaaagccgccggtcggcaaatgcacgctcaagccggccggcgtccccttcgagcaggacccggaggggtaccgcgtcgcctgggcgcatccgctcgcccagcgcttccgcatcctgcaggaggtgaggaacctcgccgtcggccccgtcgggtactcgccgcgcaagctggcgaaggaggagggcgacgccatcgtgctggcgctcctgcagagcaacaaggtctccttcgacaagatgaggggcatcctcaagctgccggcggaccagcgcttcaatctcgaaagcgagcggcgcgccgagctgaagggggacgagaccgccgagcggctctcccacaagacccgtttcggcaaggcttggcggggcttttcgctcgaccgccaggccgcgatcgtcgaccgcctgatgaatgaggaggacgagacgaagctcgtcgcctggttgaggcgcgaatgcgatctcgatgtcgagaccgccgcccgcatcgccgatacgccgctgccggagggctacgcgcggctgggactgcgggctatccgcaagctgttcccgctgatgaacgacaagggtctgaactatcccgacgccgcccgcgaggccggctatgaccatgccaacgcgccgaccggcgagatcctcgaccggctgccctattacggccgctggcttcccaacgccgtggtcggctccggcgatccgcgcgacgtgaaggagaagcggttcggccgctttcccaacccgacagtgcatatcgggctcgggcagcttcgccggctggtcaacaccctgatcgaggagctcggtgccccggaggagatcgtcgtcgagtttacccgttcgctgaagctttcgcccgaggagaagcggcaggtccagaccgagcagagacgcaatcaggagaagaacgagcgtcgggtcgccgagatcaagcgcctaccgggctatcgggactacgacccaacgccgcgcgacctgctcaagatgcggctgtgggaggaactgaacccgcgtgacccgctggaccgaaaattcccctatacgggcgacaatatcagcctcgcgcagctcatgtccgccgaggtcgatatcgaccatctcatcccctatacggtgggcctcgacgacagcccggccaataagatcatctgtttccgcgaggccaaccggcacaagaggaagcgcacgcccttcgaggctttcggctccagcccggccatcgggaccgtcacctacaattgggacgagatcagccagcgcgccgccaacctgccgcgcaacaagaactggcgcttcggtccggatgcgctcgaccgctacaaggagatgggcggcttcctcgcgcgccagctcatggagaccggctggctggcgcgcgtcgccaggcaatatctcggcgcggtctgcgatccctattccatctgggtgatccccggacggctaaccgcgatgatccgtgcccgatggggcctcaacagcctgctgccggaccacaactatcctggcgtgcaggagcgcgacgagaccttccgcgcggcgaccgatgacctcgaattctccggtatcaaaaaccgcgccgaccatcgccatcacgccatcgatgccttcgtcgccgcgctcaccgaccgttcgctgctgcagcgcatcgccagccgctatgacgaggagcgcgagaaggtcgacatccccgagccgtgggaaggccttcgtgacgagctcaaggcgcggctcgacgccatggtggtctcgcacaagcccgaccacggcaagggcggcaggctccatgaggacaccgcctatgggctggtgaaggagccggaaaaggaggccggcaatctcgtccgccgcaaggacctggcttcgctcacggagaacgagatcgagctcacccgcgacatccgcctgcgcgagcgggtgcgggaccacgtctatgcggccagggccgccggcatggacctgaaaggcgcgctggccgacttcgtcaaatcgtcggaaggcgatccgcacaccaggcacggcgtccatcgcatccgcctgctgaaggtcgagaagccggaatatctcgtgcccgtcgcgggtgccgacggcacgctgtacaaggcctattcggccggcgagaatttctgcgtcgagatctacgatgccggcgacggccgctggcagggcgaggcgatccgccgcttcgacgccaatcagccggggtaccggccgcgctggcagcacgaattcccggatgcgcgcctgatcatgcgcgtgcacaagggcgatctcctgcagctcgacgacggcacgggccccaagatctgggtagtctaccggctcgatgcatcggccggccgcttcaagctcgctccgcacaacgagaccggcaatctcgaccgccgccacgccaccgacacggcgatcgatccgttccgctggctgatggcctcctatggcacgctgaagcggatgaatgccggccgggtgcgggtggacgagatcggacgcgtgtggccgatcaccccggacgatgcacgcaaaacgaaatgattgtcattggtgcaaccttgaatatcattccgctatagggtgcaacgggatgcggtcgaggcggcgatggtcgggcgcgtggtggagatcgcgacggacgggcggcatatcgcgctcgatcgcggcttcctgaccatcgccgagcgcggcgccgagatcggccgcgtaccgatcgacgacatcactgccgtggtcatgaacgcgcacggcctcacccacaccaacaacgttctcgtcgccctggcgcggcggggcacgccggtggttctgtgcgggccgcaccatcggcccgaggcgatcgtctggccggtcgacggccaccatgagcaggccggccgcatcatggatcaggccgcggcctccctgccgctcaagaagcggctctggcagcagatcgtgcaggccaaaatcctcgcccagggcgcggcgctggcggcgaccggcgccgaggcgggcggcttccgcctgctcgcgcggaaggtgagcgccggcgacccggacaatgtcgaggcggaggcagcccggcgttactggccgctgctgctcgggtccggtttccggcgcgataccgatggcggcggcgtcaacgggttactgaactacggttatgccgtgctgcgcgccggcgtcgcgcgtagcgtcatgggagcggggctgcacccgagcctcgggctcaagcacgccaatcgcggcaatcccatggttctggtcgacgatctgatggagccgttccggccggtcgtcgaccgtgaggtgcaccgtctcgtcggccagggcgtgggcgaggtgaccggcgaggccaaggcggcgctcgcgcggatcatgatcgtcgacctgccgaccgcggagaggctgagcccggtcgcgacctgcgccgagcgtcttgccggctcgctcgcccgcgccttcgccggaagcggcgagcgcctcgccttgccggagcccggcctgccgctcggcttctagcgatggggacgttgacgcatggcgcgccgccggcgctttccggataccgcatcatgtggctgatcgtgctgttcgatctgccggtcggcacgcgcaaggagcgcaaggcggcggccggctttcggctgaagctgctcgatctcggcttcgagatgacgcagttttccgtctatctgcgcttctgcgccggcaaggagcaggccgaggcctttcagcgcaggattgagcaggcgatgcccgccgccggcaaagtccacatcatcgcgatcaccgacaagcagtacgagaacatccgcacctatcggggacgaaaccgtgaacaggggccgaaaaatcccgaacagctcgcgctgttctaggcgcgaacgcccgcttctggcacgccggggaaagaaaaaaggccctgcgaacagggccttgagggagattggagtttagcggccgggtgatcgagggccaaccgcaaccctttacgccagcgatgacgatgccaaggcagtttagccgccgggtgatcgagggccaaccaagcgcagacgaaggctcagcgctccggcgcccacgggatcggttgcagcgcgtggccgccgaggcgctggaaggcgcgctggcggcaggagaacacgatgatctgctgctggcgggcctgccggtgcagcgcgtcgaacatgcgctcgatgcggtcgtcgtcggaatagaccagcgcgtcgtcgaggatgaccggcgccggctcgccattctccgcgagcagccgcgcgaaagcgagacgggtcagcacggcgagctgctcgcgcatgccgccgctgagcacgtcgacacgctcgtcgagcccgttccggcgcaccgagcgcggcgtcagcgtcgcctcgtcgaaggtgacggtggcatcctcgaacaacaggccgagcagcggctgaagctcgcgcatcaccggcttgaagtaatgttcgtgcgcggccgagcgggcggcctccagcgcggcgtcgaggcgtgtgagcgtcgcgacctcgcgggtgaagcgctcgacgcgtgcctgcgccgcctccagcgcctcgcgcacctccgcccaggcctcctcgaccgcctcgtccgctcgaatgccgatttcgctgttcagcgcggcgagttccacccgcagccggccggcttcctcgcgcgcggcgtccacgatggagcgcagccgcaggacgcgcgcctcggcgtccgtaagctcgattccacccgtcaattcctcgacgtgctgctgggtatcgcccgcccggcgctgggcttgcgtgaacgtatcgcgcagtgcggcgtgccgggcctcgcgctccggttcggggccgagcgttgcgatcagcgcctcgcgctcggattggagcgcgtgcagggtggcctcggattcgatgagccggctatcggcctgcatccgacgcggctgctgctcgcgggcggcaatgcgggcggcctcgacgcgaagcccggccgcgtcgagcgcgagccgcgcggccacggggtcgcccttgagttcgagcttttcggcgttctcgccggcaaggcgcgtaatctcctcgcgcaaggccgcaagtccgttcggcacgagaagcgcgaggcgctggcgtgccagggcgaggtccgtcgcgtgctggcgaagcgcctcttggcgctgataggcctccgccaggctctcgagaccgagcgaggccagcagggcgcgatgcttcgcctcggccgtggcgagctccgccgcgcccgcctcctcgcgcggcacgcgcagggtgagcgtgccgatgccgtcgatgtcgagatcgacgcttccggcgagcgcgcgctcgccctccggcagcggcgtgccgtcgagccgcacggcgccggtcgcgccgtcgcggtagcgcatccgcagcaccggtgcccgcgccgacatcgcggcacgccgcgccgcgatgtcggcctccatagcttcgatccgcttcaccgcatcgtccggcaggctgagcgccttgagtgcggcctcgatgcgctcgatctcggcgcgcgcagcctcggccgcctccagcgtctggcgctgggcggcgaggcgctcggccgcttcgcgggcgcgcagggccttgtcgagccgccccagcagctcccgcgcctcgcgttcctcgcgctcggcggcctccaccacgcgggcggcctcctcgccggcggcgatcgcgacgcgctgctgctcacgcgccgcgtcgcgctgggcgttgccggccgcgaggcgaggggacaggccggcgagacggtcggcggcggcggcgaaggcgtcgagtgtcgaacgtgcggcgtctgcatgccgggcggcaagctccgcctcggcgcgggcagcgcgcagcgcgtcctgccgggctttcgcctgcgccagctcggcctcggcggccttcagcgcgctcagccgctccgcggtctcctccggcctgtcgatctcggtcagccgggcgcgcgccgcacggcggcggtcgagagcggcgcgcagccgccggacctcctcggcaaggcgctgttcctcgacggcgagccggtcgcgctcctccatggcggcgagatagggaccgccggccttggggcgtccggttgcggtgacgagcttgcccagctcctcctcgcagcgggcgcgcaccgtctccatgcgccgcccgccggtgatcgcctcgacctcgccctgcacggaggagaggatgctttcgcgggcgcgtgtctcgtcgtcctcgcccttcgagcgcttgtcgaggccggtattgccctgccgcacccagagcagcccggccggtcccgccgtgccgccgcgcaccagcgcggcgatgaagcgctccgcctcgtcggcctgcgcgacgaggcggccggagccgaggtcggtcaccgtggcgcgacgaccggcgtagaactgcttgctgatcctgaagcgaccgtcggccgtggcgatatcagcctcgaccagagggctgccgccgctatacggccggagtgactggatcgggctggccgtgccggtgtgcggctggaagaacagcgcatgcagcgcgtcgaagcaggtcgatttgccgtattcgttcgccgcgcacagcacgttcacgccatcgccgatgccctcgacggcgatgccgctaccggcgaagcgccggacattgtggaggcgcagcgcggtcagcctcatgcccgcagagcctcgcaataggagaacaggcgcagcaaggcgctgctcgccacctcccgttcggcggaggaacgagcctcgtcattgctctcggccagcagcgcttccgccgcctgccgcagcgcgccggcgcggtcgatggcatcgagatcgccggcctcgcagtcggtggcgaggccgtccatgtcgagctcgagcagaccgaattccggggcctcgcgtgccaccgcctgctccagcgccgagcgcatggcggggctcgtgcggccgctggcgctgatgcgcagcagcgcatgccgccgcatcgcggcagcgggcaatgcgcgcgcgagggcggccaccgcgtcgtcgccggaaagaagatcgagcggcaccgtgcgccagtcgaagctgccggtctcgatcggtgcgacgtcagccggcgcgccgggcgcggcgatcgagacgaggagcgcgcggccgggctggtcatgcttgaagcggtcgggctccggcgcgccgctgtaccagcagcgttcgccgatgcgcatctgaccgtgccagtcgccgagcgccagatagtcgaggccggcgcgcgccggccggtttggcgcgatcacgtcggcgccgaccccgtcctcggagaagctctgaaccgggccatgcgcgaggccgatgcggatgacgccgtccgccgtcgccgcgtcgtccatccattcggtcaggtcgcgtccgggccggcgcgtcgtgcagggagcggacaggatcgccgcgccgtcgaacaggagcggctccggcgtcagcgcgagatggacattgtccggcagcgcgccctgcgccgcggcccagagatcgtcggccagtagggagtcgtggttgccgggcaggacgatccagcgcaatggggcgccggccatggccgagagcgcctgccgcagcatggccgggctcggggtctcggtgtcgaagctgtcgccggcgagcaatatggtgcccgcgcccgtcgcgcgcgcttcccgcgccagccgctccagcgccatgtgccgcgcctcgcgcagccggccccgcagttcctccggcatgttgccgaagcgcttgccgatatggaggtcggagctgtggacgaagcggaacatggtcctgttcggtggggctcgtggcgactcggggacgtcgatcagctttacctcaaacggctgaggcgtgctgcacggcacgcgcgaccgcctcggcgagccgctcgcgcgaggaggctgcgagccgctcgacaccgagcagccgggcgaaagcgagaggcgggtcatcccagtccagaaagtgccggttctgcatgacgatctgcgcgagctcggcgagcggaatctcggctatctgccggcgcgcctcgctgtcggacggcgcacggtaggcgatgatctccgccacggtgccgcgcttccacaggaagacgccgctcgattcctgggtgcggtcgacgttcttcagatgcagcatgatgcgctcgcggattcggccgccggtcctgagccagccatgggcgcgggcgatcttctgcagcaggaggtcctcgcgcagcggcgcctcgcaatcgatgatcgcctcgaccatggcgctcagcgtgccgtgataggcgatgtcgaagaagcgctccggctcggcgcggatgccggaaaggtcggtcatgcgatagccaagaccgtcgacggatgcgcccgttgcctcgcctgcgttcccgatcacctcgctggacgcgatggagtggccgagcggggattggggcgcgacgatgtggggtggggctgaccgagcgccgagcgaggcaatgcgttcgggcaaggcgggttcgagcggcaccacatcttccggcagaccagccatcggcggcgagccggagctatcgtcggcatcggcctcggccgccagcgtttcgtccgccggctcgacctggtgccccatgtcccaatgcgcgggtgccgtttcggattcgtccgccgtttgctgccggctcgccgccagcagatcgtccagcgcctgatgcaggcgccgcgtggcaccttgggaatcgaaccaccagtcggtcgaccacacacgtacgatgttccagccgagcccccgcagcacctgctcgcgcaccttgtcgcggtcgcgggcggtggcggcccggtgataggtcgcgccgtcgcattcgacgccggcgagataggcgccggcacggtccggatgcttcacgccgatatcgacccggaagccggaaatgcccacctgcgacacggtctgccagccgaggcggtcgagcgcggcgatcaccgcctcctcgaagggcgagtccggcgcgccgaccgatccttcgtcctgcgcgggcagggcgatcgcgccgcgctcggcgaaatcgaggaacgtcttcagatgttgcacgccgactgccttggtgcggtcggtgtcgatgagatcggcggtgaagccggagaacacgacgagttcctgccgcgcccgcgtcaccgcgacgttgagccggcgctcgccgccttcgcggttgagcgcgccgaaatccatggagcgcttgccggccgcgtccgccgcgaaggtggtggagaacagaacgacgtcgcgctcgtcgccctgcacgttctcgaggttcttgacgatcagcggctcgatccgctcctcggcgaagaaccattccagcgcgggctctgcccgccgcgcctcgtcgagcagatcctggataagcgagcgctgctggtcgttgaaggtgatgatgcccagcgtcggccgctcgttctccttcagcttgagccagccgcgcagccgcgcggccgtctcttccgccaccttgccggcctcgatgcggttcgtccggctcttgccgcggtcatagatgccgtccggcacgtggcgcaggcgcacggcgcggtcctcgacggcgggcgaggggaaggtgatcagccggttctggtagtaatgcgcgttcgagaaggcgatcagcgactcgttgcggctgcgatagtgccagcgcaggtcgcgcaccggaatgccggcggccttggcctcgtcgaggatgctttcgagatcgcgctcgtgctcctcgatcgcctcgtcctcttcgttgcgaccgaagaaattggttggcgggagctgcttcggatcgccgacgatgaccgtctgccgcccgcgcgcgatggcgccgaccgcgtcccaggtggtgatctgcgaggcctcgtcgaaaatgacgacgtcgaacagtgcctggttcggcggcagatattgcgcgatggagagcggcgacatcagcatgcagggcgcgagcttggcgaagctgccgggtagggtgccgatcatctcgcggatcgagcggctgggccgctgcagttccatctgatggcgcagcaggccgagctcggaattgcgcggcacgctctgcacccccggcaggccgtgcgcgatggcggcgatcacgcgctgcgtcgcctgtgtccgcacgagatcgtcgatctcgcggaactcgcggatggcgtgctcgtgccggaagcgctggaagtcgcgcaacaccggttcggcgtcgagcgtcggcggcagccaccagcgggcataggcgagacggaaggccgcctcggccccatccgggcggacggcgccgctttcgagatcggcgatcagggccccaagtccatgcgcctcggctgtctgccgggtgccgcaccaatcagtccagccgcgcagcaggccgcgcgcttcgacgagctcggctgctgcggaggcgagatcggtcagcgggcgcgcggcggtcgaggcgaggggatcgctgccggcgatctcggcgaacagccccgcgcccgcgcggaacgtccgcagggcggcgagatagtcgcgggcggcctgccggaccgggtcgttcgacccaccttcagccaggatgggtgcgatcgccgcgacgaccgacctgagctcatcggcggcgcagccgagatggagcaggctttcgcgcaggctggcggcgctggagatatgctcgctgaccgccgcgacgtcggtgtcgaggccggagaagccgatgggcttgccagccaggctgctcgcctccaccgccgagcggctttcctgcatggtccgcagcagcggcaggtccgtttcggggtcgggcatgcccgacgtggcgtggctctggagcagtttgcgcacccgccgcctagcgagccagctcttcggccagatcgccgcggtggcctcgcgccagtcctgttcaagctgctcgacgggaacccgtggaacagtgtcgcgcgcgaaccgcgcggtaagacgggactcagccgtgcggtaggcgacgatggctcgatcgagctggctgagcgcctcgcgcagccggccgaattctggatcgaaggtgatgcggtggtcgcggccggcggtggagcacagggactccgccaggaccgcgaggcgctccatctccggcagcggcgcgtcggcggccggcggcaggccgatgcggccgagaaaggtcgcgagcgccttgcccagcccgacggcgtggccgcgtacgtcattcgccgccgcgaggaggcgctcctgccaggccgagctccattccggcgcggtgactagatgcagcgccgggcgccgctcggtggccgcgaaggcgcggccgatcgtagccgccatctcctcgagcccctggcgggcggcgccgtcatgcgcatcgaggcttgtccaggagagcgccggcgcatgccgcccttcgccctgcgccgccatgcccatcgcctcataggcggtgaggccgttgcgatggcgacggtgcagcgcttcgacataggcgttcagcgcatcgcgacggatcctgagcttctcgttgaccagcacccaatccgaggcggagcgctggccgccatgctcccaggagcgcttgagctgggtgaggaaatgcttccggtcggccttgtttgagtgaagctccaggcagtgatcgccaagcccgtgctcgcgcaggcggcgatagacgacgttgagcgccgctgtcttctcggcgacgaacagcacggttttgccgaccgccaggcagttcgcgatcatgttggcgatggtctggctcttgccggtgccgggcggtccgacgatgacgaaatcgcaacccgaggcggccgccatgctggcggcgatctgcgaggaatcggctggcagcagcgagatgatatcggcgggcgcgaagcgccggtcgatctcgcattcctccgtaacggcggcatgatccgtctcgaaggcctgctcgggtgtatcgatcaggtgccgcacgactcggttctcgcgcagagcgtctgtgcgctcggtgaggtccttccacatcaggaacttggcgaaggagaaggtggagagtgcggtctcgtccagtacctccatgcccggcacgtcgcgcaccgcatggcgcatcgcgccgatcaggcgctgcacgtcgacgccgttctcgtcgcgcggcaactctcctgcgaattgcggcagggcgagagcgaagtcgcgttcgaggaactgcaggagcgtcgcgttgaagcgcggctcgtcctcgtggaagcgcaggaagaattgcgaggtggcgctgcgccggtccagcttcaccggcgccagcaggagcggcgcccgatagctgcgctcgtcggtcggcgccttcttccagcgcaggaagccgactgcgaggaacagcgtgttggcgccaccttccgccatgtcgttgcgcacctgccggtgcagctcgacgaggcgggcttccagcttcttcgcgtcgagcgtggagggcagctcgtcacgcgccagcgcctcggccgcgaagccgcgatcgaggtcccgcccgcgcgtctcgcggtagaggctcgcgtcgcgctcgccgagcgggttctgctc

SEQ ID NO: 4512 - DNA, 16107 bp, synthetic construct
  source 1..16107: mol_type = other DNA
  misc_feature 1..16107: note = Synthetic
atcagcgatgtgtcggatgcagacaagcaagtcgggccccggtttaccccggcaccggtcgcacgtctggttgcccctttgcgccgcaacctgtcggcgcagctcctggtcctcacagttctttttgtgatgctggcagaggtgctgatctatgtgccctcactctctaatttcagggacagctggatcaagcaacgcctggctcaagcacagatcgcaactcttgccctcgaagcaactccggacaatatggtggccaatacgctccgcgatgaacttctgacgaacgcggaagcttttgccattgtcttgcatcgaaatgcggcgcgtcgattgatcctgcgggatgatatgccacctgcaattgatgcgacctacgatctgcgcgatgccaccttcttcgacattatcatggacatgtttgatggcctgatggcggaagatggccgaaccattcgggtaattggtaaacctcgttttgaagggggcgacttcatcgaaattgtctttgacgaaacaccacttcgacaggccatgctcgatttttcgaccaacatcctcaacctatcgatcctgatctccatcatcacggcgtcgcttgtgttttttgcccttaacttctttctggtccggcccatgcggcgtattacagaaaacatggtggccttcagcgaaaagccggacgatgcatcccgcgtcatcgagccatctgcgcgactggatgaaattggtgtcgccgagcgggaattggccgacctccaaacacaggtgcgctcgactttgaaccagcaggcacgtctcgcctcgctgggaaccgcgatcagcaaaatcaaccatgacctgcgaaacattttggcgagcacacagctgatctcagatcgcctcggcagtgtcgacgacccgaccgtgcaaagcttggcacctcgccttttcgcgtccattgaccgtgccattcagctctgtaccaacacgcttaaattcggcagcagcgaagaagcgccgccggcccgtcgcgcagttgcattgaaggacctcgcgactgaagcgatggaggcaatcggtcttgaagacggcagcgccgtctccatccggattgatgtcgctgaggggttggaggtcgacgctgacccggaccatctgttccgtgtttttctcaatctcgggaggaatgcagcccaggccatggaaggaggtggagagatttcagtgtcggcgtttaatgatgtagaatcggtcaccattgaattggcggataccgggccgggcatccccgacgctgcccgcgaacgtctcttccagccgtttggcggaacaacgcgtcagggagggacaggcctcggtcttgcaatatctgcggacctggttcgcgcgcatggtggcacgctggagcttgttgaaaccggtgccgagggaacgcgatttagaatatggatacctcaccgcaaggacgtagtccgcgcggcgcagtaaaagcgattattgagtcgacacacgtctgattaagagcttcgaacaagagaggtgcaccatggaacagatcaaagacggttcacgcgtgcttgtcgcggacataggcggcacctatgcccgtttttcctacgctgatgcatcagttggggtttcatcgctcacgccaccctttgttttggagacagaagggtttgcaacctttggagacatgcttcaggaagtgctggacgaaaccggtcgccctgaagtgaatgccgcagcaatttgcggcgctggaccggttgtcggcgacgctggctctgcatcgattgatatgaccaactgtccctggcaactgacagaggcggagctgacaaaacggctcgggacgtcgcgcgtccagctcgtgaacgatttcgccgcgattgcccatgcgctcccactgtttgatgaagaggaattgttacagcttggaactggagcgccagacaaggatggtcctctcgcggttctgggggcggggaccggccttggtgttgcggggctggtgcccgacggacaggggcattatgcgttgattgatggggaagggggccatgcggacatcgccccagccaacacaagagagcttgccatttacgaacgtctgctccggcggttcggtcatgtgaacgcggaaaccattctgtcaggcagcggtcttgaggcccttcacgatgcgctgtgtgagatggaaggactgacctgcgaacctgtgagtgcagctgaaattgcggcgcgcgcggcgacgggtggtgaaccggtcagtgccgaaactgttcactgttttaccagttggctgggtgccgcggcggccaatgtcgcgctcaccatgggggcaacggggggcgtttacattgctggcggcatcgtgccgcgatggggtggtctctttgaggcggcgcgttttcgcgcgcggttcgagggtcgtggcaaaatcagcgcttatgtgaagccaatccccacctatcttgtcgtggcaccggacccggcgctcaaggggctggtcaagattgcttctggattgttgcgttgagaagatggcgacagttcttgtcgccagtagtctacaaaacaaactctgaatgtcaccctgggcttgatctgggttcgcccttaaacgggcgaccgggatgaccgctagagataacatagctctcccctcgaattacatcagagccgaccactcaaaacaacgccttcgcgccgcgggtcggcgcctccttcaagtccgccttccaaccggcggacgccatggagcccactcgtaatctccttcaccacaacctcatggccgagctgttccagctcggcttttaagtccgcaatgagtgtgccttcttcaatttccagcggcccattgcggttcacatgtcggggttgattgatggcctcctgcatcggcagatgatgatcgagaagcgccacaagcgtctgggtgacataggcaatgatgcggctgccgccgggagatccgatggcgagatggaaatcacccttcgcatcgaacaccatgcttggcgtcatggaggagcgaggccgcttacccggcgctaccgcattggcaacaggctttccgtcaatcacagggcggaaggagaagtcggtgagttggttattgatgaagaacccaccggccatcagatgactgccaaagggcgcttcaatggatgttgtcatggaaaccacattcccttgtccgtccacaatactgaggtgactggtcgaaggacgagaccgggactcgttcggcgtgtagcgagaccccagatcaccggcggcttctggtacgcctgcctccgctttcccgatgctgctggagagatcaatcagccgcgcgcgcgatgcgagatagttttcatcaagcatggccgcgaccggaacgtcgacaaagtctgtgtcaccgatatagaaatcgcggtccgcataggcgagacggctagcttccgtgacgagatgcaccacctcaagggacccgggtctgagcgcccccatatcaaaggattcaagaataccgagggtctgcagacttgttagacccccggaggtggaaggcggcatgccacagacattgtacatacggtaggtaagacagatcggatcgcgcttcaccggttcgtaggccgccatgtctgccatgctgagtgtgccgggacgcgtgggcgcgttttgcgaggcagcaacaatcgcttcggcaatttcccctttgtagaacacgtctgggccccgctcggcgatcagccgcaggctctttgcgtaagccgggtttttaagccgcgtgcccacagcaagggggacagcgttcccgctctcatcttctgtaaagaagtaagcgcgtgaccagggcaggtgcggcagcgcgggagaccaggctatcatcttgttgaggcgcggcgtgacaagaaacccttcttcggcaagacgaatagctggttgaaagaggtccgcccacggcaagcgtccatgttcttgatgtgcgagatgaagcatggcaatggcgccaggcacgccatttgactggcccgtaacaacggcgtcgaaaaaagaaagaggttggcctgcttcatcgagaaagagttgcggtgtggcaccggcgggggctgtttcacgcccgtcataagcttccagcaggcgggcgcgctcgtcccaatgcagcatataggcgccgccgccaatgccggacgattgcggttcgacaagtgtgagaaccagctgcaccgcaatggcagcatcaacagcggagccgcccgccgccaaaattttctggcccgctttgctggcctctgggtgggcagacgagaccatatattctcccgtgcccttgctacgggtatggggcgcgcccgaatggctccaccagatgccaagcggggcagagacaatagcaatgccaatcagcacaagcaaagcgcgggaaagtttcatcaagtcctccttgtgagggaaagcccctccggggtccgtgccgtcgcattgaccccagcatagccagttagcacgcaattgacccagcggcagcagatcgatagcgtccgccactattggtacgtctattctgcgtgccacagtgtgcgaggacaaccatggtcacatcgttcccccccaatggcatacaaacggggccccgtaacttgatcacggatgtcgacgggatcaaggtcggccaggcagaagatggtgccgcgtgcacgggaacgacggtgatcctgcccgacgcgccggtggcggcagcggtgaatgtaatgggcggcgcacctggcacccgagagacagatgcgcttgacccgagtagactgttaggcggtgtcattgatgcagtgacgttgtcgggcggctctgtctatggcctggatgcaggctcgggcgtgaccgcctggctcggtgcgcgcggccggggcttcgaaatcgctggcagtgacgtgcgcgcgccgatcgtgcccggggccatcctcttcgatctctccaatgggggcgacaagggctggggcgaagagcctccctaccggcgtttaggcgctgaagcggcagcggccgcctcggaaagttttgagctgggcaatgctggtgcgggctttggtgcacgggctgggagcgttaagggcggtacggggtctgcctcccttgtgtccggcaacggattgcaaatcggtgcccttatggtcgtcaattcctacgggtcggcaattgtgccgggctctaaggctttctgggcagcaccttttgagagggatggagagtatggcggtgtcgcccctgcgagcctctcttcaaatgcacaatggcttgacggcacaaaggctggtaatccggggctccggcaaaacacgaccattggcattgtggcgaccaatgcggacctcaccgctgctgagtgcaatcgcgttgctgtgatggctcatgacggactggcgcgggcattgcgtcccgcacacgcgccggtggatggcgatgtgatctttgccatcgcgacaggcacacacgctttgagcgacgaaatgcgtgtgcgccacctgtcagagatcggcacgcatgcaggggattgtgttgcgcgagccatcgcccgcggcgtctatgaagcagagaccctgggcgacatgatcggctatcgagacgccgcaaaatgaaggcaccgaccatcatcgcgttttcaggaaagtgagcgcggttatcctgaaaacgcgataaccctaaaaagctgaagcccagctctgatctagtcaaaactgggcttcaaagcagggctttttgcaaatctatgtactgcactttagcgaacgtagatgcgcacttcgttggcagacacaccagaacttgtcgttgctgagagctgaacgcggtctgggggcaggcccatgtcactcatggagcgaaaaacccgctccgcattttcgcgagactgggattgcgccagttgaacatttgccgctgtcccgccagctggtgaaaccgagagaacggtgaattctgcaccagggcgaagctcaagcgcctgagagagggcggtatagagagagcgttcatattcaacatcagggcggtcgaaccggatcgtgaccagtggtggtgtgccgggaacctcacccgctgcgcggggcgcagccgcaaggcgtggtgctgccaatggtgtctgcgacacggaaaggccgccaccataaatctgtccacgcttgatcgcgttagacagtgtgttcagcgctgcgcgctcattggcgagatatgtcgtctgccgcgcagtgtcttcccgcaattcgctgagcaggctgttgatcacaacgatcgtctgcttagtgttgtcttgcagtgtttcgagctgaacatggtcggcatcaaccgcgccggaaaggccgaaggtcgcctggattgtgtcgagcagataggttgccgttgacgcatcgcctgcaatggcagtggagagcgccgtcatattgttgatgtcacgggccatctggtcgagctcagcctgggtctggttccacgcagaaacgaggttcggattgcctggcgtggtgccaacctgcagctttgcttcgataccagccttgcttgcatgataggcgctcgcatgagtgctggtctgggagcggatgctctcaagctcagccgagcgggtgttcatggccgtctgaagccgtcccaggtcaccgcgaagctgcgcaacgcgggcaccaacgggcgttccggttgcctgtccgggtgtgacggtcaagccagcagcggtgctggtcccaagcgctggggcggcatttgcccctgttttagcttcatcgccagcgacggtcggccagatgacctcgtcggcaaaggcgcagccgccgagtgcgagcaccgcactaagggccagaaggcgaaagcttttaggtccaatctgactcgacatgattttttaaatccacacccgttatatggccggtttctggggaaaatcctcaggaaatcggcggttcggcggcttggtagccgcatccgttgttcaaggaacatccaataatctgactggatttcgggacataaggccggtctttcgatccgatcacacccctccaacgcttaagccatcaattggcctcgatgcccctcttgtagccgccgcgcgacagaccagctgtcatgccgcgcgcatgacggcatttcgcggatgcgaaagcaatttaaccaaagggattttaggccacaagtccttatggcgaaagcaagaagtttgattttcggtccttctgagccgcgtcgagccgtaaagaggtatccgcaaaagtaccaggctgccctgagaggcaattaatccaaatttactaaaaaggacgggtctctgcggcttgcctttaaaaggggatcgctataagagtgtcgctctctgagggcggcaatgctttcaggctcggacggcggcccgcgagtgccgcagccgaatgcgcaccggtagctcagctggatagagtacttgactacgaatcaaggggtcgggagttcgaatcttccccggtgcgccactttccataatgaacagacgccgcagggtcattctggctcaagccgcttctccattcgggggaaagctgctttgggaactccgctatgttttctcagggaacagccccggcatccatctcgcagcaagcgttgccggaaaggcgaggcgcaatggggcgcgtgtgctttccgaagcgagcacgccatgttccaaaagtgcggatgagacgcgtcgcgcattgcgatctccggtgttgagcaaggcagcgacctcaccgcgcggcagctcgcctctgtacagcacggcttcgagcacggtgtctgattttggggggagagtgcccgcccgaatttcctcctctgcccagattagggtgcgatcccgcaggcgagcagggcgcatcaactcttccataaacttcacctgatcaatacaggtctccagaaagaactttgcaaacgctccaagcgtctcttcacttagatggcctcgtccatccagatcattgcgtcttgtcaggtcgcacgcggcaagatgctgtttgtatgcattctcgtttcgcgccaaaccccgtgctatcgaccagatgcctccggtatccagagcgctgcgcagcatggcataggacataagccgcgcgacacggccattgccatccagaaacgggtggagccaaagcaagcgatgatgcgcgcaggccgatgcaataatggagtctactttcccgagctttgtgtaggcatcttcgaagcgcttgagaaaacggggcaatgcgccgggacttactggaatatgtcttccgactttcacatcgcgctgacgcagctcaccgggaacaaccttcagacgctcccccgtgtcagggttctctgcccagagcaagtcctccggcagaagggtacaaaagcgacggtgcatatcaaggatgttgtctgttgctgttggctgttcgttcaagccgcccgcatcgatccattcctgaacttcaatatgggcgcgggcttcaagctgtaaatcgcgcttctttggatcttggctatagtcgtcgtttaacgcacgctcaatgtccaccggatgggtgtcgtggccttcaatgagattgctgtaatagcagttcatggagcgcacgaggcctgccagggcaaaggccaccccgtcgggcaggctgcttcgcagccgggtggaatgggtggtaagctcaagtgccagatcggcaagctcatcgcgaaacttggcgctatctttgatgagtaggggctccatcatggttacggcctcgccacgatcttttgccgttattatgtccgctttattgtccggttctacatcgctcataagtttaataataacatgaaattagggtaataacgagagtttttatgagggtcattttgtccgattaatgcgccgcattgaaaaacaatctgaacccaaaagtatacccataaatacccagttttatagcatccgggcctgctctacgccttcgcagatgagcctcatcgtctcggcttatttgggtgaagatcactgacgcatcatgttgaaattcgcgttgctcggcgtttctctatgcaggggagccaagaggtattgtcacaggcctttatgcagcctgcttgattggataagcaaacgtggccgcatatccggtgcggcaggtttcgcatcagattgcagtaattacagggttaggttgggggaaagagagcgttagaggcgcttaaggggctggtggatcaggagattcgacaggaacctcgatctccccgttttctgggtccaaaatggcctcctcaagagcgattctttagaaaaatggtcagagtccaattcgttccaaccctgacgaagagcacctcaagcactagcggctgttcaaaaagggtatagggaaaacggccaaaaacgagccctttggagagaggtcaaaatctcgaaatctgacattcgagggcaagatcgattcgtttttgcgccaaagattagatgcgcggctaagagaggaaggggagcttgtccggtctcgcgcctcaagcccaagcggtgcccgcgccctgcgggcgggcttgacccacgaggcctcaacaagcaagaggctcggcatggcctttaagccgctttgcggcctcaaaggccgcctcccacgcagacaactacccagtgcgaaatcaggcgtttgcgttagccgcatgcacctgtatcgttcccatgtattgaaagccccccgtgttaccaatcacggggatacaaataggaaggggtgagccgaagcccaccccattttgtgtattcacttgttaacggaaagccctcactcaccagaccgctaaatctttggcgtgacttccagtgactacgcaaatcagcatagccagcgcagcgcgacttgcaagagataaggcaaaacaaagattttgaatcgatgttaaactgcggcaaagcttgtttagcggtcctgcggactccggttcaacccggagagcctggttccagccataaaaatgcagagtagctgcctctcgcaatgctaacgaggatagcatgaaaaaagaaacaaatcgcccttaccgcctgggtcttgatgtcgggaccaattccctgggctggttcatggtctggttaaatgaggcgggcgagccaataggccttggtccgggcggcgtgcgtatctttccagatggcatgactaacgacaagaaagcctccaacgcagcagagagacgtcttgcccgcggtcagcgccgaaaccgggaccggtatctggagcgtcggcgtactctgatgagtacaatgattgacggcggtctcatgcctaaagacgaggctgctcgaaaagctctggttgatcttgatccctatgatctccgcgcccgggccatcacggagaaactgccgcttcatcacattggccgcgccttgtttcacctcaatcaacggcgcgggtttaagtccaatcggaagtccgatggcgcgaacgacgaaaaaggggcgattaaagaagcctccagccggttgcgtgaggcgatggctgcggcaaatgcacagacactcggcgtcttcctgaacggaatgcatcgggagcgcgagggggtgcgggtccgcaacaccagttccggcaataaagcaacctacgacttctatccaactcgcgatctgcttgtagatgaattcgaggcgatctggcgtcagcagtcaaaacatcattcgcagctaacggacacggtccgcgaacgcgtatgcgataccatctttttccagcggccactgaaatcaccgcccattggtaaatgcacgctggacccggcacaaaatcctggcgacgctgatgggtttcgcctcgctaaagcacacccgctcagccagcgcttccgcatttggcaggaagtccgcaacctgacggtgggagagaccggcagcacgccgcgtgatctgacaaaggaggaagccgacacgattgcgttggcccttctccagtcgaacgcggtgacgttcgacaagatacgcaaactgctcaggctgcctgagggcgcgcgttttaatctggaaagcgagcggcgcaaggaactgctgggcgatcaaacggctaagcgcctgggggcgaagaagctgtacggaaaaacatggcgcggctttccgctggagcgacaaatagagatcgtcgagcggctgttgtcggagcagaatgaagaagccctcatcgaatggctggtgtttgagacgggcgtggaccgcgaccttgcggaacaaattgccgacgctcctctgccggatgggtatggccgtctcggtcatcgcgccgtcgctgccattcttccgtatatgcaggccggaatgcgctatcacgatgctgccctggcagcgggatatgatcatgtaaaagcgccgaccggagagatattggaccgccttccttattatggagaatggttgcaggatcaggtaatcggcacgggcgaccacagagacaaaaaagaagatcggtggggccgatttcccaacccaacagtacacattggccttgggcaggtccgtcgcgtggtgaatgcgctcataaaaaaatacggtcccccggaacaaatcgttgttgagcttgcccgcaatctcaaaaactcaaaaaaacaaaaggacgagatcgagaaacaacaaaagtcgaatcaacgcaaaaatgaccgccgtcgcgaccaaattaaagcagcgggacacaacgtaaatcatgacactcttctgcggatgcgcttgtgggaagaactgaatgaagacgacgttctggaccggcgctgcccctttactggtgaggtcatctccatcaagcggcttttttcgccagaggttgaggtggaacatctgatcccatttcaaacaagttgggatgatagtgcggccaataagacgctgtgcctgcgtgatgccaaccgggccaaggggaagaaaacagctcatgacgcctttggccattcgccgatgatcaatgggcgcgcttatgactgggtggagatttctgcccgggcggccaatcttcctggaaacaaaaaatggcggtttgaaccggacgcggataagcgttttgaagagcagggagggttcctcgcccggcaattgatggagacgagctggcttgcccgcctgacacggcactatctctcttgcgttacaaacccgaacgaggtctgggttattcctggtcgcttgaccgcgatgatccgcggcaagtggggactgaactccctgctgcccgatcacaatttcaagaacgccaaaaaccgcgcggatcaccgccatcatgcgatagatgctgtggtggccggattgactgaccggggcttgctgcagggtatgtcgcgggcttatgacgatgcacgggacaagattgaggtgcctttgccgtgggagacgttccgggatgatttggacgcagtgcttaaaagaatgattgtctcgcacaagcccgagcatgggcgggaaggcaagctacatgaggcaagtgcctatggcctcaatagacaccaacaggaaggcgagggaaacctcgtctaccgaaaggcgctcacagacttgaacgggagtgagattgctcgcattcgagatgatgaaattcgcacgacgcttcaagcttacattgacgagaacaaaacggaggggcagaagcttgtagaggtgcttgccgcgtttgggaatcgcaccgaccttccctttgcgccccacggcatccgccacgttcgcttgaccaagaaggagaagctggaatatctagtgcccatcagagacaaggaaggtgccgcctacaaggcgtacagttcgggagaaaatctgtttgtcgaactctacgaaacctccgacgggaagtggcacggcgagccagtaacggtcttccaagccaaccaaaaagggtttaagccacgttggcattcccaattccctgaagccaaatttataatgcagatctacaagggcgatctgttgcggttggagcgggaaggggagtcccaaattttcaaggtctatcagctggaggcttctgccaacagattcaagttggcactccacaatgaagccgggtcgcttggaacgcgccacaacgatccagacgatcccttccgatggttgatagcctcctacaaccctcttcatacgatgggcgcacagaaagtgcgtgtggatgcattggggatgccgtggaagcaccagccataagtaaatggcataaatattgagtgtttcgttttatccagtgagcgtgtccagttctggcacaggtgacgggaggaacgaaagtgatcgggcgtattgtcgaaattgccgaagacggtcgtcatcttgcgatgcatcgcgggtttctgaccgtcagtgaaaagagtgttgaaatcgggcgcttgccgcttgacgacatcgctgctctgatcgcgcaggcccacggcctaaccttttccaataatctgatgatcgccctggcggagcgcggcgtacccgtcgttctgtgtggcgctaatcacatgcccgctgcctttatgtggccggtggtgggacatcacgcacaggcagggcgcatggcagatcaggccgctgcgccgagaccgcttaaaaagcggctttggactcaaatcgttcaggcaaaaattagaggtcaaggggccatgcttgcgcaggctggtctgcctcacgggggctttgcactattggctagaaaggtaaagtccggggacccgggtaatgtcgaagcggaagccgcgcgacggtattggcctctgctatttggcaaggagtttcgcaggaaccgctcggcacctggaaccaacgcgctcctgaattatggttacacggttcttcgtgcgggtgtggcccgggcggtgatggcgagcggcctgcatccaagtcttggtctgcagcattcaagccgcgtgaatgcccatgttctggttgatgatcttatggagccattccggcctcttgtggatcgggaagtctggcgattgtgtcagaccgggctttgtgatgtgacgcccgagaccaaagcggaacttgctcgcatcatgattgtagatgtgccgacggaagcggggctaagcccattaatgacggcggctgagcgcttgtgccaatcgctcggacacgcattttccggcgaaggtacgaagctggcgcttcctcttccctcgttgccattgacaggataggagaccgcgatgaaccggcttccggctctaagcggctatcgcattatgtggttaatggttatgtttgatttgccagtgggcacgaagaaggaacgaaagcgcgcgaccggtttccgaaacaggcttctggacctcggatttgagatgagccagttttcggtctacttgcgtcattgcgcgggaaaggaacaggcggagacctatatccggcgaatcgaggtagaaataccgccagcgggaaaggtccacatcgtgcagattacggacaaacagtatgagaatacacgcacgtttagaggaagaaatcgtgaaccaactcaaaaaaatccgaatcagttggtgctgttttgattggcgcgcgctggttttgttgaccgcagagaagaaaaaagcccctgaaaatcaggggcttagttcatttccaagcttagcggtctggtgagtgagagccaaccgcaacctcgacaaagagacgccaatggcaacgagagcttagcggtctggtgagtgagagccaaccgcaacatacacaccatcaatggtgtccattttctcagcttagcggtctggtgagtgagagccaaccgcaacattccagagagcgctccgtgatgcaaacggagcttagcggtctggtgagtgagagccaaccgcaaccagcagggtctcgcactgatttggtgtcgaagcttagcggtctggtgagtgagagccaaccgcaacaggagcgtccgcgcatttgatcctgcatccagcttagcggtctggtgagtgagagccaaccgcaactctgacttggagggaagcggctacgcctgcagcttagcggtctggtgagtgagagccaaccgcaacatcacccctagtgactcaacggcggttgagagcttagcggtctggtgagtgagagccaaccgcaactctctgcgttctcatcgggctggatggtgcagcttagcggtctggtgagtgagagccaaccgcaacccacccgtaaagagatagaaaattgtcaaaagcttagcggtctggtgagtgagagccaaccgcaacgggcgtcagagccgttgatcaacatgcctgagcttagcggtctggtgagtgagagccaaccgcaacagtggaaatggttggatcggcaacatgtttagcttagcggtctggtgagtgagagccaaccgcaaccggaagccctgccgcatgatccgcagctgcagcttagcggtctggtgagtgagagccaaccgcaactgcagcttgatcttattgatgctctcaagcagcttagcggtctggtgagtgagagccaaccgcaactacgctgaccccacacaactgcgtgccggtagcttagcggtctggtgagtgagagccaaccgcaacggttcgttgttcagataggcgctgaccaaaagcttagcggtctggtgagtgagagccaaccgcaacataccttccgcgccacctataaccccttgaagcttagcggtctggtgagtgagagccaaccgcaacgagcgcacaaacgatgtgcccgaaggaatgagcttagcggtctggtgagtgagagccaaccgcaactatgtatcagggcggaaatatgtgggcaccagcttagcggtctggtgagtgagagccaaccgcaacgacttagttctcgaccccttcatggggagcagcttagcggtctggtgagtgagagccaaccgcaaccgacgctctttggcatccagtgcgggttatagcttagcggtctggtgagtgagagccaaccgcaaccaaaagagcggcaatctgaagaaggcgatcagcttagcggtctggtgagtgagagccaaccgcaaccgaccttgcgcacgtaatacttgctcatgtagcttagcggtctggtgagtgagagccaaccgcaactgtcacattgaccaaagaaggagaggctacagcttagcggtctggtgagtgagagccaaccgcaac

SEQ ID NO: 4513 - DNA, 15201 bp, synthetic construct
  misc_feature 1..15201: note = Synthetic
  source 1..15201: mol_type = other DNA
aagggaacaatttcaacgaacgctttcggattctctgtatagccaaacatacctttattgtctggggtcggttgcagcggcaggccaatcagtttcttcagaagtccttcggtcaaatcggcaataatataacaatcagatgtactgagcggtctggtgaatgagggtcaaccgcaacagttagctcaagaggtcgcgcaggatgggcacggccaagagggccaccgccagggcgccgatccgcttgatccaaacaagatcgaccttcacctgggcaagatcggtcttcagttcggtcttcgcctcggccaattcagtcttcagttcgttcttcacctcggccaattcggctttggttgccaagttcgccaagtccgccttggtcgccaagtcgccgccggcgacaccatcctgtagggtttcgctcaaggcttcggcctggccttcggtgaagccggcctggcgcagccgcttgacggccgcgtgcgtatcgaaggcggccatcatgccttgcctcccttctcctgccggatggcattggccttcctttgcagtcgagcgaggcggtccagttcagcggacaggccccgcgctccgccagcggcgcgcaggatttcggcacggcttaattcgtatttctccgccgccgcctcgatgcgggtggcggtctcatcattgaagggcacggtgtactttgttcgggtagaaggtccggcgccggtgctgccgcggttcaggttggtcttctttcatgcctctgtcccttgcggttgctgtccatccccatttagcgcggcgctaaaaaaggtcaaaggcaatctcggaatcggagaggctcacctgtgcggcgatcagccaagcgcaccggatggccggtcacgccagccctacggcggcccctgtggtgcgggaagctctgcggggattcatcaaggaaggcggccaagtccacacaaaagcaggcaaaggggctcaccgctgacgctgtagcggcggtgcagggcagcctggcggtgaaggcggggaatcaacccactggcggcgcgcgatctagcgattgtcgccctaatggcatgcgcgggccttgccgatcggaggcggcagggttggattgggattgcctagagctctgcgccgatggctccgggcagctcaccgtccgccgctcgaagaccgaccgtaccggcgccagacccggcgacagatttccaggaaccgaagaacgcgatagcgccggcttcggacaggccgatgaaactttccgttagcgcagtgtcatagatgccggcgacactgcagcccgggggagaagcgcccttccggcaggggcggcgcagaggcgctgcaagaccgttgcagggtgcctgcaggggccttgcaggccgcttgccggaattgtcgttccgcggcttgcgcgcaggcgccactttctatgtacaaaccgcttcaagaataatgtggtatggactcagccattaagaccgagtctagcgaagaaggcggagttgcgtgccttggcatcctttaccagcttggcaaagggaacaatttcaacgaacgcttgcggattctccgtatagccaaacctcccttcattgtctggggtcggttgcagcggcaggccaatcagtttctattgtctggggtcggttgcagcggcaggccaatcagtttcttctcaagtccttaggtcaaatcggcaataatataacaatcggatgtactgagcggtctggtaaatgagggtcaaccgcaacagttagctcaagaggtcgcgcaggatgggcacggccaagagggctaccgccagggcgccgatccgcttgatccaaacaagatcgaccttcacctgggcaagatcggtcttcagttcggtcttcacttcggccaattcggctttggttgccaagttcgccaagtctgccttggtcgccaagtctccgccggtaacgccgtcctgtagggtttcgctcaaggcttcggcctggtcttcggtgaagccggcctggcgcagccgcttgacggccgcgtgcgtatcgaaggccgccatcatgccctgccgtccctctcctgccggatggcattggccttcctttgcagtcgagcgaggcggtccagttcagcggacaggtcccgcgctccgccagcggcgcgcaggatttcggcacggcttaattcgtatttctccgccgccgccttgatgcggttggcggtctcatcattgaagggcacggtgtacttgttcgggtagtaaggtccggcgccggtgccgcctcggttcaggttggtcttctttcatgccgctgtcccttgcagttgctgtccatccccatttagcgcggcgctaaaaaaggtcaaaggcaatctgtattgcctcttgaaaaaaggctgtctgaccgttgatgtgtaccttaacggacacccggaatcggaaagaggctcaagaggctcacctgtgcggcgatcagccaagcgcaccggatggccggtcacgccagccctacggcggcccctgtggtgcgggaagctctgcggggattcaccaggaaggcagccaagtccacacaaaagcaggcaaaggggctcaccgctgacgctgtggcggcggtgcggggcagcctggcggtgaaggcggggatcctggcggcgcgcgatctagcgattgtcgccctaatggcatgcacgggccttgccgatcggaggcggcagggctggattgggattgcctagagctctgcgccgagggctccgggcgtctcactgtccgccgctcgaagaccgaccgtatcggcgccaaacccggcgacagatttccaggaaccgaagaacgcgatagcgccggcttcgaacaggccggtgacactttccgttagcgcagtatcgtagctgccgccgacactgccgcctggggagaagtgccgttccggcagggcggcggcagaggtgctgcaaggcccctgcacggcccttgcaggcaccgtgcagggactgtcacggggggcacgaggtgtgggttcgatgccgtcgaagaccggtggcggggtgaagtgcagtgctgaaggcctccatcggcggcaacagcgcatttgtctccgacggcttgagaggaagacgattaacacggccgacgatatcattaatcaagttcgccatgtgtctagcgactcctgaattccgtaaggcgcgtgcagtctgtcagccgctccaagttcttcagcgtgaagacctttccacgagttgcaacgatgagcttcttcatatcttcccgacgaaccttgaagccgcgtcctgcgatacaggcaataacctcaaaccggggtggatccttgggctccacaccttcgcgggacaggcttccgaggtgttgtacgcgcgtgaccttatcccgtgccgtcccgtcatcctcggtgatcttggcttcaattacgatctgcggattgaattcgtcgggaacgatgaaatccggtgcctggtcaaatccagtgacgcgctctgcgcgtttggtcttacgaaaaccaattcctgcatccgccatgacgccctcgatagcggtctccaagacgtcgccgacaagctcggatagggagtccctatggccagcgaaggggcgacctaggaagcgttcgtaaaggaccatggcgtaaggcacgccaagatcggcaagcggttgcagactgacgaggccgtcgcgcgtgtcggctttgtcgagacgatgaatcaggggcgtggggaatcaggggcgcggggaatcaggggcgcgggttcggccggagcgccattgacgaggagctgacaggcgacggtcaccagagcgcgaaggcgctgttcggtgacaccgccatcgatccgaagtggtgtgagcgggttcatacggattttccgatccaaggaccgaatggcgccctgggttacatcgacattgctctcttcggtcgtgacgtaggcccattccggcggtgtaaagccgagcatggtgcgcaatacgataaaggcaatgggcacctggtacagggtctcgattatctgttccggcgtgaggttccggaaaccgtcggtggcacgcttcaatgcttcgtagccgcgctcgaacacagggtagtcgatgaagccgtcgcctctgggcagcgtcaaaaactccgagcgaagtgcgccgaagactgcatcgacatagttatccaggtcggcttcaaccgcctcgaacggtgcttcaaaaggaaacggcatcggcaacttcccggacagatggcggtgtgccggtaatgggcgccgccggctgaacagcctttgccgcgagtctatcgatcagcgccttggcatctccaaacccggagactgttttggcgaggttttcgagcttatcgggggtcggggccttgacatcccatgctgagcgaagacgccagatcgccatgcggaggagatgaccgaagacaatgcagcggatgtcgcctgcggtcggtttcatgccggcgcttcgaagttgggcaagctcccgccccaccagttcggcgagctcctccgtatcctcgaacagcgtgtctcggcgcacctgcccgctctggcggcacacaaagacggtatcgacgatagatgaacctgtgccgtggatatggatcgacccgcccatctccgccgggcatgggatggttgccgagcaggtaagtcctgagtcgaggatcgccacgccgatggcgcgataagcctcgatcctgttatggtggaaagtaaaggcgagcggcgatcccggtttcagggcgcgtgcaatggcgctatagacgcttgcgatcccgtcggtgaaatgatcgagggtgcgggcgagtgttttgttgccggtcagttcgtcgggagagcgcgtggactcccgatcgaatccctcggcctcatgtccgatgagcgatcgcagccagacatagcagaaatccatcaactcgccgtattggacattcccgaaatagggtgggtcggtgaatacggcatccaggctgttcggctccaaatcgaggttggtcgagctggcgcatcggatcgagaccttccgttgccgggcagcgttgaaccgctcgccgatccactcgcccgggacggggacgattttcctgtgcccccggctgcggtcgacctcgaagggagcatcgcaaaagcttttcgctttctcgtatttgccgacgatgttggtccatccaccggagccgacgccggttccccggccatcgacgatgcccagcaggttcgattcgcactgaacctgaccgacggggaagccgtggacggagaagatgtccaaggacttcaaggccatcgtgtcgtagcggcaaagcatattctgatagcgcaggagatcggaaaggttggtagcgagagcgtgccggatgcgctcatcctcgacggctgcaatcaacctcgcgctcagctccaagccgagaagctggcgctcattgaacagatcgcgataccggacgtatccccagcgatgcaggcggccggtttcgtcgccgggcaggatcgattgctcaggcacatagcggcagccggtttcttgccaccgtgagcgaatggccgcgtagcggtccaaatccctggcatcgggtttcttgaagaagcgtccgcggcgatcggccttacgctcggggttatagtactcgatagcgaacatccggtgttgcggcggccctgcctctggccgtggatagctgttctggtagccgcaattcgggcaggtgcagcgattgcggcgtgccggaccttttagcgcaagccttgacttgcagtcccggcacttacctggattatctggatcggcgacctcgttcagcgcgccgcaatcggcgcataggagaacatgggccggatggcgtgtatcgtcggcgatgcggtagccggggaatagatcgaccgtgtggccgcagctaccgcaatcgattgtcttgacccagaggaagtatttcaccggaacgccgcagtcgccatagagcgggcagtcggttcggtaggccgccccgatatcggccgtcaaccgctcgatcagtgtgtttgcttcacgtctatacgcggcgatatccaagtgttcgatctcttcgcgaaggatccatgccgccatggggttaatatcgaaacccagtacgtcgcagccgacacgattggcctccaagagcggagtgccgccgcccatgaacggatcggctacaagccggccgggaaagtcattggcttcgaagaagctgtccgtgagcgggcggttgccgaattcggacaagaccatgccacggaaaagcgttcccggccggcgcgcaaaccatttatggacggcaataatcggccggtagttttgctggatttgtttctcccgcagagccatgccggcgatgaaggggataaggaagcggtcctcgatgggcatggccggttttcatccggacgattgccggtcagacgattgccggtcactggccggaagagacgaaagggtaagggatggaaggaacaactatagaataggcggcaagagaggccatgcgcggcggcgcggacgcgccagcgcctttgcaagctatcgccgggatttcggatcgcgatgccggtcacgggcgccttccttgtgtggggagtattctagttaccgattgcagcgcactccagcgccgatccgctcaagatcttggaccggtcccggaagataggtgcccggcggcgatcttcggaggccgggcggggccgggcgatgtagtgcagctgcgccggcgccgtgccgccgggcgcaggcgccgcccggctggaggtcttgcgccaggggggtcttacgccaggggggtcttacgattgagcgggtagatcgccatcgctgcacagctggcgcgcagtctatccatcctgccgggccttgtccggggcggagggttgggagttcgggggaaccggccgctatgggttctccctcggctgtttgcggggacgaaacccggcgcaggtttcgaaagcagcctaaggggctgccagtggcattgcctaagtccaagggccgcgcaggggccttgcaggccgcgtgccggccgaacctctccccgcagggggaagcgccgttccggcgggggcggcgcagaggtgctgcacggccgttgcagggtgcctgcaaggaccgtgcaggggtcgtgcaagggtcgtgcagggccacttgccggggagcctagccgaggcgttcggcttcgacgggtagtttagggagggggcagtttaggcgggcggccatgccgccagccatcccgagcctcttacaaggtagagcgggtaccgcaggattgggacaggagccccgcagggggaagcgccgttccgacagggcggcggcagcggcggcaaagaagaaggggcaggccgcagcctgccccattttgtgccttgttggcttgttaacgggaaaccctcactcaccagaccgctaaatcccggcaggcttcgccgtgtcaacgaaagctaaggtatgccagtcttgcagcgggatcaaggggaaaaatcgggcaaggggaaaaaattggggcgccgggcgatgtggagcggcagccgcatggcctgttctgcctggccgtcaacagggactgacagtcggggcaggtcacgctatgctatagtgctgccggagtggagaggtcaagagggccgattgcttcagccgatcctgccctccacccgcgtgcaagcgatcctatcggaaagggaatggcaatggcagaacagcgcccctaccgcctcggtctggaccttggcgccaactcgctcggctgggcgatgatctggctggatgagggtcccagcggtctcggcccggctggcgtgcggatttttcccgatgggcgcgatccgcaaagcaagagttccaatgcggtgtcgcggcgggtggcgcgcggggcgcggcggcggcgggaccgctatctgcagcggcgcaaggagttgatggcggcgctgatcgaggccgggctgatgccggccggggaggccgagcgcaagaagttacaggatcgcgatccttacgagatccgggcgcggggattggataagcggctgagcctgcacgaactggggcgggcgctgttccacatcaaccagcggcgcggcttcaagtccaaccgcaagaccgaccggcagaacgaagagggcggggtcatcgccaaggcggccgggaagcttgagcagatgatgctggaggagggcgcccggactctgggcgagcttctggccggccgccatagcggccggcttggcgtgcgggcgcggccagaagctcgccctagtaacgtcagcagcggcgccaaggcagcctacgaattctacccgacgcgggacatgctggagcaggagtttgtcaagctctgggaggtgcagcgcagacagcatccggagttgacggcggagctgcacggtaagctgcaccacattatctttttccagcggccgctggtcccgccgcaggttggcaagtgtgcgctggacccggccaagaggcccgacgaccgggagggcttccgctgcccctgggcgcatcccctggcgcagcggtttcgcattctgcaggaagtgaacaatctcacggccggcccggtcggcgagcgcaagcgcaagctgacggccggcgagcgttgcaaggcgctgcatgagctgctgcagaccggggccgtcaccttcgaagatctgcgcacggcgctgaagctggagtccggctggatcttcaacctgcactcggatcggcgcgacgagttgaagggcgacgagaccgccgcggctctgtgcagcagtaaggaggctctcggtaagttcgataggaagatctggcacagcttcccggcagagcggcaagccgggatcgtcgagcgcttgctggaggaggaagacgaagaagagctgatcgcctggctgatcgaagagaccggggtctccaaagagcaggcctatgccatcgccactgtgaccttgcccgacagccattgccggctgggcctgcgggcgctgaaggccatcgtgccgttcatggaggagggacagcgctatcaccaggcggccgcgagtgccggctacgatcatgcccgcctgccgaccggcgaaattcgcgaaaacctgccctactacggcgaaattctgcaggaccaggtgctgggctccggcgatgcgcgcgacccggcggagcagcgctggggccgcctgcccaatccgacggtgcacatcgggctcaatcagctgcggcgcgtcgtcaatgccctcattcggcgcttcgggccgccgcaggagatcgtggtggagatggcccgcagcttcaagctctcgccggaccaactgcgcaagctggagctggagcagagggagaatcagcgcaagaacgacgaccgccgtaaagaactggagaaactgggtttgccggtcaactacggcaatctcttgaaattgcggctgtgggaggagctgaaccctaaagacgcgctggaccgccagtgccccttcaccggcgagcaaatcggtatgaggcgcctgctgtcggaggaggtggagatcgagcatctgctccccttctcgcgctcctgggacgacagcccggccaacaagacggtgtgtctgcgcgcggccaaccgtgccaagggccagaaggccccctatgaagccttcgggtcttcacctacctattccggccagtattacgattgggaggcgatcaagctgcgggccaaggcactgccgccgaacaagcgctggcgcttcgaccccgacgccatgcagcgcttcgaggccggcggcggcttcctggcccgccagttgaacgagacctcgtggttggcccgtctggccaagcagtacctcggcgcggtgaccgatccgcggaagatctgggtggtccccggccgcctgaccgccctgctgcgccgcaagtggggactggacgacctgctggattcggaaggcgggcgcaagaaccgcaacgaccatcgccatcatgccctggatgcgctgaccgccggtctgaccgaccgcgggctcctgcagcgcatggcgcgggagtacgacgaggagcgcgagcgtatcgtagtcaagccgccatgggagggcttccggcaggatgtggcgcgggtgctggaggccatcctggtctcgcacaagccggaccacggcgcgcagggccagctgcacgaagatacggcctacggccggatcgccggggccaaggaaggcgagggcaatctggtctaccgcaagcccttcttggccttgaaggagaccgaggtcgaacgcattcgcgatgcccgattgcgtgacgagttgcaggcggcgatcggcagcggcaaagcggcggacaagcggctgccgaacatcctggcggagttcgccaaggagtggggcgaaaggcacggtcacggcgcgctgcgccacgtccgtctgaccaagacggagaagccggactatctggtgcacattggcgatggggcggcgccctacaaggcctacagcgccggggcgaacctctgcgtggagctctacgagacgccggacggcaaatggcggggcgaggcggtctcgctctaccaggcgaaccaagcggggcaccagccgcgttggccggcagaagagcccggggcgcgcctggtcatgcgcctgcacaagggggactgcatctcgttggaggaggacggacagaggcgctacgtgctggtcaaacaactaagggcccgcggccgcagcatgttcctggccgagcatcacgaagcaggtgccctgcagacgaggcatgacgacaaggaggaccccttccgctggcgcatgtatccctacgataagctgcgccagctgaaggccgagccggtccgcatcgacgagatcgggcggccctggcggctcggccgcgcgctcccttggcaagaatggatcgagcggtccaggcggctgacgccgaagccggggcggcggtgatcgggcgcattgtcgagatcgccgaggaggggcggcatgccgcggtcagccgcggctttctcaccgtcgccgggggcggtgcaaccttgggccgggtggcgctggacgatctggcggcggtgatctttaacgcgcatgggatcacggtttccaacagcctgatggtgcggctggcggagcgccgcattcccctggtgctctgcggggcgaaccatctgccggccgccctggtctggccggtggccggccatcatgcgcagagcggccggatcgccgatcaggcggcggcctccaagccgctgaagaagcggctgtggacccagatcgtgcaggccaagatccggcagcagggggccactctggcgcaatgcggggcgccctacggcggctttgcgctgctggcccgcaaggtgaagagcggcgatccggagaacgtggaggcggaggcggcccggcgctattggccgctgctgttcgggcgcggattccgccgcgaccgccaggccggcggcctcaacgggctgttgaactacggctataccgtgctgcgggccggcgtggcccgggcggtgatcgccagcggacttacgcccagcctgggcctgatgcattccagccgggtcaatgcgcatgtgctggtcgacgatctgatggagcccttccggccgaccgtcgaccgcgaggtctggcgcctggtccgggagggcatggaagaggtcaccggcgaggccaaggcggaactggcgcgcctgatgatcgtcgatctgcccaccaaggaaggaatgagcccgatgatgaccgcagccgaacgcctggcccaatccctggccagggcctttgccggagaggaggcgcgcctggccttgccgctggaccgcctgccgcttaccggatgagcgggcgccgcccggcgctgagcggataccggatcttgtggcttctggtcatgttcgacctgccggtgggcagcaaggcggaacgccgccacgccagcggcttccgccatgccctgcaggaccaaggcttccagatgagccagttctccgtctatgcccgccactgcgccggcaaggaagccgccgagcgctacatcaaggaggtcgagcgtgccttgccccccgccggcgcggtccatatcctgaccttcaccgaccggcagtatgagaacatgaagaccttcaaggggaaaaaacgtgaacgcggccgccgaaaccccgagcaattcgtcctcttctaggctggccgggctgctttccggcccgccgcagacaagaaaaaggccctgtttccagggccttaggtggatatactacttagcggtctggtgagtgagggtcaaccgcaacaatctcttccgcatcctgcgcgaccatccgtacttagcggtctggtgagtgagggtcaaccgcaactgcatcgatccgccctatttcgagaagggctacttagcggtctggtgagtgagggtcaaccgcaacgctatgcgtctccacactcatgtcatctcttacttagcggtctggtgagtgagggtcaaccgcaacagatcgcggcacttataaatcttttgctcgtacttacaacccatcaaccgcgcgagcctcctgctagactacttagcggtctggtgagtgagggtcaaccgcaacgcggttacggcgagtatgagggcgaggcgctacttagcggtctggtgagtgagggtcaaccgcaacaaccacggggcctacctcacacaaaacgcatacttagcggtctggtgagtgagggtcaaccgcaacgcggtcgaggcgcgggtgttttacgatatctacttagcggtctggtgagtgagggtcaaccgcaactcgccttgcagcaggcaacgaatgaattggtacttagcggtctggtgagtgagggtcaaccgcaacagttccactgggcttccggcgctggcatcatacttagcggtctggtgagtgagggtcaaccgcaacggacctgtcgcctggatggtgcggtttcgatacctagcggtctggtgagtgagggtcaaccgcaaccgcatgccgaacgaatctgacgcaacaacagttagcctaagaggtcgcgcaggatgggcacggccaaaagggccacgaccaaggcgccgatccgcttaatccaaacaagatcgttctttacttcgaccaattcggctttggttgccaagcccgccaattgggtcttcacctcggccatctcggtcttcagttcgttcttcacttcggccaattcggctttggttgccaagttcgccaagtccgctttggtcgccaggtcgccgccggtgacactgtcctgcagggtttcgctcaaggcttcggcctggccttcggtgaagccggcctggcgcagccgcttgacggcggcgtgcgtatcgaaggctgccatcatgccctgccgcctctctcctgccgatcctgccggatggtattggccttcctttgcagtcgagcgaagcggtccagttcgaccggtaggcccggctccgccgccacctcgatacgagcgtaggtctcgccgttgagcggcagggtcagcttgtgcgggtagaaggtccggcgccggtgccgccgcggtgccttcggttggtcctcgttcatgcccccgtcctttgccgttgctgcgtagccagcagcttactgcatatttaagaaaatgtcaagggcgttttgtctttattcttgaaatagggcatgcttccgttgagtgtaacttagcggtccggtgagtgagggtcaaccgcaagggctccagtggactgaagaagaggttcgccagctgtgcagtgaagaaagtctttttcagatccggtccgacttgaggtgcggaagcggctggaaacgcggttttcgagggtgcagagggcttgggaaacccgttgccggggtgcttgcagggcattgcaagggcgttgcaagtcgcgtgcggagtgtctgttccgcggaaccgccccccgcggctggcgcgcgggcgtcctttgggaaaccggcatagcagggtccgtggcccgtgcccgtcatcgcatggggccttaccccgcacaaacgcggcggcagagggcatgggaaaaggcttgggcgccctttgggtggctccggccgcgcggcggtgccaaagcggcgggttggccggcgcatggcacggtcgcttgggcttgagaagtttacccgccgccggcggtgcccgagacggcgcccaagacagtaacgaacgcggcctccgggcgggcgcaaattgtgcccgccccggttcgccacgcctcccggccctggcttacagcaggcggctcaacaggggcgccgggcgcgatggctttcgcgatcctggtaaggaaccctgttagatcctgttagactctgggggaaggggggaccgcccgcgcccggctgccggcgcagagtgtttaacggctgggtgccgttaatccctggacgccgctaattccgcgttacctgcttggcgccgaaggccccgatgatgctgttgggctttctttcgaaagttccagcggtttcggcatggccctcaccatagaaggcaccgctgatatggtctcgaaatccgtagctcttcacatagcggccgtctgcggcgaccggaatgtttgcgaagcggaggctgtttttaggtccaccttgcgcatcttcaaccatgtgcggcgcaccgaagctgtcgtaatccctgatgttgaagaagtgcgcatcgagcgtcgcgttgctcatgtcgaacgtcagttctgcatcgccgcggaggatatggtcttttgcatcgccttccagaacggtccccaccatcgaaccgcgccagaccgcatttacggccggagggctgcccgtcagttcgccggccgccacgaccatgcgggcagtgttctttgcgccattgtttcttacaaaagtgccgccgggcgcgacgaagaagcccgcgcggtccatccaggcgccgaaagacagaggagcgccgatggcgttgttgcccgaactgtcaagggtcagatagatgcctcgatgtggcaggaccacatgcacgtcgtccgcattatagtccccgttaccgtcaatcggaagaaaatcccctggatcgaagatcgggatgtcagcaaattttgtttttagcttacagctcatacctgtacaactgacgctcctttttaaggccggattgttgtcccggtcttggtaaaagcgcaggtgcgcgtacaaattttcggtttccttgttctcggtttccttg

SEQ ID NO: 4514 - DNA, 14312 bp, synthetic construct
  source 1..14312: mol_type = other DNA
  misc_feature 1..14312: note = Synthetic
tcgatgccctgttcccgcagctcgatccggtctctcataactacccgatccgcagaggcgcggtcggcgtcggcttccacaccgatccggcaagaggaccataggccctcatgccgcacgacaaggcgcgagacggccttcggattatgcatccggatccgtctcgcggtatttgtagaagcttcgctttcgtgcgtaagcgctcgggtccgcttggtgcttgcaagcaatccttacagagaaggtccgggccgatacaaagcattccgtacgcgcgtaaatcagctatcgaagacatcatgctccgcgtcatctcgttcagtgaatgctgaacgatgcagactctaacaagcgcactgccggtatagtctccgggagttatctctgacggaacggtcaccacaaaatggaaggggcaccccgcagggtgccccattttgtgcataagcttgttaacgggaggccctcaatcaccagtccgctaaaaccagtaagtctgccgtaacgctattacaccttaagactgtgaaatatcacccctaactttgtcaagaggtgtggctaccagaaacatctggtagccacacagtcaattcttagaatcgaagcttgagatcaaagcgaatccaaagcatacgaggaaagaattttcttaggtatcttatcgtcattgtagctttctccgatcttaacggactggagtaagccaaccgcaactgtttcagttgtcgttgtagctatcacactacaacgaccacacgcacacgctgtgtgtattgaatggattcgacttgcgagcaaccatcaatgttaatagaggtttgttttccacattttgagaggcgtcggccatctcgctatgaaaaagattgagatacccggagtctcgtcagttttgtaccgccttggcctcgacctcggctccaactccctcggctggttcgtcacgtatcttgagaagcgcggcgaacggtatgagcccgttgggctcggtcccggcggcgtccgcatctttcccgatggccgtgatccgcagtccggcatgtccaacgccgtcgatcgccggatggcgcgcggcgcgcgcaagcggcgcgaccgcttcgtcgatcgtcgcaaaaaactgatcgcagcgctcatcaaatacggattgcttccgaacgatacccgcccgcgccaggcgcttgaaacccttgatccctatgcgctgcgcaagacggcgctgacagatgccctgcccgcgcatcatgtcggtcgcgcgctgtttcacctcaaccagcgccgcggctttcagtcgaaccgcaagaccgacagcaagcagagcgagggcggcgccatcaagcaggcggcgtcgaaactcgatgcggcgatgaaggaagcaaacgccagcacgctcggcgcattcttcgctgacatgcacctgcgccaatcctatgaagagcggcagaaagccatccgcgccgaactcgtacggctcggcaaggaccatctcaccggcaacgcccgcaagaagatctgggccagggtccgcaagcgcctgttcggcaacgaggtgctgccccagggagatgcgccggatggcgtccgtgcccgcgcccacatctcaggcgccaaggcgagctacgatttctatcccacccgcgcgatgctgctggatgaattcaacgccatctggacggcacagcgcgcgcatcatgcggcgatgacggatgatgcgagggcggagatcgcgcacatcatcttcttccagcgtcctcttaaacccgcgatcgtcggcaaatgcacgctcgatcccgcgacgcgtcctttcaaggaagatccggaaggctatcgcgcgccatggtcgcatccgctggcgcagcggtttcgtattctctcggaggcgcgcaaccttgagattcgggaaaccggcaagggatcgcgcaagctcaccaaggagcaaagcgacctcgtcgtcgccgcgttgctggccaacaaggaagtaaaattcgacaagctgcgcacgctgctcaagctgcctgcggaagcgaagttcaatctcgaatccgaccggcgcgcggcgctcgacggcgaccagaccgcagccaggttgtcggacaaaaaagggttcggcaaggcgtggcgcggcttcccgctggagcggcagatcgcaatcgtggcgaagcttgaagaaaccgaagacgaaaacgaactgatcgcatggctcgcaagcgaatgcgcgctcgatggcgcggccgcggcgcgcgtcgccaacacgacgctgccggacggccactgccggctcgggctgcgtgcgatccggaatattctgcccatcatgcagaacgaagcagatgatgatgaagtgtcgggcgcgggctatcatatcgcggctcaacgcgccggctacgaccatgcaaagctaccgaccggagaacagctcgaccgcctgccgtattacggccagtggctacaggacgccgtggtcggcagcggcgacgcgcgggatcagaaggagaaacaatacggccagtttccgaatccgacagtacatatcgggctggggcaattgcgccgcatcgtcaatgagctgatcgacaagtatggtccgcctgccgaaatttcgatcgaattcacccgcgcactgaagctgtccgaacagcaaaagacggagaagcagcgcgagcaacgcaggaaccaggagaaaaacaaagcgcgcgctgaggagctggccaagttcgggcatcccgcaaatccgcgcaacctgcttaaaatgcggctgtgggaagaactcgcgcatgatcctctcgatcgcaaatgcgtttacacgggcgagcagatcagcatcgaacggctcctgtccgatgaggtcgacatcgaccacatccttccggtcgcgatgacgctggatgacagcgcggccaacaagatcatctgcatgcgttacgccaaccgccacaagcgcaagatgaccccgttcgaggcgttcggatcgagcccgaccattcagggccatcgctacaattgggacgacatcgcggcccgcgccgccggtctgccgcgcaacaagcgctggcgattcgacgccgacgcccgtggggaattcgacaagcgcggaggctttctcgcgcggcagctcaacgaaacgggctggctggcgcggcttgcgaaacagtatctcggcgctgtgaccgatccgaaccggatctgggtggtgcccggccgcctcaccggtatgctgcgcggcaagtggagtctcaatgcactgctgccggatcacaactatgccggcgtgcagggtaaagcagaggaattccttgcgtccaccgacgacatggagttctccggcgtcaagaaccgcgccgatcaccgccatcacgccatcgacggcctggtcgttgcgctgacggatcgctcactgctctggaagatggctaacgcctatgacgaggaacgagagaaattcatcatcgatccgccatggccgaccatgcgcgacgatctcaagacgtcgctcgacaaaatggtggtctcgcacaagcctgatcacggcatcgaaggcaagctgcacgaagacagcgcctacggcttcgtcaagccattggacatcacgggccagacagaagaagaggacggaaaccttgtttatcgcaaggcgatcgaagggctgaatgagaacgaggtcgatcgcatccgcgatcgtcgcctgcgcagaatcgtgcgcgagcatgttgatgccgaaaagaaaaagggcgtggcgctggctgacgcgcttcgacagttgaaagaaccgtccgattcgtatccgcaactcaagcatggcttgcggcacatccgaattctcaagaaggagaaggcggattacctcgttccgattaccaaccaaaccaccggcgccgtatacaaggcatacagtgcgggcgagaatttctgtgtggaagttttcgagacggccgacggtaaatggaacggcgaggcggtgcgtcgtttcgatgccaacaagaagaacgccggcccaaggatagcgcatgcggtgcaatggcgtaacgccgaaggcgcgaagctggtgatgcgaatccataagggggatctgatcaggctcgatcatgacggccgaacccggatcatggttgtccatcggctcgatgcgtcagcagcacgtttcaagctcgccgagcacaacgaaaccggcaatctcgacaagcgtcatgcaaccgacaacgagatcgatcccttccgctggctgatggcctcctacaatacgctgaagaagctgaatgccgtgccggtgcgcgttgacgaactcgggcgggtatggcgcatcgtgccgaattaaccttgtcttaacacacgtgttgcgagcattcgtagcaccgcctcataatcctgcgacgcgaaggctcgcccgcaggaggttcaccacatggtgggacgcgtagtggaagtcgccggcgacggtcggcatctcgcgaccgaacgcggcttcatgatcgtgtccgagaaggccggcgaaattggacgggtgcctctcgatgacgtcgcggcggtgatcgcgaacgcgcatggcctgacctactcgaacaacctgcttgtcaatctggcggctcgcggcgtgccggtggttctttgcggagccaatcaccgtcccgcagccgtggtgtggccggtcgacggccatcatgcacaggccggccgcatgaacgatcaagccaatgcgtcggcgccgctgaaaaagcgactctggcagcagatcgttcaggccaagatccttgcacaaggcgccacgcttgccgcggttggagcagaggctggaggattcaggctgctggcccgcaaggtgcggaccggcgatccggacaatgtcgaagccgaagcggcgcggcgctattggcggcttctgctcggatctgactttcgacgcgatcaggacggcggcggcatcaatggcctgctcaactatggctacgcggtgctgcgcgccgccaccgcgcgcgctgtcatggctgcgggccttcatcccagccttggactgaaacactcgaaccgaggcaatgcgcttgtcctggtcgatgacctgatggagccgttccgtccggtggtggaccgcgaagtccatcgacttaagatcgagggagtcgtcgatgtcacaaccgatgccaaggcggcgctggctcgcacgatggtcatcgacctccccacgagcgagggattgagcccgatgatggtttgcctcgagcgcctgacaagttcactggcgaaagcctacgccggcgaagccaatcaactgaccttaccgcagccgggtctgcctctgggcttttgaacatggcgggcgccccgacccgatcgagatcaccgccggcactttcgggatatcggatcatgtggcttgtcgtcctgttcgacctgccggtcggcaccaagaaagaacgaaaagcggccagcggctttcgactgaagcttctcgatctgggcttcgagatgagccagttttctgtatatttgcgattctgcgcgggcaaggaacaggctgcggcttacgaacgcaagatcgagcagttcatgccggcgtccggaaagatccacattatggcgatcaccgataagcagtacgaaaacatccggacctatcgcggaaggaaacgcgaacggagcccggaaaatccgaatcagttcgttctgttctgagggaattcacgttgatcgcccctccccgcagcaaggaaaaaggccctgtttccaagaccttgatccgacttggattctagcggactggtgattgagggccaaccgcaacccaaaacgtcgttgacgcgtctgttctgttattctagcggactggtgattgagggccaaccgcaacctgaatcagtttgacgacactcatgctcgaattctagcggactggtgattgagggccaaccgcaacagaaacggtcagggttcaaagggtggcgtaattctagcggactggtgattgagggccaaccgcaaccacgcccttgcgcacccggtggatcgcgtcattctagcggactggtgattgagggccaaccgcaacgccggccatctttccgaagccgacgccgagattctagcggactggtgattgagggccaaccgcaaccaccggtatgtccggaaagattggaatggattctagcggactggtgattgagggccaaccgcaacaattgctcaatgggtaaggcgtgaagctggattctagcggactggtgattgagggccaaccgcaacgtcgccgtagtaaaccttgtagtcgagcgaattctagcggactggtgattgagggccaaccgcaacccacaacctccccgagtaaagccagcataaattctagcggactggtgattgagggccaaccgcaactcgcgcacccgccgagcacggcaaccgcggattctagcggactggtgattgagggccaaccgcaacaaagctccatataaaaagcccccgcagcttattctagcggactggtgattgagggccaaccgcaacgatccgaagaagcggctgatttcggcgctgattctagcggactggtgattgagggccaaccgcaaccaccggtatgtccggaaagattggaatggattctagcggactggtgattgagggccaaccgcaacaattgctcaatgggtaaggcgtgaagctggattctagcggactggtgattgagggccaaccgcaacacacgctcaccgaggctacgtcgcgcgagaattctagcggactggtgattgagggccaaccgcaacccagcggctttcaacgttgttgcgacttgaattctagcggactggtgattgagggccaaccgcaacgggcacacacaccgcctcggctggccgggaattctagcggactggtgattgagggccaaccgcaacatattttgaccagacatggcattgcctaggattctagcggactggtgatgagggccaaccgcaaccatcaagctactcgatgacgagtgccttggccgcttcgatcttgtccagcctgtacgtgatcggcgaaccgtagcatcttctgaccactccgggttgcctgtcgacactcgatgcaacgttgggtaattaacgtgtgtcggatgaaaccgaggctgcgaaccgcttagggatacaccagtggcacccacgcaattctcaacctattactctgccctgcggttcctggtgcggtgcctgcgatatcgttaccggacagaaaaacttcagatccgaacgatgatgcgactcgatctacgcggcgccaccgttctggatatcggggccaacaagggtatttattgcttctggatgtcccgtgcagtaggcaagcttggccgggtgatcgcattcgagccccagccagaaatgaacgtagcgatcagccaactcaagtcgatcttcaaatggtgtaacatgacggtgctcaacgttgcgctttccagcgtcgacggagtggcgagtcttgcgcgccagaaggtgggagacggcagcgcctccctgcaaacctcacgtcgaaacctcaccgacgaaattctgatggtcgtcactacaaagttggacaccatcaacatggatttcagtaatctcaaattcatcaagtgcgacgtcgagggacacgagcacgacgtattctgcggtgcagagcaaaccatccgccgctatcggccggtagttcagttcgaagccacgccagaagaagcgcaaggcgttttcgatttctttatcgggctcgggtattccggtgtcatgatcataggcgaccgatatttgaactattcaagccgcaaagcacattacaaatttggcgtaggcggccatcgcgattttctattcttcccgccagaggcgatcggcacgacgatcggaccaaacatctataaccagtttccggaagaggcatctcgtcgtgggtgaagatcagttcgttggcttggcagtcgttgccattggtgttctgctcggatgcctcttcgggtatgatctctcaaagagataacaaccaccatcccgtaaggaccactcgtaaacctcgtagcagaatccgaccgttgattatacgtgtcgatcactgtcatgactcgcgtgatgcgggtaaaaagtgacgaatctcgaattcaacggcagcaatctgggagcgtcgctcaagtctctgttgatgaacgacgaaacccagcctggcgcgccagccaggatctggcgcgcactctagcggaccggtgattgaaggcgttctagcgcaatggtcctttcagcaccgccatcccacttcaatgcgacatgaaaacgggaacggtcatcgccgagagcattccgcgcgtcgctccgccgaatacaaattcacgcaggcgagagtgtccatagccgcccatgacaagcaaactcgtcggactgcccgcaacatgcgatagaattgcattcgcgatgtccatatcagccgctggtatcgtctccaccactaccttgatatcatgtcgagcgagatgccggccgatctcaattcctttaacctgctcattcgcagttgtctcatcttcaacaatgagcaactccacagcgttggcttttttcagaaacggcaacgcatcattaatggcgcgcgcagcagtgcggcttccatcccaacagcacacgactttttcgagcttcagagtttcccgctgagtgctgggaacgataatgagcggccgtccggaatcaaacagcgtcgtttcgataaggatgctgttgctgatgcccttatgatcatcggactgcatgacgatgctgagatcagaacaccgcgccatttccgagaatgtcttcggtgttcctgaaacaagacgcgattcagctgagagagcgccgcgcttcgtcgccagttcaaaacgctcaattgcgccacgcgcttccacctcactctcggcaaagagatcgccgagagcatccgcgggaatgttcgcctcgaagttaaatataagcgccgtcaagtgggcggaaaaagcttcggctatcgaaacagaaaaatcacgggcgatatcccgcgaggggtcgcgctccagatgaagaatgatgtctttaagcatataatatcctcctcaatctgacatccgccgcagcaatatgatatcgaaaatcaaggcgatctcaaagctcgaaacctaccagcgttccagtgcgcgtggcgttctttcgtgcctgatcgatcatcccgaaacgaaacaatggttcattgccagaatggaagcgctgtatacgccacatgtgaggctatcaggagcctcgccgtctatggcgaatgcgagacttcgcggataaatgttcgtacttaactcttcctgcgatcacttccgatcgatcaattcccgccaacccgtccggcgggaaccagtgcatgccgaggtcgtgtggtgaggacgctgataatcgacaactacgattcattcacctacaacttggtgcacttgatcgcagatataaaccaggaagatcccctggtcgtccgcaacgatgcggtgacatgggacgaactctccggaaaacgattcgataatatcgttatctcgccgggcccggggcgacccgaccgggaggccgatttcggcttatcgaaggctgcgatcgaatcggccactgttcccttgcttggcgtctgtttgggacatcagggtctcgccctcgcggcaggcgcgtcgttggcgcgggctccctcgctcattcacggacatacatcccaaatccagcatcaggggtctggccttttctccggcatgccgccctcgttcaacgctgcccgctatcactccttcgtagtccagcgtccccttccctccactcttgaggaaattgcctggaccgaggatggcctcatcatgggcatcgcccgtcacggacggccgcaatggggtgttcaatttcatccggaatcattcctcaccgaagacggcaaagtcctgctacaaaactttcgcgacctttcgttgcgtttcacggctagaacctcaacgccgccgccaccacggacgaacaagcggcgcgccatgccgcctgtcgcgacggcccgcaaagcattctggctcgaaatcccgcgcgcgatcgacaccgaggcggtgttctgttcactctttgccgaccagcctttcgccttctggctcgacagcaatcttgccggatccccgctgtcgcaatggtcatacataggagacgcatcaggaccccatgcggcgacggtgcagtatcgcagcatcgaccggcagatcattatcgaggatgctcgtggccgccggacagagaacgccgatatattcgagtaccttcaaagggagcagccaggccggccgcaatcggcgccgccctgtccttttgccggcggtcatgtcggatggtttggttacgagctgcgacatgattgcggctcgccgaccacgcggcgggctgcaacacccggcgccttatggatccgcccggacaggttcatcgccgtcaatcatcgtgatgggaaaacctacgtatgcgcgatcgacagtcccgaggaagccggccgcgcgcaagactggattcgctccacgctcgagcggatcgaatcggctagccgcccgccgctgaattctcccgacgtggttgacccacatccgctcgcgttcctcatgaaggatggacgagcggactatcattccaaggtcgcccgttgtctcgacctgatcgcgcaaggagaaacttatcaggtctgtttgaccagcgagctgtcctgccccgccacggtcgagcccctgcgggtgtaccgcgcaatgcgaagcgtcaatcccgccccgtttgctgcttttctcaaatggcccggcggagccatcctcagcgcctcgccggagcgattccttgcagtcgataccgagggcaacatcgaagcaaagccgatcaaaggaacgatccggcgcgccaccgatccggtggaggacaagaaactggccgaaatgctgcgggctggccgaaagaaccgggccgagaatggaatgatcgtcgacctcctgcgtcacgatctatcacgctgttgcgagaccggaaccgtatcggtctcgcgcctgttcgaggtcgaaacgtatcagaccgtccaccagctcgtgagcacgatacgcggcgttctgaagccggagcatacgctcattgatgtgctgcgcggcggcgcgtttccgggcggatcaatgacgggagcgccgaaattccgcactgtggagcttatcgatcagttggagcagcgcgcccggggcatctattccggctcgcttggctggctgggcgatgacggcgccgccgatctgagtatcgtgatccggtccatcgtactggctgatgggcggttctccatcggcgtgggaggcggcgtggtcgcggaatccacgcccgagggagaatttgaagagatgctcttgaaggccgaggcttcgatcaaatcgatcgtcctcgccaccctgggaagcttcagcgaaaatcaatatcgcctggtggaatccggcgatcgcatggctcaaggctgagccatttccgagactcacatgcgtgaacggctcccccacgatcgacgaccggggagccggccgggttatccattatagccagagccggactcagccctgatgtgcgccggtatgaatgatcgttccgacgtgctcgccgcgtagcgcggcggccagccgtcccggcacaagcccgtcacgacctgcacacgctcgatgtggcgagccgtcgccatcacctcgaccaggcggtatcgaccggcaacgtgcccttgaactggctcgcgtgaagagaaggcgtcaaaatatggagattctagaactactttaataaaccgatccgcaacgcacccataaaggcgggagatcgataagcgagcggcttgcgaagacaacatgccgatgtgctctcagccatcggcatgccatccgctgtcaagcgatcctgacgctcgacgaacgaacgcccatgacgttcgcgatcagtatctttggatcagttcacggaaccaaaaggcaggatggaaacggtttcgccctcgtcgttaagaatggtgatgcacatcccgttatcagggaggtcgggcgtgtcacccagcatctcgcgagccaggagatttccgtacatcacggcctcctcgtggttctgcagggggaccttgatgggtttcgatttgcgctcggccagatctgtgatgaagtagctgaaaataggcatgataagcgaataccgcctgggttcgttgttgttgaagaaaacgatggagttcacaacggacaagaaaggagagccgctgtcgcggcgccttccattcaagactgatagggctgatgtctattcgtggggatatctcgacttctactattgcaatgatttcttagactatcacgggctccgccgccagagcctttccgcttctggtggaatctgaagcggaaggcgtaagcagcgcgaccgggaggctggcgaacaggtcgcgagcgagaagcgatccttgcgagagtgtgagttcacgtccgctgaacagttcggtccattgttgcggagcggcttcggatggcagagcgagggtgcagtcgtcccatgcgtctgcttgatgcctacgggacgggtacaaagctaccgcggtcaccagcgcgctatgttcgcccgcgcgcatgaacgcacagaggcgatcggcctgcggccctgtggcgtggagcgcttcataggagccattcatgaagaggtcgggttcgcgtcggcgtagcgccaaggtctcggcaatgaggcggagtttcaaacggccgtcacgccagtctcccagaagctccggaagatcgccctcgccggactccagggatgccagcgctgttctccggatgtcgtaatcgaccgggcgacgattatccggatcgaccatgctgaaatcccagagctccgcgccctgatagacatccggcacgccgggcgccgtgagcttcagcaccacctgaatgaggctgttcagagcgccaagggtggccacgcgctgctgaaatgcagaaaaagactccaggaagggattggtgcgcgaggtgtccagcgcatagcgaatgaactccagcacggcgtcttcgtatgcggcgtctggcgcggcccaggtcgtgtggaccttggcttcgcgcaaggctttcgtcatcgcgccttcgatccgctggcgaaaggcgtccacctcctccggatcaagctggcccgccgagagttgggccggccatgccccgagcaggagctggtagaacgcatactcgtcattacggtcgggcggcgcgacctccccggctcctgcgttgcgcgcccgcagcatccggctccagagcgcaacgtgctgggcccagtcgtccggcatctccgacagcaccgccatacgcgcccgcgtatcctcgccacgcttggtgtcgtgcgtggcggtgctcagcatggcatgcggcgttcgtttcgcccgctgcgcattggcatgatggaaagcggatacgcttacgctgaactggtcggggtgaccgccgacctcattcagcgccagcatccggttgtagcgatagaaggcggtatcctcgaggcccttggccatcacggggccgctgtattgctgcgcgcgcatcgcgacacggaccacctccacgcggctgaagccgctgcgtggcccggcgacgagatcgcaggtcaggagttgatggaggaagtcgaaaacgctggggtccagggcggcgccattgcggcgggcctgcgccagcgcccaatcgatgtcgcgacggtcggcaggggtgggcgcgctgcgtccgtcaacataggtgcggtagacggggaagaccgcgatgatttccttcagcgcccgctgcaggacgttgttggtgaagtcggcggtccgcggattcgagcgcgccactctggctgcttccctcgccagcacgttcagttcgctcgccatctcgttctccatgatccgcattttcgaatcgcggacgatgacgctgaacgatgcttgttcaccggtgaaatcggcatagaggcgggtgagattctcctgacccgcggggtcgttcagaagaccggtcacaaggttcgtgaattcgtagccggtcatcccctcgacatcccagtcatcgcgcaggttttcatgcgaggcgaggatcttctcgacaacgagataaaatggacgcggcgccttctcccgcaagcgtgaaaagtatcccttcggatcgagaagtccgtcgacgtggtccagccggattccgtcgagcacgccctgctcgagcaaccggaacaccagcgaatgcgcgtggtcgaaaagctggggaagctccatccgga

SEQ ID NO: 4515 - DNA, 8103 bp, synthetic construct
  misc_feature 1..8103: note = Synthetic
  source 1..8103: mol_type = other DNA
gaccttggccgcaccctcccgcttgagggcttgagcgcattcctcaaccgtcgcacccgtcgtgagcacatcatcaatcagcagaaacgacttgtccttgaccgtcgctttcggattgatcgcgaaggctgcgcgaacattttcctgccggctcagacgaccgagctgcccctgggggcgggtccgacgacggcggatcaggacttcgaggtcgaccacgaccttggtgttaccgctgcgcgcgagcgccgccgagagggcgtgacagagcagggccgattggttgtagcgacggctgaatagtcgggtccaatgcaaagggaccggaacgatgacggtctcggccgagatcagtggtgtgccagcgcgggcaagccagtcgccaaaagccggcacgccttgaagacggtcgccatgcttgaacgaaatgatgaggccacggcttttgtcgtcataggcaaagacggcgcgaaggcgatcgacggcgctggttgaggcgatacagaccgggcacagggcatccgcgcccgcgtcataagggaaggggagcccgcaacgggcacatgcgggcgatcccagaaacctgatcccgctccagcacggcacgcacaacccccgtgccgaaccgatctcgccaccacaggcgatgcaggtcgggggcaaaatgacgtcgagcagccgggccattgcagcgcgaccgtatcctacacaagccatgatggcctttagcttgaaaggatggcccgaggcttcgcgccctattattggttcgtccgccacaggcatctcttgggttggaagccaaatcgtcctatttaaagagaaccacggttcttcgaaagacgcttcatcatggccgatatctcaatcctcgatctcgctcctgtcccgctcggatcgacgccgggggatgccattcggcgtgcccgcgacctggcacggcatgctgaaacctgggggtatcgccgctactggctggccgagcatcacaacatgatcgggatcgccagcgcggcgacctccgtcgtcatcggctacgtggccgagggaaccaagaccatccgtgtcggcgctggcggcatcatgctgccgaaccacgcccccctggtgatcgcggaacaattcggcaccctggcgtcgctctatcccgaccgcatcgaccttggtcttggccgggctcctggcactgatcagtatacctggcgggcgatgcgccgcgatccttcgggcgcggaccgctttccccaggatgtcatcgaattgcagatgttcttcgggccgctcaaggaggggcaggttgtccaggcggtgccgggcactgggttgaacgtgccgctgtggattctgggctccagcctctacggcgcacaacttgccgcccatctcggacttccatacgccttcgcgtcgcatttcgcgccggaacagatgatggatgcgctcgcgatctatcgcgcccggttccaggcctcggcgcagttgcagcagtcccatgcgatggtcggcctgaacgtcgtcgttgccgagaccgatgaagaggcgaagcgcctgttcacgacggcacagcaggcctttaccaacctgatccgcggcacaagggggctgatgctgccgcccatcgacgatatcgagacctattggacgccgggcgaaaaggcccatgtcagcgggatgctccgctgcagcatcgttggcggtgcggaaacggtccgacagggccttgaccagtttcttgccaggacaggggctgatgaactgatggtcgcctgcaatgtcttcgatccagccgcaaggctgcgctcctacgagatgcttgcggatatcaatcgcggcctggtgaagcaagccgccgcgtaaggccccggccttgacccggcacgggccggacacgcgcgtcgagatcgacagcctgggttcgatcgccgtgccgtcggcccggctctggggtgcccagacacagcgctcgctgcttcatttcgccaacggcagcgaacgcatgccgcgcgagatgttgcgcgcccttggtgtcctgaaaaaggctgccgccctgaccaatcgagatctggggctgctgtccgccgatctcgccgcgctgatcgctgcggcggcggacgaggtgatcgagggcatgtgggatgccgagtttcccttgagtatctggcagacaggcagcggcacccagacaaacatgaacgccaacgaggtcatcgccaatcgggcgatccaactggccggcgggattgtcggcagcaagagcccgatccacccgaatgatcatgtcaacatgtcgcaatcctccaacgatgccttcccaacggcgatgcatatcgcggcggccctgctgctccgggaacgcttgatcccggcgatcggtcaggttgccgcagccatcgacgccaaagcctgtgaattctcgggcgtcgtcaagcttggccgaacccatctgcaggacgcgaccccgttgacggtagggcaggaaatgtcgggctgggtctcgttgctgcgacgtgacctcgacaggctcgagatggcgatgcccggcctgtgcgacctcgccattggcggcaccgccgttggcaccgggttgaacgcgccgccgggcttcgccgaacaggtcgccgcgcggatcgctgaaatgacgagcctgccattccgctcccaccccaataaattcgcggccctgtcggcccatgacgagttggtgtttgccagcggggcgctggcgaccttggccggatcgatgatgaagatcgccaacgatatccgctggctcgcctctgggccgcgcgcgggtcttggggaattcatcctgccggaaaatgaacccggatcgtcgatcatgccgggcaaggtcaatcccacccaatgcgaggccgtgaccatggtcgcggtccaggttcacggcaacaacgccgccatccagttcgcgggcagccagggcaattttgaactcaacgtcttcaagcctgtcatcatccagaattttctccaagcagcccggctcttgagcgacgtcagtcatggcttcgtaacctactgcattaccgggattacccttgatcgcgcccgcattgcggcggatgtcgagcgctcgttgatgctggtgacggcgctcagtccggtcatcggctacgacaaggcggcacagctggcccatcttgcccatgtcgatggatcgaccttgcgcgaagcgaacaccaagcttggcttcgtgtcggacgatgtgttcctggcactgatgcgaccagagacgatgatcggcctctgacgcccgacgcgcaaattttctgggcgtaaaaaagaaggggcgagccgcagctcgccccatttggtgctcttcagcttgttaacgggaggccctcaatcaccagaccgctaagttggcaaaaccttcctactgatcacacctgaaaggatatttgcattttacgtgcaagatgtcaaaaacaaacgaataggtagttattgccggaggcgaaatgaccaattcgttcgcacgatgttaccgactcggcatcgatgttggatcaaattcactgggctggttcgttgtctggctgaacaaggatggctccccaggcagtctaggtccgggtggcgtcagaatttaccctgatggtcgggacccaaagtcgaaaagttccaatgctgttacacgacgcattgcccgctgttctcgccgtattcgggatcgttatttaaaaagacgcgccgatctgatggctatcctggtcgagacgggcctgatgccgggcgacgagtctgcccgcaaagcgctcgaagccctcgacccttacgcgattcgggcgaacgcactggataccgcgcagccgctgcaccatgttggccgttgcctctttcatctcgatcagcgtcgcggctttctgtccaatcgcaagacggaacaaggcgacgcggaatccggcgtcatcaaggaagccgcaggccggctgcgggcagcgatggaggctgaacaggcgcggacgcttggggagtttctctatcgccgtcaccgcgaacgtgaagccgttcgggtgcggaacaggagcgtgggcggaaaggcgcaatatgatttctatccgctccgggagatggttttagccgagttcgaggccatctggctgcgtcaggcggaattccatcccgagatgacggcgcaagcccgcgccaaaatccatgacgcgatcttttttcagcgcgacttgaaaccgccatcggtcggcaaatgctctctcgagcccgcgcgcgatccagacgacgcggacggattccgctgcccctgggcgcatcccctcgcgcagcgatttcgcatctggcaggaggtccgcaacctcgaaatcgtcgaaaccggcaagttctcgcggcggcttgcaaaggaacagggcgatctggtcgcgcgtgacttgttcaagagcaaaaagctgacctttgacaagatccgcgcgctcttggggcttaccccggcggttaaattcaatctcgaaagccagaaacgctcggagcttttgggcgatcagaccgccgctcggttgtctgcggcaaagctgtttgggaagagctggtggaccctgcccatggagcggcagatcgaggtcgtgaggcttctgctggacaacgaagatgaaagccaggtgatcgcggagctgcgaacgggcttcggcctcgatcaggcggcggccctggcggtctccggaacgcttctaccggatggccattgccggctgggcttgcgcgcgatcacaacgctcgtcccgctcatggcggcaggcatgaactacgccgatgctgccagggccgccggatatgatcacgcccgacaacagaccggggagcaatcgccaaccggctgtctgccctattacggcgaatggctggctgatgatgtcctgggtaccggcgatccgggcgacggcaacgagacgcgctggggccgatttcccaatccgaccgtgcatatcggccttggtcaaattcgccgcaccgtcaacgcgctgatccgggtctatggccctcctgccgaggtcgtggtcgagatgacccggtcattcaaactctcgcccgtgcagcttgccaaggtggaaagcgagcagttcgagaatcagcgcaggaatgacacgcgtcgcgaggagttgcgcggcctcgggctggcggagaacgctcggaacatcctgaagcttcggctttgggaggaactaaacccgaaagatccgttggacaggcgatgcccgtttacgggagagagcatcagtattgtccggttattttcagaagatatcgaaatcgagcatctgatcccgttccaggatagctgggacgacagcgccgccaacaagaccctcagcatgcgctttgccaatcgcgcgaaaggcaagcagacgcctcatgaagccttctcgaccagccctcggatcgatggctttcaatacgactgggatgccatcgttcaacgcgcggcgagcttgccgagggccaaacggcggcgatttgagccccatgcacgagagcggctcggcgcgagtgacggctttcaggcccgcttgctgaacgaaaccggctggcttgcgagcgtcgccaaacgctatatcgcagcggtcgtcgatcgccataaaatcaacgtgctgcccggtcgcttgaccgcactgatccggggcaagtggggcctcaacgacctactacccgatcataactacggcgattcgaagaaccgcaaggatcaccgccaccacgccatcgacgcgatggtggccgcaatgacggaccgatccctgctacaccggatgtcgagcgcctatgatgaggagcgcgacaagatcgccgtcccgttgccgtggcctacgctgaaggccgatctcgaagccaagctcaaaaccatgcttgtttcgcacaggcccgatcacggcacccaggcccaacttcatgagggcacggcctatggcccggtgaagaacccggagcaggaaggcggcaacctcgtctatcgcaagcccttcctgaccttgacggaacagcagatcgagcggattcgcgatcgtcgcctgcgcgatctcgtcaaagcgcatgtcgaggcggaacgacgcgccggtcgcgacctgaaggcggcactgcaatcctttgccgcccgtaaggatatacctggactggcgggcgagattcgtcatgtccgtctggtgaaaacggagcaaccggaatatctggtcaccctgcgcgacaaatccggcaagccctacaaatcctacagcgcgggcaagaatgcctatgtcgaaatctttgaaacgcccgaaggcaaatggcagggcgaggccatgctggtgtttcgcgccaaccaggccgatgcaaccatgaggtggcccgaaaaataccccgggtcgcgtctggtcatgcggatcttcaagggcgaccttatcgccgtcgatcttgacgatcggcgcgccgtcatggtcgtccgccacctggatgcctcgaacaatcgtctaaagctcgccgagcatattgaggccggcgatctcgacaagcgccacgccgacggcaacgacccgttccgatggctgatggcctcctacagcacgctcaagaccctcaacgccgaacaggtccgcgttgacgagatcggccgcatctggcgggtgaccacgaagggtggcggcaaggcggcttgagggagacggggctgatggtcggtcggattgtggaggttgctaccgatggccgacatctttcgatccaacggggctttttgattgttgccgagcgcggcgaagaagttggacgtgtgccgcttgacgatatcgcggcggtgatcgcgaacgcccatgggctgacctacagcaataatgccctcatcgaactagccgaacggggtgtcccgttcgtcatgtgtgggcgcaaccacatgccgatggccatcgtatggcccgtcaatgcgcaccatttgcagaccggtcgcatgaacgatcaaattgccgcgagtgtaccccttaaaaagcggctttgggcgcaactcatcagatcgaagatattagcccaaggcgcggcgctcgcggctgtaggtgcgccgagcggtggtttttatctgttgtcgcgcaaagtacgcgttggcgacccggacaatgtcgaagccgaagcggcaaggcggtattggcgtttgttgttcggtacggagtttcgtcgaaataccgacgcgggtgggataaacggtctcctcaattatggctacgccgtgttgagggcaggcgtcgcgcgtgctgttcttgcagcgggacttcatccaggctttggcctgatgcactcgaatcggttgaatccgatggtgttggtggacgatctgatggagccgtttcgtcccatagtcgaccgcgaggtcagcagactggtgatgagcgggacgcttgcagtcgaccgccatgccaagtccgccctcgctcgaattatggtgatcgatttgccgacaccggccgggctcaggccgcttatgacttgtgcggaacgcatgacgcaatccctggcaagaatctacgcgggtgaaggcgataaactggagctgccgttacccccgcatgctcttgagtgacgatacggcgaccgagagtcattgatgattgcagatcaccccgtaattttgagtggttaccggctcatgtggctattcgtgctcttcgatctcccggttggcacaaaacgggagcgccagtcggccacgaaattccgccatacgcttctcgacttgggtttcgagatggcacagttttccgtttacctcaaatattgcgccggtaaggagcaaggcgaatctcttgcccgccatgtggaagcggcgatgccatcatcaggaaaggtccacatcatcacgattaccgataagcaatatgagaacattcgaacctaccggggaaagaaacgcgaacccgcgccgaaaaacccggcacaactggcacttttctagcgcaaaaatcctctattggccggtgcgaaaacaaaaaataaggccctgacaacagggccttattcagtttcgtattatagcagtctggtgattgaggaccaaccgcaacgcggtagtcgggatagacaggcttgccgtcattatagcagtctggtgattgaggg

SEQ ID NO: 4516 - DNA, 6764 bp, synthetic construct
  misc_feature 1..6764: note = Synthetic
  source 1..6764: mol_type = other DNA
ctcggcctgagctcatcacccggaaaccgtattacagcgagcgcgcaagacccgcgcgcgccgcgcgccacaaaatccattgccgccgccattgcgccatatcggtggagcggaatggatcgtagcgtcgccgttccatgtgtttgagcgccggttgcgtcagcgcgaccggcaacacagcaggcgtaatattctccggcatggcgccgatcagtgagcgcgcagcagtgagatgctggcgagcgtgtagccgcatctccgccaatgccgcgcgcagttcggtcgtcgcctggccaacaaatatgtcctcggcccgcgcgccgtggcgttgcaacacctcgatcggaacgaatatctggcggcgcgcggcatgaaatggaaaggcccggagcacgccggcgatggcatagacgatcccggcgtgccgcgcacaatcactgatattcaggtcacggccatcattgaggatgcgcgcggccagttcgatcactgccgacgatgttttcgccgcatagagttcaaacgcggcaaggcttgccatcggttcgtcatagagatcgaagcggcgggcatcgatcagatcggccagcatccgcggcggcaagcgatagcgcacaaccacttcgcgcagcgcggccgccaccggattggcggcgacctcgccgcggccgacgccggcgagcacatcccgccaccactgcagccgcacctcgcccggcatggcctcgcgcgcaacctcgcgcacgcgcgcgacttcgagattgaacgcgtagagcacaaacagcgcgcggcgatacttttccggcgcgaacaaggtagcgaggaaacgatccttatcgctcgcgcggacgagttgctcgcaatagtcgaatgcgtccgccatcgccttcttgggagaaacgccgatgcaaacatcggctatggaggggataagcgcaaaatgaaaaggagggggcgggccgcagcccgccccattttgtgcattcgcttgttaacgggaggccctcaatcaccagactgctaagtctttcggttcccgagacgcttgcacgcaaagattgttaaacgataggcttcacaagtcaaccgaggcatggatgagacgcaagggccagccgcaacccccacaagcgtttgttgatgatggttgggtcgctagcgaaagtatgggacaaacggcccgttaatgtcaagtttgcttgtgggggagaactaaaatatgtcaccgtgcagagccgacgtggattcgtcgactggtggagccagaaaggcgggagtgggtcgaaacattgattcgcttccgccttcttcgctgaaagcagatacatgactgcatcagcttcaaaaccatatcgcctgggccttgatctcggcaccaactcgctcggctggttcgcagtctggctcgaacgcgacggcgctgcatggcggccggtcggcctcggccctggcggcgtgcgcgtgtttccagacggccgcgatccgcagtctggaacctcaaacgcagtcgatcgcaggatggctcgcggcgcacgcaagcggcgcgatcgcttcgccgatcgatttttcggccgtcgcactgagctaatagatgctttaatccagcacggcctgatgccggcggatgaaaaagaacgcaaggcgcttgaatccctcgatccctatgagctgcgcgccaaggcgctcgacggccccctccccgcgcatcacgtcgggcgcgcgctgttccatctcaaccagcggcgcggctttctctccaaccgcaaggcggagaagaaggaagacgataagggtgcgatcaagcaggcctccaccaaactgaaggaggcgatggaagccgaaaaggcccgcacgctcggggagtttctttggcgccgtcaccagaagcgcgaaagcgtgcgtgcccgaaacatcgcaagcggccccaaggctgcatacgaattctatccgacgcgcgacctgttccggatcgaattcgattgcatctggaacgcgcaggcgggccaccacgtcgccatgaccgatgatgcgcgcgacgagatcgcgcgcatcatattttttcagcacgacctcaagccccagccggtcgggaaatgcacgctcgatccagccaaggccccccttaaggaagaccccgaaggctaccgctgctcatgggcgcatccgctggcgcagcggttccgcatctttcaagaggcgcgcaatctggaaatccgcgagaccggcaaagccgggcaaaagctgtccaaggaggacggcgacaaggtcgcgctagcgctcctgcaaaacaacaaagtgtcctttgacaagattcgcgccctgctcaaactgccggaagaggcgcgcttcaatctcgaaagcgagcggcgcgatcatctcaagggcgatgaactcgcggagaagctcgcgaacaagaatctgttcggcaaggcctggcgcggcttcatgcaggagcgccagatcgcggtcgccgaaaagctgctcggcgaggccgacgaaaagctgctggtggcatggctggagagcgaatgcggggtcgatgcggccacagccggcaagatcgcggacgcgcgactgcccgaaagccactgccgtctaggcttgcgcgcgatcaagaatctacttccggcgatggaaaaagaactggatgcggatggccgctcgggcgtcaactatcccgaggctgcgcgtcgcgtctacggcgatcattccaagcagccgaccggcgaaatcctggaccgcctgccttactacggcgaatggctgcccgacgcggttgtcggcagcggcgacgagcgaagcacgaaggaaaagcagttcggccaattccccaaccccaccgttcacatcgggctgggccaattgcgccggcttatcaacgcattgatcaaggaatttgggccgccggagcagatcgtgatcgagctcgcccgtgacctgaagcggtcgcaggacgaaaagcgcgacgaggatgcccggcaagccaagaaccagaagaagaacgacgatcgcaaggtcaagctgaccgaaatcggaatcatcaatgtcagcggcgcggacttggtgaagatgcgcctatgggaggagttaggcgaacttgtcaagctctgcccattctcaggccggccaatctcgttggcgcagttgatgtcgtcggaggtggaggtcgagcacctcattccctatgcggactctcttgacaacagcgcagcgaacaagactgtgtgcttcacgtcggccaaccgcctcaagggcaagcaaacgccccacgaagcgttcggttcgacgcccgattggcctgcgatcgcggcgcgggcaacgaccctgccgggtaacaagcgttggcgtttcgcgcccgatgcgcgtgagcggttgaatcgggacgggcgcgattttctcgaccggcaactcatggaaacgcggtggctctcgcgtctggcgcatcaatatgtgtcggcggtctgcgaccctaggcaggtgtgggtggtgaccggccagcacacgagcctcttccggggaaagtggggcctcaataccctcttgccagaccacaacttcaccaccgcaaagaaccgcgccgaccaccgccaccatgccatcgatgcgttggttgtggcgttgaccgaccgttcgcttttgatgaagttgacccatggatatgacattgaccgcgacaggatcaaaatcgagcctccgtggaacacagaaaaactgcgcaacgatctcgaagccattctcaaacgcatggtcgtgtctcataagccggatcacggataccaaggcaagctgcacgaagacacggcctacggcatcgtcacgaacgaagagaaagacgaaaaagggaagtcgctcggcaatctcgtctaccggaaggcgcttgcgagcctgaccgaaaacgaaatcgaccggattcgagaccgccggctccgggacatggtgcgcagccatgtggatgcagcggccaagaacggcgtaccgctcgccaaggcgctgcttgaatttcgcgataccgtcagagacccgcacatcaagcacggcctaaagcgcgtccggctcgtcaaagcggagaagccagaataccttgttccgatcaaggacgcgcgcacggggaaaatctacaagagttattccgctggcaagaacgtcttcctcgatctcatcgagttgcctgacggcacctggagcggcgaagcggccacgtttttccaggccaatcagccgacgcacgcattgcaatggccagctaagtttccaggtgcgcgccttctgatgcggctgttcaaggacgacctccttcgtatcgaatacgagggcgaatcgagggttgtccgggtcgtccgtcttgagccgtcggcaaaccgggtgcgtctcgccgaacacaaggaaaccggcgtgctgcaagaacggcacgacaatcctgacgatccgttccggtggatattcggccaatatgatcggctcaaggaatggaacgcagagcatgtccgcgtcgatgaactcggccgcgtctggcgcgtgcagccaaagccattaaccaagaattaaccaactcattgcgcgcagggcggttatcgccagaatccctgcaccgccggttgagagccggtcgcatgcaggcatggcgatggtcggacgtgtggtcgaagtcgctacggacgggcggcatctcgctgtcgatcgcggattcctgactgtcgcggaaaaaggcgccgaggtaggccgcgtgccgctcgacgatctcgcggcggtgatcgccaacgcccatggcctgacctactccaacaatctgctggtgactctggcggcgcgcggcgtgccggtcgtgctgtgcggccccaatcatcggcctgttgcattggtgtggccggtcgacggccatcacgcccaggccggccgcatgagcgatcaagcacacgcatccgcgccgttgaaaaagcggctctggcagcagatcgtgcaagccaaaatcctcgcacaaggagcgacgctggccggcgtcggcgccgaggcgggcggattccgtcttctcgcccgcaaggtccggcccggcgatcccgacaacgtcgaggccgaggcggcgcggcgctactggccactgctcctcgggccggatttccgccgcgacaccgacggcggcggactcaatggcctcctcaactacggctacgccgtgctgcgcgcggcaactgcgcgcgccgtgatggcggctgggctgcatccgagcttgggactcatgcactccaaccgtggcaacgccatggttctgattgacgatcttatggagccgttccggccgctcgtcgatcgggaggtgcatcgcctgaagggcgaaggcgccgttgaagtcaccaccgaaaccaagaccgtcttggcgcgcgtcatggtcatcgatctgccggctgaggaaggtctcagtcctttgatgacatgtctcgaacggctcgccggctcgctcgccaaagcttatgccggagaaaccggtcgtcttgttctgccgcaaccgggcctgccgctcggattttgagtgaaggcatggcagcgaaagcaaatggatcgcccccggcgctatcagggtatagaattatgtggctcgtcgtattgttcgatttgcccgtcggcaccaagaaggagcgcaaggcggcaacgcgcttccgcctcaatctgctcgacctcggatttgagatgacgcagtattctgtctacttgcgcttctgcgctggcaaggagcaggctgaaagctacgagcgaaagatcgagcaggcgatgccaagtgccggcaaggtgcacatcatcgccatcaccgacaagcaatacgaaaacatccgaacctatagcggacgaaatcgtgaacagagcccaaaaaatcctgaacaatatgcgcttttttgagcgatctagggcgttattgatgctcgcaactcaaagaaaaggccctgttttcagggccttaagtttgaatagagcttagcagtctggtgattgagggccaaccgcaacttgccaatgctcatggatgtgctcccgtgcagcttagcagtctggtgattgagggccaaccgcaaccccgaccgaggacgaaaaagatcgcgccgcagcttagcagtctggtgattgagggccaaccgcaactcaagcgcctgctggccgatgccaccgagcagcttagcagtctggtgattgagggccaaccgcaacttaaggcgtaacaccttgacgatattctcgagcttagcagtctggtgattgagggccaaccgcaacttgcaggccgcttcctgcatctgattgggaagcttagcagtctggtgattgagggccaaccgcaacagttgtcagccgaccatgacaaccgccacaagcttagcagtctggtgattgagggccaaccgcaaccgcgccttgcgcgcgcaagcggaaagcgaaagcttagcagtctggtgattgagggccaaccgcaacgccgccgccgttgctgaaatattcgacgcgagcttagcagtctggtgattgagggccaaccgcaactcattgccgccgcaaccgcgcggcgtcctgagcttagcagtctggtgattgagggccaaccgcaacaacctttaagcgccagccatcatcgcggatagcttagcagtctggtgattgagggccaaccgcaacgagccggcgctgatgtagctcacgccgtcgagcttagcagtctggtgattgagggccaaccgcaaccatcagtactttcgccagcacgtcgatggaagcttagcagt

SEQ ID NO: 4517 - DNA, 6667 bp, synthetic construct
  source 1..6667: mol_type = other DNA
  misc_feature 1..6667: note = Synthetic
ccgttgtctacaaggacgtcgcgatcgaggatcttgcggattccgaacggatggacgagctcgagaagctcatgcgcggggcacgcgtcagcgaagcaacgctcgcgaagctgttcgaggttatcgacgctgccgccgccaagaaatgaaacgacaacggtcgtcatcctgaacgctggccgcttcaatgaggccggggacgcccaccatcatcgcctccctccaaccgccctgtccccggcgcggacgcctccgttccggcgcccccggcggcccgcggcccatgcctccagagcgtccccccggtagcgcacgcagcggccgagtcggtaataccagggcccttctccggtgatccggtagcgggccagcgtgctcggggccagcccgagccgttccgcagcctcgcgggtgtccagatagcactggtcaatgtcgccgccgcccggcccctccggttcggggtcgcgatttacgggccgggcaggcggcctcggagagggcagcggaccgccggtcaggagcgccggcaacgcgccggaccgggcccggatctcccgccactcggcagggctcgcgtgcgatttcatcgaagcgcgcaccgcttccaccgtcgccagcttcggcgacatgcccccgagcagttgcgtgacaaatgaacggttgcccgtcgcttcctgtccgagcagcgagcgcttgacccccgtcaccgcgagaaacgcctccacctccccgaggaaggcggggccggccggcggctcgcccatgacggcgagcgcccggtccaccgtcccgaggcgcgggcagcggccgtcacgcagcgaggcgacaaagccgcggtcgcggtacacggcggcgccgaacgcccccgtgctcatcccgttccccgcgcactaggcctcgatcgcccgcagaaaccgggcatcgagaacgccgccacgatctgtattcgatatgctcatccggcataggtaggggcggcgggagaatcggaaaaccgctttcggtatggcaaattccgcgtttcatacgcttggccccgcagggcgccgcatgccgcctcaggacgggggaaaaaagcttggctcggcgcccgagcgctccgaatgcttcgcgctgcaacgggctgtggggaatcgaacggacttgcttcaacgaggccgggcgcgcgcccggatgcgatcccacgcttctccaggatcatctcatcccgttccagcatcgccagcagccaggtgttgaaactcgtcagatcgagaatgtcctcgcccggactgaagtcggcgatcgcgtcattgtcgtgttcggccttccaatcagtcgtcgccttcctcgccgcctctggaagttgatcaatccggacggaaagaggcggcccgcaggccgcctcatgtggtgcatatttcagcttgttaacggaaagccctcgatcaccagaccgctaagttggcgcaactttcacgttcgcctacaccacctaccatctttggaaacttgcgtgcaaagtcaagagctttagtttgcgcggaacggtttggtttccaaatctcgggagcgccgaatgtcgtcaggcaaccgtccttatcgtctgggcctggatctgggatcgaactccattggctggtttgtcatctggctggatgacaacggacagccctgtggtttggggcccggcggcgtacgcatctttcccgacggccgcgacccgcagtcgaaagcgtccaatgccgcctcgcgtcgcgtggcccgtggcatgcggcgtcggcgtgaccgatacttgaagagacgcgcgcggttgatggaccaactcgtcggattcggcctgatgcctgccgacgaggccgaaagagaaaagctcgaagagtgcgatccctacgaactccgggccagtgcactggacctccggcttccgctgcatcacgtgggccgcgccctatttcatctgaaccagcggcgcgggttcaggtcgaaccgcaagaccgacggcggcgacaacgagagcggccctatcaaagagggcgttggcaagttggagagggccctcgaaaccgagagcgcacgtaccttgggcgagttcctgtggcgccgtcaccgggagcgccggggcgtgcgcattcgcaatagcggcacggcgaccaagactgcctacgaccattacccctcgcgcgcgatgctggaaaaggagttcgatgcgatctggaaagcgcaggcgcgccatcaccccgagatgacagacgaggcgtgcggcgcgctgcacgagaccatttttcatcagcgacccttgcgcgagcagccagttggcaagtgcgggctcgaccccgccaaggaaccgggcgacgccgatggcttccgtctatcccgcgcccatcctctcgcccagcgtttccgtatccttcaagaagtcaacaacctggagtacagcgagatcgggcggggatcgaccaggctatccgacgagcagcgcatgacgctggtgctggccctgaccgggaagaacaaactgtccttcgaccggatgcgcgcgctgctgaagctgccgcagggcgcgcatttcaacctggagagcgacaagcgcaaggacttgaagggcgacgagaccgccgcaaggctgagccacaaggacctcttcggcaagcaatggcgcgccctggacaggatgcggcaatggacaatcgtggaaaaactgctcgccacacaggacgatgacgccatggtcgactggctcatggccgagacagggctgaacaaggcggcagcccggcgcgtatccggcgccactctgccagagggccacgcgcgactcggactacgtgccatcggacggctattgccgcacatggaggcgggcttgcgttacgacgaggcggcaaccttggagtaccacagccattccgagaagcgcactggcgaagtggtggagcgtctgccctactacggtgcatggatgcccaatgcggtgacgggcaccggtgaccagcgcgacggcaaccagaaacgttggggccgcctgcccaaccccacggtgcacattgggttgagtcagcttcgccgcatcgccaacgcgatcgtcaaggaactggggccgcccaccgaagcggtcgtggaaatgacacgcagtttcaagttacggccggacagggtgcgcgaactggaacgcgaacaggccgcgaatcaggagaagaacgataagcgcgaccgggacatcgcgggactcgggcatgtggccaacgcccgaaatcgcctgaaaatgcgtctgtgggaggaactcgacccgaacgacccaatagaccgctgctgccccttcacgggcgagaaaatctcatgtcggcgcctcttctccgaagaagtcgagatcgagcacctgattccgttctcgacatcctgggacgacagcgctgccaacaaggtggttgccatgcgctacgccaacagggccaagggccagaatacgcccttcgaagccttcggccacagcccgacgatcagtggtcgtcgctacgactgggatgctatcgcccaacgagccgcgaacctgccgaagaacaagaactggcgcttcgcacccgacgccatggatcgctttggggacgagaacggatttctcagccgccaattgaacgagaccggctggttcgcgcggctggccaaggactacatcgaagggctcaccggtccttacaatgtctgggtcgtgccaggccggctgaccgagatgatcagggccaaatggggcctgaacagcctgttgcccgatcacaacttcacggaccgcaagaaccgggccgaccaccgccaccacgccatagacgcgcttgtcgccgggctgaccgaccgctcgctgctgcaggccatggcgagcgcctatgacgacgagcgggatcgcatctcagtcccggaaccttgggagacgctgcgtaaagaactgggcagggcattggacacgatgacggtttcccaccgacccgatcatgctgccagcggcaagctccacgaagccactgcctacggcacggtgaagtgccctgatcgcgaaggcgcgaacctggtataccgtaagccgttgaccggaccgaaagggctaaccagacccgaaatcgggcgcattcgggacgtccggctgcggagcatggtcgaagcgcatgtcgcggcggtattggcgaagggcaagaacctcaaggaggctctggagagtttcaacaccgcgcacgaagggcatccccacgtcaaggagggcctccgacgggttcgtatcctgaagtcggaaaagccggaatatctcgttgccgtcagccatggcgaacgcccgcatgggaaggcctacagcgccggcgagaacgcgtttgtggacattttcgagacgcccgacagcaaatggcacggtgaggcgacgactgtgtttcaggccaacgaaccctgccatcggccgagctggcacggcttggacgccaccttcgtcatgcgggtcaggaagggagacctgatcgcgctcgaccatgacggtgccaggcaggtcatggtcgtgcaccgcctcgacgcctccaatagtcgcttcaagctggcggcgcataacgagaccggcaacctggacaatcgccacgcagagcccaacgacaccgatccattccgctggctcatggcgtcctacggcactctcaaggaacggtgtgcggagcgcgtccgggtggacgagttggggcgggtctggcgcatcccgccgaaggaagcctcgcgctcgctgtagcaggagggaagaatcgggatggtggggcgcatcgtagacttggaggccgacggtcggcacttgtctctccaccgtggattcctggtggtgagcgaggggggcgaggaggttggtcgcatcgggctcgacggcatcgcggcggtggtcgcaaacgcccacggcctgacctacagcaaccacgcgcttttgacgctggcggagcgcggtatcgcgaccgttctttgcggtccgaaccatcggcctgcggccatcgtgtggcccgtggacggccaccatgcccaagccggtcgcatggcggatcaggcgcgggccggagcgccgctgaaaaaacgcctttgggcgcaggtcgtgcgcgcgaagatcttggcccagggtgcgacgcttgcggccgtcggcgcgccccatggcggtttccagcttctttcccgtaaggttcggtcgggtgaccccgacaacgtagaggccgatgccgctcgccgatactggccattgctgatgggcacggactttcggcgcgaccgagacgccggtggcaccaacgggctcctgaactacggctacgccgtgcttagggcgggcgtgtcgcgcgctgttatgtcggcggggctgcatcccagtctggggctgatgcacgccaaccgcggcaacgccatggtgctcgtggacgacctgatggagccttttcggcctgtcgtggatctggaggtgtggcgcctcgtgcacgacggcattgaagaagtcgtccccgatgccaaggcggctctggcccgcgtcatgatcctggacctgccgaccgccgcaggcatgtcgccagtgatggtctgcgcgcaacgtctggcgcagtccctggcgcgcgcctacgcgggcgatggcgacgcgctcgttcttccgctgccgaaactgccgctgggaggatgacatggcctccagagagacgccgccacgtcgggagaacgggcccgcgctcagtggataccgcatcgtgtggctgatcgtcctcttcgacctgccggtcgccaccaagccgcagcgtagcgccgccacccggtttcgccacgacctgctggatgaaggcttcgagatgagccagtattccgtgtatcttcgacactgcgcgggcaaggaacaggccgatgcgctggccggccggatcgagttgggcatgccgaaggagggcaaggtgcacatgatccagatcaccgataggcaatacgagaacatccggaccttccggggaagaaaacgcgaaccaggtcccagaaaccccgaccagttggtcatgttctgatgtgcccgtggctgtttccgcgtctgttggataagaaaaaaggccctggtttcagggccttagtaggacttggagtttagcggtctggtgatcgagggccaaccgcaacggtctctcgaaacccgtctgcccggcccgcagtttagcggtctggtgatcgagggccaaccgcaactggttcggcgaccgggcgcttaccccgcccagtttagcggtctggtgatcgagggccaaccgcaaccgatctgctgctgcatgccctggaagatggagtttagcggtctggtgatcgagggccaaccgcaaccaggacgcatcgttccagccaatgaccgcgagtttagcggtctggtgatcgagggccaaccgcaaccgccccgttcgtgttcgtaacacggatcggagtttagcggtctggtgatcgagggccaaccgcaacaggtgaagcgccgttccgcacgccacgtccagtttagcggtctggtgatcgagggccaaccgcaaccgaggcgctgcaccggatcgcggcggcgcgagtttagcggtctggtgatcgagtgttagcggccgtcaagaacagcgcatatttgctggtcaggaacggccggtttggtcggcttgcgcagatcggcggctga

SEQ ID NO: 4518 - DNA, 5561 bp, synthetic construct
  variation 4317..4341: note = note, n is a, c, g, or t
  misc_feature 1..5561: note = Synthetic
  source 1..5561: mol_type = other DNA
actttgcaagtatttctcagagcaagccaccaattttacctaaaaattcaaagcctgctatatgtcataatatctcccaaattcccattgtactatactgatgtatccttgccaagcagtgagacttttatccaatttcaattcccattgaagataaatccagtggttatccacgtgatgaaagatattgcagacagctcaaacatatgaaatggtggtactcaaggataaagatcaagggaagtttgtaaaactcctagctacttacaatgaaattattattttggatgcaacatgctagtgtgatccattaaaagaaaatcctgtacccataatatttggaagtctctggtaattctgtgtagaatgatacattaaaaattattcatgtacttttcatttataggagcaccttacataccaccaatccactgcacattgctgaccatattggagaacttaattggatgttcagcacagccccatgataagttgaatatcaccagtagctatattattattctttatttgcttactcgtaatgacatttagatgtgcttaccaatgcatgctatcacaactaataattaaaagattaacttgatcatttgttgaaagagttgcccagaaaaagcaaaggatggtttgacaaaattctaactgaattgtctgaatcattcatcagaaggaaatggccctgctgggttggcaaaagaaccgaagtgcaaacttgatgagttgaataagacagcacttactcatgacaagcagaaggtgacagaaatgatgcccaaaagaaaattgtgaggataatattatatgagtcataaattgctcttgtatttccagttcatttagaatcgccaaacgcatcatctccgtttagtgtgataccaatagatttagtgcttgcatggagtctctaaatgagagagtttgcagaaaccttagtgagttgttggttatttagccaatacaaattttttatgcataaaatgtcccttaagtcatcaatgatcaagagactttactactgactgcaacatattctgggtaccttttagacataaagacatcatgctaaaagtaaatggttcacaaagactagattcaagggaatcccttagggaacaaaagtttacaggaacagctgtacagtgcgacaaggcataaacttacaaaatataaaacattttttcaacttgaaaactgctactactttccacctcacaaactttttgttgcttttccaatcctccgttcctatcttggtcatcgcccccttccaaaaggggatgcagtccgaggcagatggttctacgcaatgtccaaagttgctctattttgccagacctgcctcggacgtctccagacctgcaagaggtcacagggagtatagtcgtgatgaatggatttgaaaagcgccgctatcgcctcggcctggatctcggtgccaattcgctcggctgggcgacgatctggctggatgagggcggccccagcggtctcggtccggccggcgtgcggatttttcccgatgggcgcgatccgcaaagcaagagttccaatgcggtgtcgcggcgggtggcgcgcggggcgcggcggcggcgggatcgctatctgcagcggcgcaaggagttgacggatgcgctgatcgaggccgggctgatgccggccggggaggccgcgcgcaaggaattgcagaagtgcgatccctatgcgatccgggcgcggggattggacgagcggctgagcctgcacgaactagggcgggcgctgttccacatcaaccagcggcgcggtttcaagtccaatcgcaagaccgatcggcagaacgaagagggcggggtgatcgccgaggcagccgataagctcgatcagatgatgctggagtcgggcgcccggactctgggcgagcttctggcccaccgccatggcgaaaggcttggcgtgcgggcgcgcaacgtcagcagcggcgccaaggcagcctacgacttctacccgacgcgggccatgctggagcaagagttcgtcaagctctgggagctgcagcgcaaacaccatccggagttgacggcggagctgcgtgcgaagctgcagcacattatcttctaccagcggccgctggtcccgccgcaggtcggcaagtgtgcgctggacccggcgaagaggcccgacgaccgggagggcttccgctgtccctgggcgcatccgctggcgcagcggtttcgcattctgcaggaggtgaacaacctcacggccggcccggtcggcgagcgcaagcgcgatctgacggcggatgagcggttcaaggccctgcataagctgctgcagaccaagagcctctccttcgacggcctgcgcaaggcgctgaagctggagtccgatctgatcttcaatctggaatcggatcggcgcagcaaactggatggcgaccagactgcggcgcgcctgcgcggcaacaaggctttcggcaagcgctggcacagcttcctgccagagcggcaggccgagatcgtcgagcgcctgctggaggagtccgacgaggaggaactggttgcctggctgatcgcagagaccggggtcgccgaagactgcgcctatgtcatcgccgatgtgaccttgcccgacagccattgccggctgggcctgcgggcgctgaagaaaatcgtgccgtttatggagcaggggcagcgctatcacgaggcggccagcagtgccggctacgatcatgcccgcctgccgaccggcgagattcgcgaaaatctgccctactacggcgaaattctgcaggaccaggtgctgggctccggcgatgcccgcgatccggcggagcggcgctggggccgtctgcccaatccgacggtgcacatcgggctcaatcagctgcggcgcgtggtgaacgccctcattcggcgcttcgggccgccgcaggagatcgtggtggagctggcccgcagcttcaagctctcgccggaccaactgcgcaaacttgagttggagcagagggagaaccagcgcaagaacgacgaccgccgcggccagctggagaaactgggcttgccggtcaactacggcaatctgctgaaactgcggctgtgggaggaactgaaccccaaagacccgctggaccgccagtgccccttcaccggccggaagatcggtctcgcaagcctgctgtcggacgcggtggagatcgagcatctgctccccttctcgcgctcctgggacgacagcccggccaacaagacggtctgcctgcgccaagccaaccgcgccaagggccggaaggccccctacgaggccttcgggtcttcgccgagctattccggtatcggttacgattggcaggcgatcaaactgcgggccaaggccttgccgccgaataaacgctggcgcttcgaccccgacgccatgcagcgcttcgaggccggcggcggcttcctggcacgccagctgaacgagacctcgtggttggcccgtctgagcaagcagtacctgggggcggtgaccgatccgtacaagatctgggtggtccccggccgcctgaccgccctgctgcgccgcaagtggggactggacagtctgctggactctggggagggcgggcgcaagaaccgcaacgaccatcgccatcatgccctggatgcgctggcttccggcctgaccgaccgcgggctcctgcagcgcatggcccgggagtacgacgaggagcgcgagcgcatcgcggtcgagccgccatgggaaggcttccggcaggatgtggcgcgggtgctggaggccatcctggtctcgcacaagccggaccacggggcgcagggccagctgcacgaggacacggcctacggccggatcgccggggccaaggagggcgagggcaatctggtctatcgcaagcccttggcggccttgagggagaccgaggtcgaacgcatccgcgatgccccgttgcgtgacgccttgcaggaggcgatcggcgagggcaaggcggcgggcaagccgctgctggccatcctgacggccttcgccgaggagtggggcaaaaagcacggtcacagcccgctgcgccacgtccgcctgaccaagacggagaagccggactatctggtgcagatcggcgatggggcggcgccttacaaggcctatagcgccggggagaatctctgcgtggagatctaccagacggcggacggcacatggcggggcgaggcgatctcgcgctaccaggcgaatcaaaaggatcaccagccgcgttggcgggcagaagagcccggggcgtgcttggtcatgcgcctgtacaagggggattgtctcaannnnnnnnnnnnnnnnnnnnnnnnnaatcgcttcaagctggctccgcaccgggaagccggcgcgctcgatacccggcacaaagactccggggaccccttccgctggcgcatgtattcctacaacaggctgtgccagctgaaggccgagccggtgcgcatcgacgagatcgggcggccctggcggctgaagccggggcggtcgtgatcgggcgcatcgtcgagatcgccggggacgggcggcatgccgcggtcagccgcggcttcctcaccgtcgccaagggcgacgagatcctgggccgggtggcgctggacgatctggcggcggtgatcttcaatgcgcatgggatcaccgtttccaacaacctgatgctgcggctggcggagcgccgcattccgctggtgctctgcgggacgaatcatctgccggccgccctggtctggccggtggccggccatcatgcgcagagcggccggatcgccgatcaggcggcggcctccaagccgctgaagaagcggctctggacccagatcgtgcaggccaagatccgccagcagggcgccactctggcgcaatgcggggcaccctacggcggcttcgctctgctggcgcgcaaggtgaagagcggcgatccggagaacgtggaggcggaggccgcccggcgctattggccgctgctgttcggcagcagcttccgccgcgaccgtcaggccggcggtctcaacgggctgttgaactacggctacaccgtgctgcgggccggggtggcccgcgcggtgatcgccagcggccttacgcccagcctgggcctgatgcattccagccgggtcaatgcgcatgtgctggtcgacgatctgatggagcccttccgcccgaccgtcgaccgcgaggtctggcgcctggcccgcgagggcatcgaagaggtcgacagcgaggccaaggcggaactggcgcgcctgatgatcgtcgatctgcccaccaaggaaggaatgagtccgatgatgaccgccgccgaacgcctggcgcaatccctggccagggcctttgccggagaggaggcgcgcctggccttgccgctggaccgcctgccgcttgccggatgagcggccgccgcccggcgctgagcggatacaggatcttgtggctgctggtcatgttcgatctgccggtgggcagcaaggcggaacgccgccaggccagccgcttccgccatgacttgcaggaccgcggcttccagatgagccagt

SEQ ID NO: 4519 - DNA, 19567 bp, synthetic construct
  source 1..19567: mol_type = other DNA
  misc_feature 1..19567: note = Synthetic
gggtgcgccaggattttgtggcactaggcggcggccttttgttgggcggtccagtagggtttccagagattcgagtgccacagggcggccagggccatgatcgcctcggcgtttggcgtgtcccagcgcatcccgctgcctttcagccggctggtgagggtcttgcagaacgcttcggtcggtccgctgcccacatcccaccccgcggccaggaacgccgggtaatcgagcatctcgccccgcttggccacgtactgttggaggcccttcagggcctctcgcttcgccggcgaccgcgtggccttgagcgtctcgtggatcaccgccagcagccccggcgccccttcctcgtgcagggccttggacaccgcctcgcaccagccccgcgcctcggccgtcccctccccgaagcacacggtcgccgccgcccccacgtgctccaccacgtgataccagtccaggatccgcgcatcgagcatcggcagccgcgtctccaactgccgacggatccacggcgccccgtcggtcaccgacaccttctcctgggcctcgcccaacttcaaccgccccgccgtccgacgcacccgctgccccagcacgtccggccctcccgaaacccccaatgcgtacttgtacttcccccggccgtcgtagaacgcggcgatcttgaactccttccaaggccccgtctccccctggaaccgccgtgccaggagcgaccggcgccgggccttccgccgacgccgatgattccctcgacgcttcgccttctccgccgccgttacgaccggcaccatcaccccgtccagccccaccaccagccgcgtcggctctcccggggccgcgcggcaggccgacgcgtcccagtccggcccccacgcccccgtccgcacctggtcccgaacctgccggccttccgcctccgtcacctcccgcagctgctcgtcgctcacgcgaatctgccccaaccgcgccagcgtctgggccccccgcgcaaagccgccccccgccagggccgcccagcagcacaactcccgcgccccggcgctgaccgtggcgtcctcgatccccaaccacgggtccaggggacgaaccgttcccgccgccggccgccaccacacccgccgcgtgatccggatcggcccgttggccgtcaggtgcgtcacggcctggcggcccttattgcggagccgctttccgtcggcgccggccggagggggaaaaagccgcttccgcggcctcggcccgcatctggatggccgtctggtagactttctcccggaacttcgccaacaaatcccgcacctgaaactcgctcccggcaatcaccgctccgtccggggcgttgttgaccgctttcatcacctgctcggccaacgcctcaaaatcgtcccgcaaggccgtcttgagccgctccgggcttacatatggctgcttccccatgtcacaatcctcctccaagcgtaagtgcttgcaggagcaagactaacaacttcccaccagcgcgccagaaaattctggcgcacccttgcgggtttccgccggcgcctgcccattcgccagcgcccccgcgagcgccgtcgcggggcgttcatgccgctcggtcatcacccgccgctcccggcttcgccaaggtttacccgcctggggcgggctacgccgggccaagcccgcggcgggctcaaatcgggcgctccacgttcgctggagcgggtgatgggaatcgaacccacgtggccggcttggaaggccggcgcactaccattgtgctacacccgcctcctccagtgcggagttcgcagcgcggagtgcggagtgaagagccgagcctcgtttccgccgtccgccgtttactccgcactccgaattccgcacttcgcactcgagatggtgggcaggggtggattcgaaccaccgaaggctgagccagcagatttacagtctgccccctttggccgctcgggaacctgcccacacctgttaacgcggaactcggaacgcggaacgcggaacaggaaacgcgccgcacacgcatccttgctgtttactccgcgttccgacttccgcattccgcgttcgatggagctggcggggagatttgaactcccgaccccccgcttacaaggcgggcgctctacccctgagctacgccagcctcctccatcgcccgtcccgaaacttggaacccggaactactatagccctctccttcgcccgttcaaccccccgggcaccagttttttgtcgttggggacttccgatgggtgatgcggaccgccagtcgccgctgcctcgcgctgttgccggtcacttcagaattgaacatccgtcattcaacgttcggcattcgccgtatcgctagttcagccttcggcgcggtatgagcccgccgtacggccgcgtgagcagcatctggaacccccgcgccagcagtccatattcgcgttcccgctcgacgctcttcaggaccagcgcgcgccgctccgcccacgccggcccgccgaccttctcgaggccactcctgaaaaccccctccgcgtcggccatccgcgtcgccatctgctggtacccctcgagttcctttttctcggcgctcgacaccgatccgcgcgacgccgcgtctctctgcatctccgtgaggcggtcccgaagccacggcctcgcgtcgctccagagggcgtccatccggtccccggccgccttggccgcctcctgctccgcctcgtaatccctatccggcgcaagaaccctcgcgcagcggaacacctccgcgatctggacgaacgccgccgccacctcctccggggtcttggcgcgcttcatctcggcgatgcggcccttgaggcccgccacccgcttctcggcctccttcacgagcgccgccttcaacgtgtcgtcatcggccagggtcttagccgccggtttgggcggcggttcctgggcgggcttcgcggcagcactcttatccgcgaccgcagacgccgggtcgcctcccgccggggccggcttctccaggcccggatacacgccgttcgaagaggccaggagcacgtcggccgtcgcctcggccaggatcgaagcgtcggagtccttctcgtaccgtgcagcaaggtccttataagtctgggccgccgtccgccagtcgccctttttgcggagcgccagcgccagcaggcgcgtcgcctcggtcttcgtctggtcgtcccggtcgctccgcgcaagcaaccgcgccgcagccgcagcctcgtcatagcgtcccatgtcaacccaaagacgaatctcggcgagccgctcctcgggtttcgtcgccgcccgcgccgcaagtgctgtacagaccaccaggaccgccaggacagaaactgacagcgcatgtttcatggtcgcctcctcctctggataaacccgccgcgcgaccgcctattgcagccattatacacgatgacgctcccggttccaggttccgagttccgggttccgggttccgagttccgagttgtgagttccgggttccgggttccggcttcctggttttgccatgcagcgaggaatttcatccttttttcgccctggcgaccggaccacccgccattccatatcttgggctctcttttggggttctcctctacggcttgggcctttgctgtgctgtttcctctgttttcaatccacagtccacaatccgaaatccgaaatcgcaaaatccctccgggattttgcttgacgaccgtccgataaagtggtttttacgaactgtcaaaatccttcggagccgccgcagcggccaaacgccgcggcacatccggaagcggggcaaccagaatggccggccacgcagatcacgataggacgcaaggcttcggccgcgctggctacggcgaaggcccctacggcgcgccgccgccgaaactctaccgcgtcggcgagatcgccgaccacctcggcctcacccgccagaccattcacaactatgcgacgatcggcctgatcgccgaggagcgccggacccccggtggccagaaactcttcgacgagtcggtcttcgccatcctcggctgcatccaccggctgaaggcccggcaccgcctggccgacatccgccgcatgctcgaagacgaggcccgggccgagatcgccgccgaggacgccgcgcgggcccggccggccttctccgccgccgccccggccaccgacgaagactcgccgcccccggccggtgccgcagcctcggcgcagcccgcaatggccgatgttgctcccccggcccaggcccgagcatccggtgccacaccccaggacctgatggcccgcagcgcccttgcggaaccgccgctcggggaccccgcgacggatgtcccctgccaccggcgcggatcctccggcgacgtgcccggcgatggcgccgaggccgatgtcgcgcggcgaggcgcatcgggcggttcgcccgacgtccgcccggccgatgctgccgaggccgacaaagagcgcggcaccgcacgcccgcctgccgcaggccggccgaaggcgaagaatccgcaccgcaaggcctttcgccgcgcccgccgcaaccggccggacacagattgaccgcggctcgccgcctgaaggctgcgaggccgatttcgggcctgaaaacgccgttggggggaggactggttaaactcctggccgccggataccgatactacaagttgcgggccgtctccccgtcacttcccggacggtccgcccgtgggggcatggcaggaaggggaaactcatgacacgctcgtccgacggaatccgcacatgggaaccgacggtggcgctcagtgaggaagaactcgctgccgcatggcaggagttccaccggacccgctcgggcgctgccaggaacgtgctgaccgagcactacctgtcgaccgtcaagtacgcgtccgagcggctctactcgaaactgcccgatgaggtggaactggacgacctgatctcggccggctgcgacggcctgcgcgacgccatcgagaacttcgaccccctgcgcggcgtcaagttcgagacgtactgcgccacgcgaatccgcggcgccatcctcgacgccctccgcaacaccgactgggtgccgcgcctcgtccgcgcccgggccaaccaactcaacctcgcccgctatagactcgaggcccgcctcggccgcacccccaccgaccacgaactcgccgacttcatgggcctggccgagacccaatacgagaaactcatccgcgacgcccacgccgtcggcatgatcagcctccagaagaacttccccgacgccgactccacccgcgagatccgcgaaagcgacgtcgtcgccgaccaccgcgtcgagagcccctcgtgcggcatccacgaggtggacatccgggacctggtgacgcgcggcatgagcaagaacgagcggctgatcctgctcctctactattatgagggcatgacgatgaaggagatcggggcgacgctcgccctctcggaatcgcgggtcagccagatgcacacggccatcattgaccgcctccgctgcaccctggacggccgcggcggcgactttgtggcaccagagttataggggttccaagttccaggttccaagttcaaggttccaggcctgccacggcgaagccgggttccaagttccaagttcagggttcaaagtcccggacccgagaccccgtctttacacactttaagaaagtcgtttttccaaaaacttgtagttgcggacgctttgcgccgcctgcttttcttgtgaatcgagggtttttgggtcgccaacgcggttttggggcgaaaatgttaagatgggcaagcgcagacttacgcgcttttgcgcgctccttgcgcccgatgcccgtttttgaccccgaaaacgcgggtaagtgcttggttgcgcgcgccaaatgcctctcatattgaggacaggcgataacaactatagtgtagattggctgacgcggaagaaaacaacaacggacttccgcagatggcgcagatgacgcagagggatcttgggaaacgcggaacctggaacctggaactttacccgccggttgttgggcgggctggaacctggcacttggaaccttgaacttggaacctggaacctgtcgcctgtggcctgcggcctgccgttctcattccgcgttccgcgttccgcgttcggagagtgcctgtagcctgtggcctgtggcctgtggcctgtggcctgtggcctgtgggcctgtgggcctgtggcctgtggcctgagtgcctggcgcctcaggcctcaagcctcgggtctcaagcctggatcaaaaagggctgccccgacggtttcccatcggggcagtggccttgcgaatcctctcacgccaaagcgtgagggccttggtgtgaaaagaccgcagaccgagattggatacaccaactttcttatagacaccgggcatgactctgtggacaatagactccgcgaatgtgaccggcaatcagggcgaaaaaaagaccgcaggccgtttgtgcgggctgcggtcggtcgcccgaaggcggtgcctgcggatttttcaccttgttgtgaaaaaaccctcaggccaggattggatacactgaatgtagtatacgcacttggttggcccaccgcaagaaaaaaatcggaaaagcgcaatgattttcagggctgatatcagataaaggaagacgccatggccgtcactttgggactggatatcggcagcaactccgtcggcagcgcctgggtggacagcgacaagaaggaaatcgtccttggcgtgggcgtgttccccgccggcgttgacgaaaccgagaacaagcgaggctcccccaagaaccaagccaggcgccagaagcgatcgcaacgtaagaacttggcccgcagggcagccagaaaatcccgtttacgggagttgttgacctccgccgggcttttgcccgccgacccgattgagcgaaaaaccctcatggaaacggatccctgggtgttgcgccgaaaaggcttgactcaacccctaaacccgcgcgaattcggccgcgtgctcgttcacctcaaccagcgccgaggagcatggggtgtgcaaaccgatccggaggaccaagaagagggccaggtcaaggaagccattgatcacttgaaggcggcaatgagggaatatgacgccaagactttcggccagttcattgccgacctgatggacaagcggcgccatccggttcgggtggccaagccgcgccgtcccaaatgccactttgatgatccgcctccttcttgcccgccgaattgcgaaaaacaggaccagaattgccggttctaccccggtgcggttcgcaaccgccgggacacgttcgagttccatgccacccgggatttgatccaaaaggagtttgaccttctttgggacaaacaaaaggaactgggcggggaactggccggattgcttaccgatgaattgcgaaaggaattggacgaccctaacggcaacgagacctggcggcaacgcggcgtcatctttgggcagcgcaaaacttactggaacctgggaacgctgggccgatgtgatctggaaccctcggaccggtgctgccctttagccgacatgcacgctcaggaattccgcgtccttgagaccgtgaacaacatccgtattgaggagcgcagcaaagcgcctcgtgccctgacgccccaggagcgggccaaccttatcgccgtgttacgcgaacaaaagaccgcgtccgttgccacggtccgtaaggccctgaacctcaataggaaagccgtcaaggaattcttctcgctcaatatcgagcgcgacaaggaccgcgaaatcaataccgactggttctatcgcgagatcgtccgggttgcattgggcgaagatgcctgggcgagaatggacggcggaaaacgcgaatccgtcaaccgcgccgttctcaagttcgatcccgaaagccctgccgatacgaagcgattgcggacgggagcaaccgactggtggggcctgccgccggaggcggccgaccggttcatcgaggcatggaaaacccggccaagactggagatgcgactcaacctgtcccgccgcgcgattctgaacctcctgccttacatgcaggagtggggttgctctgtcacagaggcgaagcaactgttcgccgaggatggcgacaacaatgcaacgcccgaacagcgcgagcgatatgccctgggcggctcgatcttaaccaaggcgggccgtcgctttcttcgcaaacacccggacctgctcccgcccgcgcccatgttggccaacccggtggtccgaaaagccattcatgaggttcggcgccacgtcatggcgtatcttcacaagttcggccgaaaacctgatcgcatcgttatcgagttggccaagtcggccaggcagaccgaggaggtgcgaaacaagatcctttcggccaaccgaaaacgggagaaggaaaggaaggaaatcatcgccgaattcgggttggccggccaatcgcttagccagcaacgagcggccatcgaacgcgttaccctctgccgcgagcaaagggggatttgcccttacagcaatctcaagccgggcgctcagggcgagttgatcagcgacgaccaggccgccaagggtgaggacgttgagatcgatcacatcattcccctgagccggtcccaggacaacttcctgagcaacaaggtcctgtgccgccgccgggccaaccgaggaaaaggaaaccggacgccgaaggaatggctgaccgccgaacaattcgccttgcttgaacagcgtatggcgcactgggaaaaagagtcccccaggaagtgggagaaccttcatcgcgaccccttgcccgagaaggagttcctggcttcccaactggccgccacagcctatgccgccgagcaggtcggaacgtacctctcggactccctctacggcggtgagcgggagggacgccggcgagtattcttcaccaagggcacatacacggccatgcttcgaaaggattggcaattgtttcagacgctccgggatgccaacgaagacgcagccgtagataccacgtccgggccccaacagcccggagaccccggcaagaagaaccgcgccgatcatcgccatcatgccattgacgccgtcgtcgttgccttgaccggtccggagatcatccaggatgtagcccgattggctgccgagcgcgaggaataccatgaacgcaccggccattggcccaaacgcaatccgctccccccaccctggagcgaggtcgaggacttccgtcgtcaagtgctttccttactcttcgacgtcttcgacaaggcaaacacggatggaacacgggccgaaggcgcagaaaccggaacgcctttggttgtttcacatcgcccggccaagcgaaaagccaagggctttctgcacaaggaagatctgtggggcgcggttgacgaggagcagggcgttttccgcatccgctgcgccgtcgccgacctgactcctaagatgttgcagatgcctgtggatgaagacgactcccaggtgcaccagcggctcgtccgcgaacttaaacgcggcggccttgaccaatcgcaagccaagacggttgccggcgaacgcttgcggcacgggcactttacacgctgcaagatgaacccgccgcttggcaaggggggtcttgtccgcgattgggatttgcgccatgccattcgcaagtgccttgaaggaaacaacatggatcccgacaacttcacaccaaagcaaatgcaagacttcgccaggagtggaaaacttcgcatgccttcgggggtgcccataaggaccgttgttaccatcggcccgatatctgacccggtcaagattcccgtcacggacccgtataccggccggcaggccgtcaatctcaagacgggaaggccccttttccgctatcacataagccgcaacaatcatcatgtcgaaatcatgcaggatgacaagaccggcaattggttcccaagagacggcaggtgcgttaccatgtttgaggccgcacagcgggttcgcccttccaagaactccaatcgggtgcgcgccaagtcccctgaccccgtaaatcgggccgatgaaccgggacaaacgttcgtaatgtcgctctctgaaggtgaaacggtttatgctacgcgcccggaccggcccgaaagaccggactattcggttgtagtgaaactcgatagcaaccgaatctactttgccccccattgggatgcgcaaagcgaaaaagaacaggaccgttggagtaccacatatcccaacctgaagagttgcggaccggccaaggacacgccaccctacaaagtgcgcgtcaaccccttgggcgaagtggcgcctctgcaccatgattaagcggacggtcgaaatctcggggcgcggcaaccggctctcggtcagcctggggtcgctcgtcgtccagcgcgacggcttggaggtcggacgcatcccccttgaagacctgggcgtcctcatcctcgacgcccccgacaccgtttacacccattgggtccttgccgaggccctggccgcaggggccgtcgtcgtgccctgcggccggaatcatctgccgtgcggcttatttctgccgcagaacaacagcctccttgcacagcggtgcgccgttcaggcgggcgcccccctccccttgaagaagcgcctgtggaaacagatcgtccaggccaaggtccgcgagcaggccagcgccctgccgccggactcgcccgcccgccgccgccttacgaaactcgtctcccaggtccgcgccggcgatccgacgaatattgaggcccaagccgcgcgggcctactggcaggccatgttcggccgggactttcgccgcaaggcacaatccggcgacctgcccaatagccttttggactacggatacgccgtggtgcgcgccacagtggcccgcgcgatcgccggggcggggctcctggcggccctcggccttcatcatcaccaccgcgaaaactccttcgccctggccgatgacctgcttgagccacttcggcccctggtggaccgaaaggccaaggccctggccgagacgggggccgccgccgtcaaccccgacaccaaacgcgaacttcttatgatcctgacaaccgaggtcgaggtggcaggcctcaaagggccgctcctggtgggcctcgaacggactgccgcaagccttgtccgctgctacgagggaacgcaagacaaactggacctgccggttccatgcaactgagcgcctaccgcaacatgtggattctctcgatgttcgacctgccgaccgacaccaaggccgcccggaaggcctacacctggttccgcaaggcactcctgaaggatgggtttgcaaaaatgcagtactcggtgtatgttaggcactgtgcaagcgccgaaaacgccgacgtgcacgatgggcgggtcgaggcggccctgccgcccgacggggaagtgcgggtccttcggatcacggacaaacagtacgaaaggatgaaggttttttggggaaaaaggcgcaagagacccgaggccgcacccgcccaactggaacttttctagttccggtttgcgcgcaagcccttgccccgtttggacttacccgaggacgagtgtatccaatcccgacctgaggtcaatccacaactggccgatcctcctaacccttgattccatcagtgtatccaatcccgacctgaggtcaatccacaacacctgtccaaggcggccgggttgcggccaaagtgtatccaatcccgacctgaggtcaatccacaacagacgacccgccggtgccggcgtcgcctgcagtgtatccaatcccgacctgaggtcaatccacaaccgggcggacttcctcgcggagggcctcgtagagtgtatccaatcccgacctgaggtcaatccacaacgacggcgtcatcgtcccgatcgcggccggcagtgtatccaatcccgacctgaggtcaatccacaacccgctgaggcgcgagggatgatcgcgatcgagtgtatccaatcccgacctgaggtcaatccacaacggctaggacgtactcctcttcctccgccggagtgtatccaatcccgacctgaggtcaatccacaacagatccgccttcggcccgttttcgtcgaaagtgtatccaatcccgacctgaggtcaatccacaacagcgacccaggtcttcccgtacaggttctcagtgtatccaatcccgacctgaggtcaatccacaacagagtggtgatcaggaagtggtcgtacttaagtgtatccaatcccgacctgaggtcaatccacaaccgggacaaggcgggatcgggcgggaaaaaaagtgtatccaatcccgacctgaggtcaatccacaacactctgcgtgaaggtgctccggacgatgtaagtgtatccaatcccgacctgaggtcaatccacaaccgtcggcacgaggcacccgaactccgcgccagtgtatccaatcccgacctgaggtcaatccacaacctggggcgacacgtggcccgtgctgcgtgcagtgtatccaatcccgacctgaggtcaatccacaacgcctgggtgcaggcgcacatcggcctggtgagtgtatccaatcccgacctgaggtcaatccacaacccggccgacgagcggcccggcctcctcttcagtgtatccaatcccgacctgaggtcaatccacaacccaggaatgggactcggccctctcttttttagtgtatccaatcccgacctgaggtcaatccacaacaagttccccacgcgtcgcgccgtcgtcgcgagtgtatccaatcccgacctgaggtcaatccacaacaccggggccgcgtgcagccgcccttgggcgagtgtatccaatcccgacctgaggtcaatccacaaccgaacggctctcggcggcccgctcaatgggagtgtatccaatcccgacctgaggtcaatccacaacggagacttcgacgatccaccacgcttcgcaagtgtatccaatcccgacctgaggtcaatccacaactttacgcggatgaacctgctcgcgaacaacagtgtatccaatcccgacctgaggtcaatccacaacggcaaacgatccggctctggcggcaaaagaagtgtatccaatcccgacctgaggtcaatccacaacctcggcggattcgcgagcgccgtggccggcaagtgtatccaatcccgacctgaggtcaatccacaaccgtgttctccatccagagggcgctcgcgccagtgtatccaatcccgacctgaggtcaatccacaacatcctgaggcccttccagtgcatcacggcgagtgtatccaatcccgacctgaggtcaatccacaacgatagcggacgaggccctcttcgtcggcccagtgtatccaatcccgacctgaggtcaatccacaactccatgtaatgatcgaaccggtcgaacatgagtgtatccaatcccgacctgaggtcaatccacaacgcattgcgggggaccaccacgtcgccgggcaagtgtatccaatcccgacctgaggtcaatccacaacaggagaagcccgtggcagccgggacgacgcagtgtatccaatcccgacctgaggtcaatccacaacaaatacctggacctttccctcgcgttcaacagtgtatccaatcccgacctgaggtcaatccacaaccaaaaatgggccgcgtcgtccggcccgattagtgtatccaatcccgacctgaggtcaatccacaacagggtcggccatgccaggcctcccaatgcagtgtatccaatcccgacctgaggtcaatccacaacccaccatcagccatatctccagagcacgctagtgtatccaatcccgacctgaggtcaatccacaaccactcggcggaatccccgacgccgggaggaagtgtatccaatcccgacctgaggtcaatccacaacttggctctggcccgctagttgggggctcccagtgtatccaatcccgacctgaggtcaatccacaactcggcggtcggcgggccgtccatcaggaagagtgtatccaatcccgacctgaggtcaatccacaacatgctcggcgtccaggtccccggtctgaagagtgtatccaatcccgacctgaggtcaatccacaacttcgcgcccagagtggagatcatgtcctgaagtgtatccaatcccgacctgaggtcaatccacaactcaagtcaattccgggatttttttatccaaagtgtatccaatcccgacctgaggtcaatccacaaccgcgtcgtcgccgtgggcgcggacggcaacagtgtatccaatcccgacctgaggtcaatccacaacacgacggacggctttgccgaaacgtttcaagtgtatccaatcccgacctgaggtcaatccacaacggccggcaggacgtggagcagttgcttttgagtgtatccaatcccgacctgaggtcaatccacaactacggcatccacgtcgccgaggggacgcccagtgtatccaatcccgacctgaggtcaatccacaaccacgactcggcgtccttgcgttcagcggtttcagtgtatccaatcccgacctgaggtcaatccacaacggtagagggcgaggaaccgggcgtcgggccagtgtatccaatcccgacctgaggtcaatccacaacacctcgacatcgaggccctcgtcgccgggaagtgtatccaatcccgacctgaggtcaatccacaacgcggcgtcgagcgcctcgaggaccttggcaagtgtatccaatcccgacctgaggtcaatccacaacacggctcgagggtgatgccaaacgcgagcgagtgtatccaatcccgacctgaggtcaatccacaaccaggccaagctcgaaagcgagaccgagtacagtgtatccaatcccgacctgaggtcaatccacaacgagactagtgtgtcaggcgcgacactagggagtgtatccaatcccgacctgaggtcaatccacaacttcgaccgccgtcgcccactgtcgctgggcagtgtatccaatcccgacctgaggtcaatccacaacccaggggaccattgcccgtcgggctgacgtagtgtatccaatcccgacctgaggtcaatccacaacggcgggccgctcctcatcgagggcacctggagtgtatccaatcccgacctgaggtcaatccacaacggccgggaccttgctggggggccgagacctagtgtatccaatcccgacctgaggtcaatccacaacttacagtacagtacagtatccagtacaataagtgtatccaatcccgacctgaggtcaatccacaaccggcggttcgcggcaaacaacaccatcggcagtgtatccaatcccgacctgaggtcaatccacaacctggggcatcctggcgcgtttggcgcgtatagtgtatccaatcccgacctgaggtcaatccacaacttataagtaacaacaggattacagagaataagtgtatccaatcccgacctgaggtcaatccacaacgacgtacctggcgtgtgcagcggcggggctgagtgtatccaatcccgacctgaggtcaatccacaactgagcccccgcggggcctacgacatcgcccagtgtatccaatcccgacctgaggtcaatccacaacagcggaccggcgacgatgggacgtttcagagtgtatccaatcccgacctgaggtcaatccacaacggttcgtgccgatgggcgcgggggcctgctagtgtatccaatcccgacctgaggtcaatccacaactcttacttgggtggaacttgctcaccttcgagtgtatccaatcccgacctgaggtcaatccacaacaagtccgcgtcttttccctcctcgatcaagagtgtatccaatcccgacctgaggtcaatccacaacgccccaatcagcatgacgcaccggcggtggagtgtatccaatcccgacctgaggtcaatccacaacgccaccggtgaagcctgttgcacggcaactagtgtatccaatcccgacctgaggtcaatccacaacgatagcgccagtggcatctttttggtgtgagtgtatccaatcccgacctgaggtcaatccacaaccgtgtcgccctccgcgtcgcggcaaggttgagtgtatccaatcccgacctgaggtcaatccacaacgcggaagccgcgagggcctcgacgtatggaagtgtatccaatcccgacctgaggtcaatccacaacagcatcgtatctccatgccgacgatcccagagtgtatccaatcccgacctgaggtcaatccacaacgtggtggggccaagccccgctgccgaggcaagtgtatccaatcccgacctgaggtcaatccacaaccggtccccctccttcccgtgctgcgggctagtgtatccaatcccgacctgaggtcaatccacaacggaggaccgcttcgagagatacctcgcccgagtgtatccaatcccgacctgaggtcaatagataaacgatgggacgaagggacggagggacgcagggacgcagggacgcagggacggagggacaaagggacggagggacaaagggacggagggacggaggaacgcagggacgcagggacggagggcggcgggcggcaggcggcgcgcggcccgcaagcggacggctgttttcgtatacaggacacccggtgggcggctataatacaaacggttccaggttccaggttccaggttccaggttccaggttccaggttccagcccgccacacagatggcgggtaaagttcaagcccgcccaacaaccggcgggtaaagttccaggttaaggcgccgggacggagggacgagcggaacgcggaacctggaacccattcgactcggtcgccacggcgacctcgctcagggcaggcctggaacgcggaacctggaacctggaacttgaaacttggaacctggatgataaggagtttccgcgtgaaacgcagcggctttacgctcctggaactcctggtcgtcatctcgatcatcctcctgctggcggggctgatgatgtcggggtaccggtacatgtatagccgggttgacgacctgaagtgccagagcaacatccgccagattgcgatggcgatccactcgtactgcatgaaattcgacggccagttgccgccccccggccgcaccaacggatgggtgaacaaccgcggctgggcctgcgacaacacctggtacgccgacggcgggctgctgtaccggatgaaactgatcgggtcgctggacatcatggtgtgcccgacgcacgtggcagattgggcgctggagcaagcgtggggaacggacattagcggcaatcccatcaatatttattgggagtcgccccggacggacaagacgcatcccagcccgggctccgggcggattccgtcgagttatgccatcaacgccaacgtctggacgagcacatcgccgtttgagccgcgccgatgggaagatttcacgaacagccatttcctgctgatggaacggtcggagacgggttcggcgtggacggacatgacgataagcgtggcagacaaactgacgactcggcatcaaccgtaccggggcagcgacggcaaggatcacggcggcgggtacatcgcctgcttcgacgggcacgcccagtactggacggacgaggatttcgaggcgaccaagagcgatgccgcgcccgattacctgaagtcgaagttgtgggatccgtcgaaataggccttcgcccctcagcccattcgacttgctgcgctcgctcagggcaggcctgccctctcccccctttgccaaggtttacccgcccggggcgggcttcggagggccggcccgcgcggggagaggggaaatggcctctggacagggcggcccccggtccgttagacttccggctgccatggccccgagcgaccacccaagcgaccgcctgccgcgcccccacgccgcgccgcccggcactgtgccgctgggggtgctgctgtgttcgagcgacgcggccctgcgcgagacgtggaagggcgtcctagcgccgcaagggttccgcctcgagtgggcggagcggccgtcgctcgaacacttcgagagcggcgagtacctgctggtgctggtggacgtccggacgttcctcggcgacgagtcgctggcggcggtgctggacgccgaccttgagcggtgcgtctggatcggcccggcggcggccctggagcacctcgatccggcccaggtgagccgcgcgtacgacgtcctggtgacgccgacgtcggcgacggtgctcggtcggcggctggaggggtgggcgcggagcatccggcagacggcggccgtggaggagatgggccggcgcgtcgaggccctggccgagcagaacgaccggctggccgcagggctcgcccaggccgaggccgagtcgaaggcccaggcgcgcgagcgcgagcggctggaccaggcgatgcagcggctgcggcaagtggcgggcctgtcgcgcgagatcaactcgctggacctcgacctgatcgagcgcgtctcgaccgagcaactgcccgccctcctgggcgcccgtgcggcgagcctctacctctacgacacggtcggcgaccggctggtgttgctgaggcacacgcacgggcggccgatcgccgagcgggtggacctgaaggactcgccgcaaagcccgatggcggtggccgtgcggcggggggaactcttgctggtgagcgagttccaggagttcgagcggcgcgaggaggtggtgctggaccgcgagttcagccaggagtacgcgacgtcgtcctgcatcgtcgcgcccctgaaaggcggcgggcgcgtccggggcgtgctgaacctggccgacaaggtcgggggcggcccgttcgaccgcgagattgacctgccggtggtcgagcagatcgccgaactcatcggcgccagcatctacaacgtggaactcttccaggagatggaacgccgcgccaagaccgatccgctgacggacctggcgaaccgccgcgccgtcgaggacgccctcgaccgcgagaccgaccgcagccgccggtacggctcgaaactctcggtcctcctcttcgacgtggaccagctgaagcgcatcaacgacgagttcggccatcacgtgggcgactcggtgcttcagcacgtggcccgggtgctggccgaagcggtgcggagcgtggacgtgccgggccgatgggcgggcgacgagttcctggtggtcctgccggacacgggagccggccaggcgggtcggctggcgaagcggctcctcgtgaccctgcgcgacaacccgccgcagatccaggatcagagcatcttcagcagcctgtcggccggcgtcgccgagtacaagaagaacgagtcggtcgaggacctcgtccaccgcgtggacaaggcgatgtacgacgccaagaaggccggccgcgaccgcatcgtcacggccgactgacgccccgccggaaacaaacaaaaacaaaaaagtggaacc

SEQ ID NO: 4520 - DNA, 13038 bp, synthetic construct
  source 1..13038: mol_type = other DNA
  misc_feature 1..13038: note = Synthetic
ggagactagtatgggcgaaacagaccggaatcgaagaatcaacttgaaggccgtggttattctggtattgatcctgggtgggttaggtgccgggttggctgtggggtataaagtgcgtaagagaattaattgaaacaaagccttgacaagtgaaccgtccggccggtatagtactgtaccgtctggacggtttagtagtgtgaatccggacggcatggagagcttgatgaacaacgcgccggaaaacagtggttccgttcccgttcgagatcggctgttggacgccgccgagcagattgccgcgcgggacggagtaagcacccttacgctggaagcggtcgcccacgaggccggggttagcaagggggggctgctctaccattttccggcgaaatcagcgctgatcaccgccattgtcgagcgactaggcgagcggtgcgagtcgagacaagcgacagaggttgcggccgattcccagccccgcggtgcgtttacccgtgcgtacctggcggtccgaagcagttcgcttgagccggaccgggagccggtgcattcggccatacttgcggccctcgggaccgatccagggtatctcgatccgattcgcgagcggctggccacgtggcaggcccggttggagtccgacggtattgacccggtaacggcaagcatcgtcaggctggctatcgacgggttgatattgggtcggctcttgaaagttccggtaccggaaggcgaactgcgcgatagggtgatcgagaaattgctttcgatgacttacccgcaaagagacgaaccgtaaacatcatcacggacggaatatacgagggccatggccgatccaggccgtggccaaggagttgcgtatgagaaggcatataaccgcggtgcttgtatttccgggctgcatgctggccgggtgtgccgtgggaccggactaccgtgccccgcaacccgagcttccggaggtttggcaccaggccgcgacggacgggcttacgcagggtaacacggatgtgcaggagtggtggcaggtcttcgaggatccgcggctttcggagctcatcgagcgcgccgcggagggaaaccttgacctgcggctggcggttttgcgcatccgggaagcgcgggccttgcggggggtggccgccggggagttactgcctactctcggcggacagggcagctatcaacgatacaaaagaagtgcgaatagtcagtttgcctttccgcgagccggcagcaagggggagaccttcgccaacaccgtgacgcgcgggatcgccacgaacgcgctggggaccggcctcggcaccatagcgccgggcattccgggggtcacgaattcagtcgccggcgcgctggtcggcttgcttcccaccccgtcagcggctccggaaaccgatgagatcaacctgcacgcggcaggttttgacgcttcctgggagatcgatgtcttcggcggaatcaggcggggcgtgcagtccgccgatgcggctttggaggctacggtcgaggattatcgcggcacgctggtcactttgctggccgaggtcgcgaccacctatgtcgaaattcggacgctgcaaagccagatcgaggctacgtccaagaacatcacgctccaacaggaaaccctcgatctgacccaggcgagattggacctggatctggcgacggaactcgacgttcagcaggccgaaaccaatctggcgacgacccaggcccagcttcctcagctcgagagcgctttggcgatcagcatctatcgattgagtgtgttgatcggccgtgaaccgtccgccctctgggatgaactggcagtcaccgctcccatcccgcagactccggcggaagtcttcgtgggtgttcccacggacctccttcggcagcgccccgatattcgttcagcggagcgccacctggccgcccagaccgcgcggatcggggtggccgcggccgagctgtatccgcgttttacgctctcgggcactttcggattcgaggcgttgaacttcaagcacgcgattgaccggggcagcatcacctatggattcggtccttccgtacggtggaacatctttgacggcctgcggaacctcaatcggatcgcggcccaggaggccgccacccatcagtcgtatgttgtctatcaacgtaccctgttgacggctttgcaggaagtggagagctccctggtcgcctacaagcgcgaacaggtacgtcgagacgcattggatcgagccgtgaaggcggccgaccgctcggtccagcttgcggaaaccctttaccgtaacggcttcgtcgattttcagaacgtgttggacgcccaacggtcgctggcgaatttagaaaacacgctcgcccaaagtcggggactggtcacgatcaatctcgtgtcgctctacaaggctttgggcggcggctggtcgcccgaggtggccccgcagcagcaatacctggagcagcgccacgatgtattgcaccgcccggttggctttttcctttcgggagggaagagttcactgccttgggaccgggattcggagttgtcggatgaacagagtgaaccgagtgatgacttcgccgcggaaccaggcgaaggcaatcttgattagaggttttttatgcgcacgaatgatgcccaaaaaatgatgctcgtggtcggcggtttcctcgtcgggctggcctcggccggttgcgacagatccgggagcggggcggcgcctttcgcggccgggccgccggaagtggccgtggtgacgctccaaaccgagcgcgtggccctgaccaccgaattgcccggccgtacgtcgccttatctcgtttcggaaatccgccctcaggtcaatggtattatccagaaacgcctgttcacggaaggctccgatgtccaggccggtcaggtactctatcagatcgaccccgccccctttcaggcggcggtggacagcaccgaagccaacctggtgctcatgaaggagtcggccgagcgggcgcggtccgcgttggaagcaagtatggccggcgtcactcggcagcaggctatcctcgaactcgcccggatcaaccgcacgcggttcgaggaagcgttcaagtccaaggcggtttccggcaccggacgcgacgcggccgtaaccgaggcggcggtggccgaggccgccctgcgggccgccgaggctcaggtggaaagcgaccggaaagccatcgccgtggccgaagccggtattcaacaggcggaagcagccgtggaaacagcgcggatcaacctggaatatacgcgggtgaccgcccccatttccggtcgcattggcagatccagcgtgaccgatggcgctctggtaacggcgtatcagcccatggccttggcgacgattcagcaactggatcctatttatgtcgatgtcccccagtccactgctcaactgctgcgtctgcaacggcgcttggaggaaggtcggttcaagaccggaggaatgaatcaggacaaggtcaagctgatcctggaagacggcacgccgtatcctctggagggcgcgcttcaattccaggatgtcacggtggagccgacgaccgggtcggttaccctgcggacagtctttcccaatccggaaggtattctcctgccgggcttgttcgtgcgggcggtctttaccgaaggcgtcaatgagcaggccctcctggtcccgcaacagggtgtcgcccgcaccccgaaaggcgatcctatcgccctgatcgtggacgcggacaatcaggttcaactacggatgctcacgatcgatcgggccattggcaatcagtggctggttacgtcggggcttcatgccgacgaccgggtcattgttgagggtagccaaaaggtcaggcccggcgctcccgccaaggcggttccgttcggcgccgcaatccccgacggccggccgaccggccaagcgactcagccatccgaaaatccaaaataaaacgaggttctcatgttatccatatactttcttgatcgccccgttttcgcctgggtcatcgcccttttcatcatgatgctgggcgggctggccatctacaacctgccgattgcccagtatccgcctattgccccgccgggtatcgccatcgaatcccggtatcccggggcctcggcccagacggtggaaaacagtgtgacccagatcatcgagcagaagatgaccggcttcgatgatatgctctatctcgccggcacgagcgattccgcgggcatgtcgcgtatcgagctgactttcaagccggggaccgatgcggacctggcctgggccaaagtccagaacaagctccaactcgcgatggccagcctgccggaagtggtccagcaatcaggcgtcaaggtcagcaaatccacccgcaactggttgttgttggcgggggttatctgcgaagacggcagcatggacggttacgacctgcgcgactatgcccagtccaacctcgagaaagtcctgtcgcgggtgcccggagtcggcgaggtcgaggtattcggctcgcagtatgcgatgcgcatctggctgaacccggataaactgaccaactatcacctgaccgtgagcgatgtgatcacgggattgcgggcctacaatgtagaggtttccgccggacagtttggcggaatccccgcggtggaagggcagcgcctcaacgccacgatcgtggttcagaatctcctgcaaaccccggaagaattcgcggccatccccctgcgcaccaacccggacggctccgtcgtgcgtgttcaggatgtgggacgaaccgagctgggaaccgagttctacgatatcgatggccgctataacggccagcctagcgccgttctggccatccgacagacgcccggggccaatgcgctggagacggccaatgccatcaagtcgaaactggaggaaatgagtcgctatttcccggcggggatgagggtcgtgtatccctacgataccaccccattcgtcaaggtcgccattaacgaggcggtcaaggccctgttccaggcgattgggttggtctttctggtgatgtggctgttcatgggaaacattcgggccacgctgattcccaccatctcggtgccggtggtgctcctgggcacctgcgcagccctgggggcgttcggctactccatcaacatgctgaccatgttcgccctggtgatcgccatcgggttgttggtggacgataccatcgtggtggtggaaaacgtggagcgactcatgagcgaagaggggctttcgccccgggatgctaccgccaaatccatggggcaggtgaccagcgccctgatcggcttctctctggtcctctcggccttgttcggccccatggcgttctttgccggctccaccgggatcatctaccgccagttttccctgaccgtggtcacgtccatgatcttgtcggtactggtcgccctgattctgacgccggtgctgtgcgccgcggtgcttaagccggtacccaagggacacgaggcggcggaaggcgcgatctggttcctgcgcccgttttttatgtggttcgatcgcgtgttcaaccggtttcgcgatggtctggtggccatcgtcggctactcgctcacccgaaaattacgcttcgtggccgtttacgtggcgattgtgggcggccttggttggcttttcatgcgtatgccgaccagttacctcccggacgaggatcagggaatcctctatgcccagatcatgacaccgaccggggccaccctggaacaaacccaggccatcgccaatgaagtccagcgctacttcctggaacaggaaaaggacgcggtggactcgtgcatgacgattgccggtaccggcttttcaggacgagcccagaacaacggcatggttttcgtcaaattaaaggattggaacctccgcgatcgaccacatctgcgggccgaggccgtcgccggccgggccatgatggccttttcccagattcgcgatgccatggtgtttgcttttccgccgccctccgtcatcgagttgggcaatgcgctcgggttcgacttccagttggtggaccgtggcggcctcgggcacgatgctctgatgcaggcccgcaaccaactcctcggcatggccgcccaggatccgaggctggtgaaagtccgtcccaacggtctcgaggatgtgcccgaataccgggtggatgtggattgggaaagggcaggcgttcaaaatctgcccattaccaccatccacagtaccatctcggcggccttcggcagcgcatacgttaacgacttcatccagggcggccgcgtcaagcgcgtctatgttcaggcggacgcgccctatcggatgttgcctcaggatctcgaaagactttacgtgcgcaacacggccggggaaatggtgccctttgcttcatttgcctccgggcgctggacgagcggggcacccaagctggagcgttttaacggtttcccatccatgaacatctggggcgaggccgcgcccggccggagttccggagaggccatgcgggccatggaggaaataaccgccaggttgccacagggagtcggctatgactggaccggcctttcctaccaggagcggcaggccgccgcccagaccggtctgctttatacgttttccatcttgatcgtttttcttttcctggcggccttgtacgggaaatggaacgtgcccatcgccgttctgctgattctgccactgggtgtcatcggcgggtttgccgcttcctcatggcgcgggttgccgagcgacgtctatttccagatcggcttgttgaacaccctggggctggccaccaagaacgccatcctgatcgtgcagttcgcgatgtccggcgtggcccaaggggcgggcttgatcgagtcctcgctccaggcagtgaagctgcgcttgcgtccgatcgttatgacctcgacgacgaccggcctgtccgtgctgcccatggccttcagcacgggcgcgggcgccggggccatgaacgctatcggcacggccgtcctgggcggcatgatcaccgggaccatcctggtggtcctgttcgcgccgctgttctacgtgctgatcgagaagatgttcggccgaagcaaaacggtctgacccgggacatgcttgacctgccggcggtgtgtatggccggtactgtgccgcgtcgatcccgctcttacggtggggtagcttcgccgttattcctcgcctgttcgatcaattcgataagcgaggccattttcggttttggggcggccagaaaggcctcgatctctgcggcgctgaaatgcgtggcaagataagaccggacatcgaatttctcgaaccagcaatcgagtatgcggcggcaaggccgcccatccgcctgcgcccggcaatacgaaaacgggacatgatgacccagcatccgacaataaccttctcgcgtatcgtgttcttcgatggccatgcattccattagaacaaaaaacaccaccacgccgcaaggccatcgccaccgcccgaaccgcccgacaaaatccgcccaaaaaaaaccgcaggtcgtttgtgcgagctgcggccggtcgctccgtggagcggtgcctgcgaatgtttcgtcttgttgcgaaaaactcgcagactgggatcgattacactggccaataacttagcgattgaagtaatacaagtcaagagaaaaatgtaaaatttcgaaatcccatgttgcatcctgctgattaacctgtatcatagaatcctatgcaaatctacctacactttaatgagagggctgtttatgatttctcttggcttggatatcggttccaactcggttggttctgcttgggtggacacggataagcaggaggtgttccttggagtaggcatctttccggctggagtggatgagacagacaccaaacgcggtactcccttgggtcagaaacgaaggggaaaacgcctgcaacgacggagtatcgcacgccgtgcggaacgcaaactcgctttgcgaaaattgctgacgcaaactggacttttaccctccgatccagatcaacttcagtacctgatgaacaaaaatccttggcatttacggcgtaaagcgttgcacgaggcactgactcctcatgagttcggtcgagtactggtgcatctaaaccagcggcgtggagcggtgggcattgagacgaatcccgaagatcctgaagaaggtaaggtcaaggaggccattgatcatctcaaaggtcagcttaaagaccgtacctttggacaattcatggccgatcttatggacgagcgcaagaaacaagtcctcaacagtgctggccaacctaagaaggatacattctatcatgatccaatccgtaatcgccgggacttattcgagtttcatgccgaccgtccgctcattcgtcaggagttcaacgcgatatgggagaaacaaaagggattcgatacaggattagcgatgcagttgacggatgatttgaaaaagcagatcgataattccggggaagattccacctggagacataaaggcatcatttttggccaacgccgcacttattgggacacgggaacattaggtcgatgcgatcttgagcccactgatcgatgctgcccaattgccgacatgtatgcacaagaatatcgcgtactggaaacggtcaacaatatccggatcaccaagcgcggcgaggcggagcgatgtctgacccgcgaagagcgaattcaagtcatagacacgctgcgtaggcagaagaccgctactacgaaaaccgtccgcacgtctttggggatcggtaaaaaaagcgtcagggatttctacaaactcagtttggaggctgacaaagactgcgaaatcaatacggactggttctatcgcgaaatcgtacacggggtatttacggaagatatctggcaaaagttgaccgaggatcatcgcaactccgtcaatcgcgcaatactcaaattcgatcccgctaacgaagaacatgctaaaagactgcgcgaagtcgcaggtaaatggtgggggctgccccaggaagccgtcgacaagattgtggccgtctggacgacacgccccaaactggaaaaacgcctgagcttctcccgccgggccattattaaccttcttccctatatgcgtaatggctatgaagccacacgttccaggttgatgtttgctgaagatgatgcaaatggggcgacggacaagcagcgtcgcagatatgccggtatagataactccctgaccaaggcagaccgacattttctaaaaaagcatcccggcttgttgcccccggcaccgatgctttccaatccagtggttcgcaaagccatacacgaggtacgcaggcatatcatggcccacctgcgcaagttcggccgaaagcctgaccgtgttgtcatcgaatttgcccgttcaaccaaacaatccggcaaagttcggcaaagtattttagacctcaaccggcgacgagagtcggtacgcaaacggtatgaccgggaatataacctgaccaatctgacaagaaaccagcagcgagccgcagaagatcgggtgatgctctgtattcagcaaaacaagtcttgcgcatatacgggccgcaggattaccccggatatggccgcgagaggcgagggtgttgaaattgaccatatcgtaccgtatagccgctccggcgacgacagccttaacaataaagtgttatgttttcgtgaaaccaatcgcggtaaaggaaataagacaccccgagaatggcttgggaataagttcgatgagtttatcacccgcttcgccaggtttgagaaatacaaaccggacaaggacgattgcaacgaatatttcacagccaaggattatgcccgtaagtatgagaatcttacccgcgaagtccgtccagacgacgagtggaagaactcgcaattgacggatacggcctacgcggctcgacaggtggcttcttatctgagcgacgcactttacggcggcgaacgagatgggaaacgtcgtatctacgttaccaagggcagatacacagcaatgctgcggcgggattggcaattgtttcaggttctcaatccaccgtgtcgaaaagacgatgccgatggacacgctgtggaaaagactcctggggatcaagtcaatgcggaaaaagatcgtggcgaccatcgccatcatgctatcgatgccgctgttatcgccttaaccggcccggatattattcccacattggctgctcaagccgcagaagcggaggaatatcacgaacggactggatattggccgaaacgcatccctatagcaccaccttggggcacagttagcgaatttcgacggaatgttttgtctaaggtatttgacgtattcgataaaaccgatgcagacggcgcaccagaaaaaggctcgccgctgatcgtctctcaccggcctgtaaaaagaaaagttaccggttatttgcataaagaggacttatggggcgctgttgatgagataaaaggtatttatcgcattcgctgcaaggtatccgagttatcgccaaagatgctccgtatgcccatagaagaaacggattccgacgttcgcaagcgcctcatagaggaaggcataattgcgggtctttctagcaaggatgctcgcaaaaaggcccgtgagcgttttgaaaaagggatattcaatagaattcttgttgacccggctctggggaaaggtggacttgtgcgtgattggggattacgcaagatcatacgtgattgtttggcagccaatggtatcgatcccgacaactttacgtccaagatgatagccgagttcgccaacacgggcaaattacgcatgcccagtggtgtgccgatcaaatcaatcattaccattggacccatttctgatccagtaaaaattgccgtaagagatcgttatactgggaaacaagccttaaacacgataaccggtcaaccgttatatcgttttcatataagccgaaataatcatcatagcgaaatcttggaggataataataccggcaagtggtccgatgattgcgtaacgatgtttcgtgctgcgcagcgggtgcgcccttcaaaggactcctatagtaaaccggtcgaacccaaaccagccgtaaaccactccgaccgcgatggcttgcgattcataatgtcactgtctgagggagagactatatatatgcgtcatcctggcagcgacatagtggactatttcgttgtgtttaaacttagtcctggtcgtttgtattttatacaccattgggatgccagaccctccgcgctccggaaagacgtcaacggcaatacaattcccaacagcaatcgagaagaaattagcgttacgccagcagatatgaaatcgcttggcccagagccgagcataccaccatacaaggtccgggttggtccgcttggtgaagtaacacggttggattatgattaagcgcactctcgaaatctcgcgcgaaccggcccatctggccgtcaagctcgatcagctcctgatccagcggcccgaggccgacccgcgcacggccgccagcgtcccttgcgaggatatcgggctggtcatggtcgatcatccccagaccacctattcccatgccgccctggcccgcctgatggacttcggcgcggccgtcgtgctctgcggccgcaaccacctgcccgccggaatcctgctgcctttttccagtcattccgaagtcgtctggcgcatcgacgatcaggtcagcgccgccaagcccctgcggaaacgactctggcgccagatcgtccaggccaaggtccgcgctcaggcctttaacctgtcggaggaatcgccggcccgcgccaagttgctcgccttggccggcgaggtcaaatccggcgacccggccaacgtcgaggcccaggccgcgaaaatctattggtccgtctggctcggcgcggaacggcctttccgccgtgatcccgacggcgacggactcaatgccctgctcaattacggctacgcgatcctccgggcggccgtggcccgcgccctcgtcgccgccggattgcatccggcccttggcctccaccatagcaatcgggccaatgccttctgtctggccgacgatctggtcgagccgatccgtcccctggccgatgcccgcgtgcgcgagctggccgagtggggcaaaaacgccctcgatcaatccgtcaaggcccagttgttgcagttgctcgtggccgaggtacgcaccgacgggcagaccggcccgctcatggtcggcctgcaccggaccgtttcgtccctcgttcaatgttaccggggtacggaaaaacgcctgcttttcccggccgctctcgatacgtcgtaaagcgccggcggttgccgggaacgattaaatatgctaataagcggttaccgatgcatgtggatcgttgtcatgttcgacctgccgaccgacaccaaggccgcccgccgggcctatacctattttcgcaagaaactgcttcaggacggttttacgatgatgcagtattcggtctatatccggcattgcgccagcgaggaaaatgccgaggtccatttcggccgggtcgagcgcttcgtgcccgacgacggggaggtccgtatcatcagcattaccgacaagcagttcgagcgcatgcgggtttactggggaaaacggcgcaagccacccgaacatccccctgcccagctagagcttttctgaaccccgaacgcgcccaactccttggctgccaaccgcttgcggaccaggtagtgtaatcgatcccagtctgccagcaagccgcaacaacatcgactgtcgaaaccgcaagcgttacagtgtaatcgatcccagtctgccagcaagccgcaacttgcggtgacggatagttgacataccacccagtgtaatcgatcccagtctgccagcaagccgcaactccagggcatcgaccaatacgccagccgtgagtgtaatcgatcccagtctgccagcaagccgcaacctgcctcgggtgtcgtgttcatcccgttggagtgtaatcgatcccagtctgccagcaagccgcaaca

SEQ ID NO: 4521 - DNA, 8657 bp, synthetic construct
  source 1..8657: mol_type = other DNA
  misc_feature 1..8657: note = Synthetic
gacggcccgcgtgttctcgaactcgtagaacacggcgtcgtcccacggaatcgtccggcccgcgagcacggccgaaaagtcgcggcccggcgacggcggcgaggcgggcatccggtccccgaggcccaggtacgccaggagcgtgggcatgaggtcgtagtcgctcacgaggaggtcgcacgtgcggcccggcggcaccgccccgtcgtggcggaaaaccagcggcacgtgcatcgtctcgtcgaaggcgttcaggggccgcgtgtggtcggccatgccccagatgccgtgctggccgccgctccagccctggtcggccgtgtagaccaccagggtgcgctggcggaggccggcccggtcgatggccgccaggacctcgcccacaccgtcgtcgacgccgctcgtctcggcagcgcagcggcgcatcgccgccacgctacccaggtactggcggttattcttcagccacggactggccggcagccgcgggaacgacggcagcgtcttatcggcatagtacgctgcgtgccggttctgcgccgggtgctccaggctcttgccgaggcagtacgggccgttgtacgcgagaaacaggaaaaacggtcccccgcggttctcttcgatgaagcgcacggcgcggcgggtccacaggtccgtcaggtacccgggttccgtgcggaccttgccgtcttcgatcacctcggccccgtagaaagtcgtggtgtgaccgtggggcatcgtgatccagtaggtgaacccttcctgcggatgaaggttgtcgcccaggtgccacttgcccacgaggccgcacgcgtagccggcctccgccaggaccttcggcagcgtgcggaactccttgatggtgcagtaggcgcccggccccacctgtgccccgcccgccgccaggtaacagtgcaccccgtgctgcgagggcaccaggcccgtcagaaacgtggcccgcgtgggcgaacacacggcgttgcaactgaacgcacgggtaaagcgcacgccgtcgcgcgcgaggccgtcgatgcggggcgtgcggatgtcggcgttgccgtagcagcccagcgtccacgcgccctggttgtcggccatgatgacgacgaggttcgtgcgggcaggcgcagcctcggccccggcccgtcgcgccaggtgatgggcggccagcccgcccatcgccgcccggatgaagtttcgccttgatatcggcatatctgcccgccgcgcggccggccgggccgcgccaaacaatgcgcccgccgtgccaaaacatgcgcccgccgcgataacagtgcgccggccgcgctaaaaaactcgcccgccgctcagggccgcctcggctcagatgtgctgggcctggatgcccgccagttggcagtagcctttcagaaggaccgagtggtcgccgtacaggaagagttggtggaagcccttgacgtcgcgcgagtcggggatgtcgtccagcgcaagttccaccgacgtgcggcagcccccggaggggggcgtatcgatgttcgccacgacgcgccccgtgccgacgagcatggtcttgccggcgccgtcgaacttcatcagggtgaccttctgcccgatccgccagaggacctgcggcgacacgccgatggccgactccgagtggctccgcagcacgagcggctcgggcggcttgtcgaacccatcgagtttcgtcgggcacgtgcagtgggcgcccatcagggtgttgttgaccgtgttaggggcggggtcctgcatgaatccggggacgcccagcaggtaggccgccaggagttgcgagatggccgcaccgacgtcgccctcgcaggtgcccacggccccctcgtccaggaggcgcgagaaggcgatgcacggcggacacgggatcttgcggctgcccaccaggcccaggcaatccatcgagatgccctggcagctctcggcggccatgagtcgcctgcacgccaggtagttctcggccgcgttgaggatgtcttccttcgacggctcgacgatcttcttggcctctttcgcgtagaaatcggcgatcgccttcgcctcgtcggattcctggaccttcgccagttcctcgacgaaccgttcgcgcggcacgtagcggagcgtcgtgccggtgccctccaggaccttgtcttcggtcttcgcgccggcggcgaaaaggagccgcgcgttcttcatctgccagaccgtcttgtgcatccgcaggccggcggccagccactggacgtcctgcgtcgcgccgaggaacacgcccggcgcacgcgacggtttcgccaggtgccgggtgaatgacgtgcccatcgggctgaacacgaccatcggaatcgccccgcggccctcgatgatcttgtcaacgtcgccccagcgccgcatgtccatgatcgtgaggaggattccatcgggcggcgcggacttcagcccttcgagcatcgccgccaccgccgcggcgtcgtagagcggctcgggcacctccaggccgacgcccagttcggcggcggccttcttcagcacctcggtgtactgggcctggtggccggcgatgtcgtaggaggccccgggccagcccatccagaacttgtcttccttcggccggatgaaaaccgcacgcaccagcggctttttcgacgcgtcggcctccgccgcaaagagcgaagaggcgaaatccagcaggcccatcttcaccgccagcgccgaggcccccgccgcccccgccgagcccaaaaacccgcggcggttcatccgcggacaagccgcaaaagaccctgcatcgccgagtgtcatttcatgccctcctgattgcccgcgtccgtcattggaacccgccgcggctctggctcgcgaccggggccggccccgacttcggcggaattgcgaccgacgccaaaagccgcactgattctataccggccgggccgcccggcccaacattttttcgccgccgcgcgccggaaatcccgcacgagacccaaccgcgccgccgataccgcttgaatccgcggtttcgaccccgccgccccccggaacccgacgcaacttcccgtgccccaatttctgtccccgttgcctgttccctgttcccctttgcctgttccccgttgcctgtcgttcgggcaaatgcacgtaagttgcgcgcacaaaatgcgacttacgtgttttggcgtccgaaaatacccccaaaatcgccccctcggaggaccaaaacggccctggcgctagcgccaaggccgatgacaccccaaaatgttaagatgggtaaggcgaaacacatacacttttcgtcgaattacgtcaaaacaccccccgacttggtcgaaatacgatcgaattcaacacgttttcgacaccccccgattgatgtaagtcacttttcaaaaatgcgacttacgtgcgacggccaatgcggagcgcggaacgcggaacgcggaatgaacggcgggacggaggaaggaaattgcggattgttgaagacccgccgtggcgggtagccatagccagccggaagaaaggacgccgcccgcgggctttcgctcacgggcggcgttgccctgcgaatcctttcacgtaaggccgtgaaaggccttggtgtgaaaagaaccgacagggccagggttggttacacccaagtacactatggacaattggcagggccttgtcaataatactctccagacaaagcccaaacaaaaaccgcaggtcgtttttgcgagctgcggtcggtcgcccgaaggcggtgcctgcgaattttctcttgttgtgaaaaaatccgcgggccagggttggttacactaaaaaagcaatataccgcgttctcttgcgggggcaaggaaaaaatccttccaggaaaaaatccttccaacttgacccatgccgggagaaggaatcagggaaaggaatgtgtgatgggaaccaccttgggattggacatcggcagcaattccgtcggtagcgcctgggttgacaccgacaagaaggaaattgtcatgggcgtcagcgtcttccccgcgggtgtcgatgaaacagacaccaaacgcggttctccgaagaaccagcgccgccgcgagaaacgctcccagcgccgaagtctggctcgtagggcggccagaaagcgccgcctgcgagagttgttgacgtccgccaatctgctgcccgccgacgcggttgcctggaaggcgttggtcgagaagaacccttgggtcttgcgccgcaaagcgctgacggaatcactgacgccgcatgaattcggacgcatccttattcacctgggccagcggcggggagcatggggggttcagaccgatccggaggatcccgaagagggcaaggtcaaggaagccatagaccatctcacggcagcgatgaaggagtcgaaggcagagactttcggccagttcatagccgaccgaatggacgagcgacgccatcccgttccgggcaaatgcaaccttgcgcagccccccgcatattgcccgcccaagtgcggcagtcagaatgagaactgccggttctattgcgacgccgtgcgcaatcgccgagacgccttcgagttccacgccactcgcgatctgatccaaaaggagtttgaaaggctgtgggaaactcagaaaaagctcggcggggaacttgccggactgctgaccaaggagttgaaagaacagttgaacaacccgaaggccgacgacacttggcggcaaagaggcgttctgttcggccagaggaagacttactggaacttgggaacactgggccgatgcgacctggagccttcggatcgctgctgtccgatcgccgacatgcacgcccaggaatttcgcgtactggaaaccgtcaataacattcggatcagcgagtacggaagagaggctcgcgccctgaccgacgtggaacgggcgagcgttaagaaggcgctgcaatcccagaagaccggttccgtccccgccgtccgcaaagcccttggcatcgacacggcctcgctcaagcggaaaaacctgccgcacaagttccgcttgaacctggaagccgacaaagatcgtgagatcaataccgactggttctaccgcgaaatcgtgcgcgccgtctttggcgaagacgcatggctgaaaatggatgaagcgaagcgcgaatccgtcaaccgcgcggtcctcaaattcgatcccgacagcaccgccgaaacggagcgattgcggagcggcgcgatccaatggtgggggctcgcgccggaggcggccgacaagttcatgcaggcctggaagacccggcccaaattggaaaagcgattgaacctctctcgccgcgccatcttgaacatcctcccttacatgcggcagtggggctgcggcgtgatagaggcgcggcagctctttgccgaggacggcgagaatggcgcgtcgaaggaacaacgggagcgatacgccctgggcgggtcgggcttgaccaaggcggaccgccacttcctccgaaagcaccccaactggctgccgccggcgcccatgctggccaacccggtcgtccgaaaagccatccacgaggttcgccgtcatgttatcgcttacattcgcaagttcgggcgtatgcccgaccgcatcgtcatcgaactggcccgtgaggccaagcagaccgagaaagtccgcaacaagattctggccgccaaccgaactcgagaaaaagaacgcaagcaaatcatactggacttcgggttggccgggctgccgcctcaccaacaacaggccgccgttgaccgcgtgattctttgccgtcaacaggggagtcctgctgtttgtccatacagtgatctggtacccggcaacacgggtaaggttatcaccgaaggtcaggccgccaagggcacggatgttgagatcgaccacatcgtcccgctcagccggtcccaggacaacagcctgaataacaaggtcctatgctaccgccaggccaaccgcggcaagaggaacctcacgcccaaggaatggctgaccgccgaacaattcagcctgcttgagcagcgcatgcggcactgggaaaaggacttgcgcagaaagtgggagaaccttcaccgcgccccgctgccggagcaggagttcctcaattcccaactgacggccaccgcgtatgccgccgcccaggtcggagcgtatctctccgattccctttacggcggcgagcgggacggccggcggcgggtgttcttcaccaagggcacctataccgcaatgctgaggaaggattggcaactctttcaggctctcaaggccgacggcgaaggggcggccgaaaacggcacggccgatccgcaaaaacgcgctgatcctggaaacaagaaccgcggcgaccatcgccatcatgccatagacgcgaccgtcattgccttgaccggccctgagattatcatggacgtggcccggcttgcggctgaacgcgaggagtaccatgaacgcacggggcactggccgaggcgagagccgcttccgccgccttgggggacaacggacgaattccgccgccaagcgctttcccaactcttcgacgtcttcgacaaggcgaacctggatggaacgcggtccgaaggcgcagaaaccggaacgcctttggttgtctctcaccggccggtcaagcggaaagtcatcggttatctgcacaaggaagacatatggggcgctgtggacgaggaggaaggcgtttttcgcattcgttgtcccatcgccgacttgaatcccaagatgttgcgcatgcctgaaccggagaccgatgaccaagtgcgccaacggctcatccgagagtccgaacacgccgggatgaccaattcagcggccagaaaggccgccacgaatcgcatgcggcttggggatttcaaacgtctgttggtggacccatcgctaggtaagggcggcctcgttcgcgattgggacttgcgccgtgtcatccgcgaatgtctcaaaaacaatgggattgaccccgaccatttcacagataagcagatgcaggaattcgccaagaccggaagcctacggatgcccaatgacggcgttcccatacgcgctgtcatcaccatcggccccatatctgaccccgtaaagatagccgtcagggatccgactacccgccggcaagccgtcaattcccgcaccgggaaactactatttcgctatcacataagccggaacaatcaccacgtcgaaatcatgcaggacgcggtaaccgggggctggtctgcacgaaacggcaaatgcgtgacgatgtacgaggccgcacaacgcattcggccgccgaaggacccggatggcggccgccctcaatcccagcaggcggtcaatcgggaagatgccgcggggcaaacgttcgtcacgtcgctctcagaaggggagacggtatttgcccgccgatgggacccggcatcaaaccaagccgttggatcgtccaattacttcgtcgtcgtcaaactggacagcaatcgcattttcttcgctccgcactgggacgcgcgaagcgaaagggagcaggaccgctgggccgtgacatattccgatctaaagcactgcgggccggtcaaggacgcccccccgtgcaaggtccgcgttgaccccttgggccaagtgcgcccgctgcaccatgattaaacgcaccgtcgaaatctcggggaaggacaaccatctgtccgtcgcggacgggtcgcttctggtgcgccaggggggccaggaagtcgggcgcgtgcccctggaggacctcggccttctcatcctcgacgccccgacgaccacgtacacgcacgcggtcctgacggaagtcctcgccgccggggcggtcgtcgtgccctgcggcagaaaccatcaccccgccggcctgttcctgccgcaggagaacagcctcattgcgcaacgccttgccgcgcaggtggccgcgcctctgccgctcaagaaaatcctatggaagcaggtagtccgggcgaagattgcggcccaactaggcgccctgccgcccgagtctcccgcgcgggggcatctgaagaacctcatttcgcaggtccgctcgggcgacccgacaaatgtggaggcccaggccgcccgcatctactggccggcgctcctgggtcaggatttccgccgctcggccgatggcctgcccccgaattgccttctcaattacggatatatggtgctgcgcgcatgcgtggcgcgggccgtctgcggggcggggctgcacccggcgctcggccttcaccaccacaaccgcggcaacccgttctgcctggccgatgatctgcttgagccgctgaggcccctcgtggatgcgcgggtaagggccctcgcgcaggcaggccacacggagatcaaccgcgattccaaggtgcaactcctgacggtccttgccgagacggtcgaagtcggcggcgagaaggggccgctcatggtggcgattgagaaggtcacggcctccctcgtgcggtgctacggcggcgagcagaagaaactggaattgcccacgctatggaactgagcggatacagggccatgtggctactggcgatgttcgacctgccggtggacaccaagaaggcccgcaaggaatataccctgttccgcaaggccctcatcaaagacggctttacaatgatgcagttctcggtgtatattcggcactgcgcgagcgag

SEQ ID NO: 4522 - DNA, 6229 bp, synthetic construct
  source 1..6229: mol_type = other DNA
  misc_feature 1..6229: note = Synthetic
ggccgcacggcgaccaggaagacaatgagcagggccgcccccgctgccaggaggacgactcgcaggatggtcttggcaccggccatgggtgctgccgttccggatgccgcgctggcggcagttgccgaggagtgtacgccctgccgccgcgaccgtcaacaaggccgtgaatcaaagtgacttggccactgagcgactggggtctggggcgcccaggggcagatcggcggcacaaataaagaacgcctcttcgccttgcgcctgaggggctttcaggttcgctccgtagagcgttgcctgcggaacaatttcccttactgtgacattgaagggcaatcgccgctctggtaaacttataccttgatttctaacgcccgtggcttgcgcagtcagacagaatttttgatgccagaggaatcttccggcaagtatactgagtgcctcgaaagtggcgacggacaagcaaaaaccgcaggtcgtttttgcgagctgcggtcggtcgcccgaaggcggtgcctgcgaattttctcttgttgtgaaaaaatccgcgggccagggttggttacactaacaagtagtataccaccctgtctcgccgaggcaagtaaaaaattcgagcacaaaattcctgcaagaaaaaaagccgtgcaatgagaagacctcaaggaaaggaccacggcatgaccatatcgctgggattggacatcggcagcaattccgtcggcagcgcctgggttgacacgaacaagaagcagatcgtgatgggggtcagcgtcttccccgccggcgtcgaggaatcagacgccaagcgtggttccccaaagaaccagcgtcggcgggagaagcggtcccagcgccgaagtgtcgctcgcagggcagcgagaaaacgtcacctgcgagagttgttgacctcggccgggctcttgccggccgacgaggttacgcggcaagtgttgattgaggcgaatccttggaccctgcgccgaaaaggcttggcagaaccgcttacccctcacgaattcggccgcatcctcgtacacctaaaccagcggcgaggagcctggggcgttcagaccaatccagaggatcaggatgagggtaaggtcaaggaggccatcgatcacctcacgcaggcaatggaagaagctggtgcccaaacgttcggccagttcattgccgacctgatggacaagcggcgccatcccgtgcccggcaagtgcaatctggaggcgccgggcgattattgcccgcccaagtgctccagccagaaccagaagtgccggttctattgcgactccgttcgcaaccgccgagatgtattcgagttccatgccacgcgtgatttgatccgacatgagtttcgcgagttgtgggacagacagaaaaaactcggcgggggactcgccgcactcctgactgatgatctgcgaaggcaattggatgacccgacaggcgataggttttggaggcaacgtggaactatcttcgggcaaaggagaacttactggaacctgggcacgttgggccgatgtgatttggagccttcggatcggtgctgtccttcggccgacatgcatgctcaggaattccgggtattggaaaccgtcaataacattcgcatcagcgagtatggcggaacgcagcgcggcctcaccagccaagaacgggccagcgtcaggaaggcgttacaatgccagaaggccggttctgtcgccaccgttcgaagggcccttggcatcgacaaggccgcactgcgaaggaagaacctgccagacatctaccgcttgaatctggagtccgacaaggatcgcgagattaacaccgactggttccaccgcgagatcatccgcgaggtgtttggcgaagacgcatggcgggaaatggacgacgcgaagcgtgaatccgtcaaccgcgcggtccttaagttcgaccccgaaagctccagcgaagcggagggtctgcgcagtggggcgactcaatggtgggggttatctccggaggcggccgaaaagctcattaaggcgtggaagacccgcccaagactggaaaagcgattgaacctctcccggcgtgcgatactcaatctcttgccttacatgcgcgagtttggctgcggcgtgactgaggcccggcaggtcttcgccgaggacggcgcgaattgcgccacacccgagcaacggcggcgatacgccctgggcggctcggtcttgacaaaggcggatcgccgtttccttcggaagcaccccggtctgctaccgcccgcgcccatgctggccaacccggtcgtgcgaatagccatccaccaggtccgccgtcacgtgctggcttacatccgcaagttcgggagagcgcccgaccgaatcgtcatcgaacttgccagggaggccaagcagaccgagagagtccgcaacaagatactggccgccaaccgtgagcgtgaagcgcagaagaagcagatcatcgcggagttcaatcttggcgcgaagcctcttaaccaacaatcagccgctgttgaacgggttgtcctgtgccgccaacaaaagtgtatttgtccttacaccaatctgacgcccggcgcggctggcaggcagataaccgagaagcaggccgccgagggcacagacgttgagaccgaccatatcgtgcccttgagccgctcccaggacaattacctgaataacaaggtgctatgtttgcgccaggccaaccgaggcaaggggaatcataccccaaaggaatggctaagcgccgagcaattcagcctgcttgaacagcgcatggggcactggaaagacgagttgcccagaaagtgggagaaccttcatcgcgatccgccccctttggaggacttcctcacctcccaactcacggccaccgcctatgctgccacacaggtcggcgcgtatctttctgatgccctttacgggggtgagcccgacggccggcgccgcgtgttcttcaccaaaggcaagtacacggccatgcttcgaaaggactggcaattgtttcagacgctgaaggaggccgacgagggtcaggccgcaatcgccccctccgatccgcaagaacgcctggaccctggcaagaagaaccggggcgatcatcgccatcatgccgtagacgccgtggtgattgccttgaccggcccggacatcatccaggaagtggcccgcctggcggccgcagcagaagaatgccatgaacgcacggggtattggcccaagcgcgttccgcttcccccgccctggggaacgccggcagagtttcgtcgccaagtgctttgccaactcttcggcgtcttcgacaaagcgaacatggatggaacacgggccgaaggcgctgaaaccggagagcctttggttgtgtcgcacaggccggtcaagcgcaaagtgaagggctacttacacaaagaggacctctggggcctcgtggacgaaggggaaggcgttttccgaattcgatgccccatcgccgacttgaaccccaaaatgctgcgtctgcctgaacttgagaccgatgaccaggtgcgcacacggctcgcgcgggaactccaggccgtcggcttcaccgaaccggaagcgcgaaaggccgcaacgaatcggctgcgccaggcggacttcaagcgccaatgggcggaacccgccctgggcaaaggcggcctcgttcgcgattggggactgcgacgtgcaatccgtaaatgtctaaaagacaatgggattgaccccgaccgtttcaccaacaagcagatgcagcagttcgccaagaccggaaaactgcggatgcccgacgggggcgtgcccattcgctctgtcatcaccatcggccccatttccgacccggtcaagatcgccgtcagggaccccattacgcgcaaacaggctgtgaatccgcgcaccaagaaaccgctctttcgctatcacataagcaggaacaatcatcacgttgaaatcatgcaggaggcagcgacgggggaatggtgtgcaagagacggcaagtgtgtgacgatgttcgaggccgcccaacgcgttcgcccgcccaagaacaagaaaggggagcatccgaaaaccccctccgcggtcaaccgtgacgatggcgcagggcagacgtttgtcatgtcgctctcgcaaggcgagatgattcacgctaggcgaccgcaccggcccgatggcatcgggtacttcgtcgtggtcaaactggacggcaatcgcatttacttcgcaccacactgggacgcgcggagcgagaaggagcaggaccgttgggacgtcacctactccgaccttaagcattgcgggccgaccaaggacaaccccccgatcaaggttcgcatcaacccactgggccaagtggtgcccgtgtatcatgattaaacgcacgatcgaaatctccggccagggcaaccatctttccgtttcggcaggttcgctcctggttcacagagagggccaggaggtcggccgcgtgccattggaggacttgggtgtcctaatccttgatgcccccatgaccacctacacgcattccgttctaacggaagccctggcggcaggggcggtcgtcataccttgcggccgcaatcaccatccttgcggcctgtttctgccgcaggataatagcctcatcgtgcaacgcttggcggcgcaggtccaagcgccgctgcccctgaagaaaagtctgtggaagcagatcgtgcaggccaaggtgcgcagtcaggcggctgccttgggtccgcactcgcccgcggcccgattgctgctgaatctggtgccgcgagtccgctccggcgaccccacgaacgtagaggcccatgccgcacgactgtactggcccgccatgttcggtaaggacttccggcggtcacccgatgggctgccgcccaacgcactcctgaactacggttacatggtgctgcggtcttgcgtggcgcgggccctgtgcggggcggggctgcatccatccctcggccttcaccatcacaaccgttccaacgccttctgtctcgccgacgacctcctggaacccctgcgaccgctggttgacgtgcgggtgcgggcgctggcccaggcaggcgcaacggaagtcagccgcgattcaaagatgcagatcctctcgctcctgatcgaaacggtgcgcctcgggggggagaagggccccctcatggtggcccttgagcgcgtcaccgcctcgctggtacggtgctatggcggggagcagaaaaaactcgatttgcccgtcctatggaactgagcggatacaggtgcatgtggctcctggccatgttcgaccttccgacagacacgaaggcggcacggaagcaatacgccctgttccgaaaagccctcattaaggacggcttcgcgatgatgcagttctcggtctacgtgcggcactgcgcgagcgaggagaataccgacgtgcacgagaatcgcgtggttggcgccttgccgccggacggggaggtgcgactcctgactgtcacggacaaacagtatgaacgcatgcgcgttttctggggaaaactgcgaaaaccggccgagcagccgccgcgacaactcgaacttttctaggttcgatttgcggcaactgcccggcctgtcgccacttagggcgacactagtgtaaccaaccccagcccgcggtcaatccacaactacacgtcacagcaccccggaaactcaagaagtgtaaccaaccccagcccgcggtcaatccacaacttcatcaggtgcgcggccgccccgatcgggagtgtaaccaaccccagcccgcggtcaatccacaacaacgagtccaggtgctcgcgtagttgctcgagtgtaaccaaccccagcccgcggtcaatccacaactgaggcaaggaacgttctcaagcagcagccagtgtaaccaaccccagcccgcggtcaatccacaacacaagacatgggtgacagcggggctgcctcagtgtaaccaaccccagcccgcggtcaatccacaacggttgccggctgtggcggcggcagagggcgagtgtaaccaaccccagcccgcggtcaatccacaacgatgcttggccggtcgtggctggcggagacagtgtaaccaaccccagcccgcggtcaatccacaactgtggtcagggggactccgaggatggcgtaagtgtaaccaaccccagcccgcggtcaatccacaactgccatcccgtggcatcaggcaccgcgtcgagtgtaaccaaccccagccc

SEQ ID NO: 4523 - DNA, 5514 bp, synthetic construct
  source 1..5514: mol_type = other DNA
  misc_feature 1..5514: note = Synthetic
ttggcgccggccatgggtggttgccgttccggatgccgcgctggcggcagttgccgaggagtgtacgccctgccgccgcgaccgtcaacaaggccgtgaatcaaagtgacttggccactgagcgactcgggtctggggcgcccaggggcagatcggcggcacaaataaagaacgcctcttcgccttgcgcctgaggggctttcaggttcgctccgtagagcgttgcctgcggaacaatttcccttactgtgacattgaagggcaatcgccgctccggtaaacttataccttgatttctaacgcgcgtggctttcgcagtcagagagaatttttgatgccagaggaatcttccggcaagtatactgagtgcctcgaaagtggcgaaggacaagcaaaaaccgcaggtcgtttttgcgagctgcggtcggtcgcccgaaggcggtgcctgcggatttttcgctttgttgtgaaaaatccacgggccaggattggttacactaaaagaaaatataccgctctctctcgcgtggggcaagagaaaaatctttccaaaaaacagcagttgtcggcaactgaggaaaggaacactgtatgaccctatcgctcggattagacatcggcagcaactccgtcggcagcgcctgggtggacaccgacaagaaggaaatcgtaatgggcgtcagtgtattcccggcgggtgttgatgagtcggaaacaaagcggggttccccgaaaaaccagcatcgccgggagaagcgttcccagcgcaaaaacatcgctagaagagcagccagaaaacgccgcctgcgagaagtgttgaccgccgccaaactgttgcctgcggacccgattcaattgaagaatctggttgacttgaacccgtgggccttacgccggaaagccctgacccaacctcttacaccctacgaattcggccgtgtcctcttacacctcaaccagcgccgaggcgccgtaggcgtgcagaccgatcctgacgacccggaagaaggtaaagtcaaggagtcaattgatcgcttgaataaaaccatgacggatagagacgctaagacattcgggcagtttatggccgacctgatggacgaacgacgacacccgattcagggcaaagaaggaaaattctaccacgacgcgattcggaataggcgcgacgtcttcgagttccatgcaacgcgcgacctgatcaaaaaggagtttgacgttctatggaacaaacaaagagaattcgacggggaacttgccgcacggctgaccggcgagttgcggaagcaagtggacgaccctgcggccgacaagacctggcggcagcgcggcatcatcttcgggcagcgcaagacttactggaacctgggaacgctgggccgatgtgatttggagccttcggatcggtgctgtcctttggccgatatgtacgcccaggaattccgtgttctggaaactgtcaacaacattcgcatcggcgagtacggcggaacgcagcgcggcctcaccagccaagaacgggccagcgtcaggaaggcgttacaatgccagaaggccggttctgtcgccaccgttcgaagggcccttggcatcgacaaggcagcactgcgaaggaagaacctgccagacatctaccgcttgaatctggagtccgacaaggatcgcgagattaacaccgactggttccaccgcgagatcatccgcgaggtgtttggcgaagacgcatggcgggaaatggacgatgctaagcgtgaatccgtcaaccgcgcggtccttaagttcgaccccgaaagctccagcgaagcggagggtctgcgcagtggggcgactcaatggtgggggttatctccggaggcggccgaaaagttcattaaggcgtggaagacccgcccaagactggaaaagcgattgaacctctcccggcgtgcgatactcaatctcttgccttacatgcgcgagtttggctgcggcgtgactgaggcccggcaactgtttgccgaggatggcgacaatagcgccacgcctgagcaacgcgagcgatacgccctgggcggatcgggtctgacaaaggcggatcgccgtttccttcggaagcaccccggtctgctaccgcccgcgcctatgctggccaacccggtcgtccgaaaagccatccacgaggtccgccgtcacgtgatggcatacatgcgaaagtttgggcgaaagcccgaccggatcgtcatcgaacttgccaaggaggcgaagcagacggagaaggtccgtaacagaatactggccgccaaccgagagcgtgaaagggagaagaaacagatcatcacggatttcaaccttggcgcgaagcctcttagccaacaagcagccgctgttgaacgcgtcatcctgtgccgccaacagaaaggtatgtgtccttacaccgatctgacgcccggcgctccgggcgagatcatcacggacgatcaggccgccaagggcacagacgttgagatcgaccacatagttccggaaagccggtcgcaggacaattacctgaataacaaggtgctatgttgccgccaggccaaccgaggcaaggggaaccggacgccaaagcaatggctgaccgccgagcaattcagcctgctcgaacagcgcatggggcactgggaaaaagggttgcccagaaagtgggagaaccttcatcgcgacccgccgcctttggaggacttcctcaactcccaactcacggccaccgcctatgccgccagtcaggtcggggcgtatctttcggatgccctttacggcggcgcgcgcgaaggccggcggcgggtgtacttcaccaaaggcacgtacacggccatgcttagaaaggattggcaactgtttcagacgctcaaggaagccgatgaaggttgggccgcagatgccacatcagatccgcagagaagcggagaacctggtaaaaagagccgcggcgatcatcgccatcatgccatagatgccgtcatcgttgccttgaccggcccggaaatcatcgcacaagttgcccacttggcggccgagcgtgaagaataccacgaacgcacaggctactggcccaagcgccaaccgctgcccccgccttggggatccacgcaggagttccgccgccatgtgctttcccaactcttcgacgttttcgacaaggcgaacctggatggcacacgggccgaaggcgcggaaaccggaacgcccttggtcgtatctcaccggccggttaagcgtaaggtcagcggttatctgcataaagacgacctctggggcgcggtggacgaaggcgaaggcgttttccgcattcgttgccccgtcgccgacttgaacccgaagatgttgcgtatgcccgtgcccgaagatgatagccaggtgatccaacggcttatccatgaaatgcaaagcactggctcgaccgaatcccaagccaagaaggccgcaaaggaccggatgcggctggggaacttcaagcgccaattgacggacccgcctcttggcaaaggcggcctcgtgcgcgactgggacttgcgccgggtcatccgcaaatgtctcaaagataatgccatagacccggacggtttcaccgacaagcagatgcaggagttcgctaagaccgggaaactgcgcatgcccagcggcgtgccgatacgctctgtcatcaccatcggccccatttccgacccggtcaagatcgtcgtcagggaccccattacgcgcaaacaggctgtgaatccgcgcaccaagaaaccgctctttcgctatcacataagcaggaacaatcatcacgttgaaatcatgcaggaggcagcgacgggggaatggtgtccaagagacggcaagtgtgtgacgatgttcgaggccgcccaacgcgttcgcccgccgaagaacaagaaaggggagcatccgaaaaccccctccgcggtcaaccgcgacgatggcacaggcacgactttcgtcatgtcgctctccgagggcgagatgattcatgccaggcgaccggaccgcagccccgaccagcccgacgccctcggatacttcgtcgctgtcaagttggacgggaaacgcatctacttcgcctcccactgggacgcacggagcgagaaggagcaagaccgttgggacgtcacatattccaatctaaagcactgcggtccggccccggacactccgccctacaaggtccgcgttgatccgttgggcaacgtggtcccggcgccccatgattaagcgcactatcgaaatctcgggccagggcaatcacctgtccatcgccgagggttccctgtgcgtgggcaaggcgggcgaaccggtcgcccgcatccccttggaggacataggcgtcctaatcctcgatgcccccagtactacctacacgcattcggtcatcaccgaggtcatcgcggcaggggcggtcataatcccttgcggccgagaccatcatccgcggggcctgttcttgccgcaggagagcagcctgcaaacgcagcgcctggcggcccaggcggcggccccgttgcccctgaaaaaatcgctctggaaacaaatcgttcaggccaagatccacagccaggcgggggcgttgccgcaaggcgcgcccgagcgcggcatgctgggcgccttggtgcgacaagtccgctctggcgatcccacgaatgtcgaggcccatgccgcacggctgtactggcccgccatgttcggcaaggacttccggcgttcacccgatggcctgccgcccaacgccgtcctgaactacggttacatggtcctgcgttcttgcgtggcgcgggccgtctgcggggcgggcctccatccgtcgcttgggcttcaccaccacaaccgttccaacgccttctgtctcgccgacgacctcctggaacccctgcgaccgctggttgacgtgcgggtgcgggcgctggcccaggcaggcgcaacggaagtcaaccgcgattcaaagatgcagatcctgtctgtcctgaccgaaacggtgtgcctggcgggggagaaaggcccgctcatggtggccctggagcgcctcaccgcctcgctggtacggtgctatggcggggagcagaaaaaactcgatctgcccgtcctatggaactgagcggatacaggtgcatgtggctcttggcgatgttcgaccttccgacagacacgaaggcggcacggaagcaatacgccctgttccgaaaagccctcattaaggacggcttcgcgatgatgcagttctcggtctacgtgcggcactgcgcgagcgaggagaataccgacgtgcacgagaatcgcgtggttggggccttgccgccggacggggaggtgcgactcctgactgtcacggacaaacagtatgaacgcatgcgcgttttctggggaaaactgcgaaaaccggccgagcagccgccgcgacaactcgaacttttctaggttcgatttgcggcaactgcccggcctgtcgccacttagggcgacactagtgtaaccaaccccagcccgcggtcaatccacaac

SEQ ID NO: 4524 - DNA, 22988 bp, synthetic construct
  source 1..22988: mol_type = other DNA
  misc_feature 1..22988: note = Synthetic
cattgctgagcgtagagtcccgtgagcaggcacgcacgtgagggcatacattttgcggtgttgtgaatttgcgtaaaacggattccgcccttggcaagggcgtcaagattgggtgtcgatatctcgcttccatagcacccgagatcagaccagcccatatcatcagcaaggataaagatgatgtttggttttttagcggggcttttaattgcgttttcagcatagccgggcacaagcgacgccacaatacctaatgcacctgcctttaaaaaattcctgcgtttcattattattgctcctttatttagttgagccggcatttccttggattttaatcccctttaaagcgcaacgctttgctgcgctaattgttatttactaaaatcctcagcggagttttttaaaggggaaattcgggtcttttgtcctgctggattccataagttttaccatttgctttgccttttcagggtattcagcggagatatcattattctcgcccgggtctttgcttaaatcataaagctcaatgggcttgcccttataacgaaccgccttccatttatccttacgcaccgcctgaacaggcccctgccgctcattaaattcccaatacaggcagttatgactaagctgagctcttgtattgcccttcaaggcctgaaaatatgagattccgtcggtttgagccttgggctcgatccccgcaatatcgcaggcagttggaaggaaatcccaaaacgctgatatatgcgaagactttgttcccggccttatcatttccggccagcgtgctgcaaacggaatatggataccgccctcgtagaggtctcgttttttgccgcgatacaccccattgctgtcgaaaaagcccttgtcgtagtggtggccgttatcgcttgtgaaaataacgagcgtatttttatcaagccccttcttctttagaagctccatcagagagccaatatccctgtccatccttgaaaccataccggcataagtagtatggccttctttatcgtggtagtaatgcccctgtttcatagggcgttttttccagccgagtttctggtaaggctcttttgaatcttcgggcactgtaagctcgtaatgaggtatggtatatgcaagatacaggaagaacggattgtttttgtcctgcttgcttatgtacttgaaggcctcttgcgtgaacaaatcgtgtacataaagcccttctttctcctttgtcttattcggcaggcttacctgatgttcattgcgccaaaccttttcggggtagtaatgatgggcggggccgtgcctcataaatccgaaaaactcatcaaatccctttttagtgggcattgcgtggcttaagttttcagcaagcccccatttgccgattgcgcaggtgttgtagccggcacgcttgagctcctctgcaactgtaggctcctcttttctgatatcaacaggctttccgtctgaagtccagcggggattcccgcgaactgaggcatgccctgtatgcttgccggtcatcaggcagcagcgcgaagggccgcataccgtggagccggagtaatgatttgtaaaaaccgcgccttgctttgctatattgtcaatattaggtgttttgatcctgctctggccgttaaagcccacatctccatagccaagatcatctgccaggataaaaactatattaggcttttcacttttgcccgcaaaaactcggcctcctgaagcggcgagaaagcagccggccgccttcaaaaaattccgtctattcataatcacctcttagaattatttaatcttgttactaatagtatctctgaaaggcaaaaattacataaatatttttttttgtgttgaaatttatggtttcgtatcagaagcagaacgcaaatatcccggttgcgcgacaatttttcctgacttcggcggttgtattgcggaaaactcatcgaaaagtgcgttttgaggctgttacgggtggtgttttgggctggcttccttgtagtgcctaattttatttttatattgacataatatttttatttcgtataatctgtgtttatgtttatacgagtaaaaaaatcaaaaaacagcccaaagagatctgttcagattgttgcgagctatcgcaacgagaagaatcagcctcgccagcgtatagtacgtcatatgggcactgccttcacagaagaggatgttacccgtctcaaagatctcgccgaattcgagaaggctaaacttgaggcggagataacgccggcacttttcaagcctgagcagcttgcagaggctgctatagaagcccgcaaaaagatcgatgatgagcctataaacgtaaatctgaaggatattaaggagcaggcacgcatcaccaccggcatccatgaggtgttcggaagcatctatgacgagctcggatttaacaatctttttgataaacgcaaagaggctgctcgcagaaaccttcgccacattaccatggcaaggcttgcaaatccggtcagtaagcgaggcagtgttcaggatctatctaaagacttcggcatcagtctctctcttgacagcgtttacaggatgatggacaacatcacagatgatattatcagcaaggctcaaaaccacgctcacaaggctgctaaagggcttttaggcgaagagataaaccttctgttttacgactgcaccaccctctattttgaatcatttacagaagatgagctcaaaaagaacggctacagcaaggatatgaagttcaatcagccgcaggttgtgcttggccttctctcaacatcagaggggcttccagttggttatgaggtgttccccggcaatcagtatgaagggcatactctgcacactgttattcctaagatcaaagagaaatacaacctcaagcgtgttatatttaccgcagacagcgcaatgctgagcaaggctaatctggattaccttgaagagcagaaagtggaatatatcgtagcagcgaggctaaaaagcctcactgatcaatggaaagcaaagattacagaatccgttgctcctctcagaagctttgattacggcaagaacagaaggctaattgttacctacagcgacaagctcgccaaaaagaataaacacgacagggacgaagctataagaaaacttcgtgagaagcttgaaaagagcagtaaccccaaatcccttataagcaactacggctacaagaaatttatgcgagttaccggcgaggtaaactgcgagataaatgaagagaaatatgctcaggcagcgaaatttgatggccttcacggcgttataacgaatgttaaggatatggatgattcggcagtagtagagcattacaagcagctctggctaattgaggagtgcttcaggatcagcaagcacgagctgaagatacggccgatatatcactggacaccgaaacgaatcaaagcccatatactgatatgctttatcgctctaacctgcgcgaggaatctggcatacagggttaggctaagattcgaggcgatgtctgtggcaagaatggtaaatgcgctaaaccacgtgcagcttagcatcctctgggataagaaaagcgaatgcaaatatgtgctgccatcaaagattaacgaggacgcaaggaaactctacaaaacagttaatctgagcgcagataccacaccctataagatgtaacacagaccctgaaaaaactcaaaaaaacagggttgtagtgcctgcgcaaaaaatcgagtcctttattgacaggcacttatgaaaatttaccgccgaagtcaggagatgatgtttggttttttagcggggcttttaattgcgttttcagcatagccgggcacaagcgacgccacaatacctaatgcacctgcctttaaaaaattcctgcgtttcattattattgctcctttatttagttgagccggcatttccttggattttaatcccctttaaagcgcaacgctttgctgcgctaattgttatttactaaaatcctcagcggagttttttaaaggggaaattcgggtcttttgtcctgctggattccataagttttaccatttgctttgccttttcagggtattcagcggagatatcattattctcgcccgggtctttgcttaaatcataaagctcaatgggcttgcccttataacgaaccgccttccatttatccttacgcaccgcctgaacaggcccctgccgctcattaaattcccaatacaggcagttatgactaagctgagctcttgtattgcccttcaaggcctgaaaatatgagattccgtcggtttgagccttgggctcgatccccgcaatatcgcaggcagttggaaggaaatcccaaaacgctgatatatgcgaagactttgttcccggccttatcatttccggccagcgtgctgcaaacggaatatggataccgccctcgtagaggtctcgttttttgccgcgatacaccccattgctgtcgaaaaagcccttgtcgtagtggtggccgttatcgcttgtgaaaataacgagcgtatttttatcaagccccttcttctttagaagctccatcagagagccaatatccctgtccatccttgaaaccataccggcataagtagtatggccttctttatcgtggtagtaatgcccctgtttcatagggcgttttttccagccgagtttctggtaaggctcttttgaatcttcgggcactgtaagctcgtaatgaggtatggtatatgcaagatacaggaagaacggattgtttttgtcctgcttgcttatgtacttgaaggcctcttgcgtgaacaaatcgtgtacataaagcccttctttctcctttgtcttattcggcaggcttacctgatgttcattgcgccaaaccttttcggggtagtaatgatgggcggggccgtgcctcataaatccgaaaaactcatcaaatccctttttagtgggcattgcgtggcttaagttttcagcaagcccccatttgccgattgcgcaggtgttgtagccggcacgcttgagctcctctgcaactgtaggctcctcttttctgatatcaacaggctttccgtctgaagtccagcggggattcccgcgaactgaggcatgccctgtatgcttgccggtcatcaggcagcagcgcgaagggccgcataccgtggagccggagtaatgatttgtaaaaaccgcgccttgctttgctatattgtcaatattaggtgttttgatcctgctctggccgttaaagcccacatctccatagccaagatcatctgccaggataaaaactatattaggcttttcacttttgcccgcaaaaactcggcctcctgaagcggcgagaaagcagccggccgccttcaaaaaattccgtctattcataatcacctcttagaattatttaatcttgttactaatagtatctctgaaaggcaaaaattacataaatatttttttttgtgttgaaatttatggtttcgtatcagaagcagaacgcaaatatcccggttgcgcgacaattttttgtggcttgtggcaaaattattagtgaaaaattagcggggattagcggctgaaaattctctgtgtaatcagtggattatattagagcagtatcgcagtttggggcgaacgcccaagcccgcccctgcactgcgaatgcttaattatctgcgttttatttagcgaattccacgcatctaacctcacgcaggagtgtaactttaatctctcccgggtaggtcatttcgttttcgatcttatttgctatatctcgtgcgatcttctcagcggaattatcatcaatctcgtcggcattaacaattaccctaatctctctgcctgcctgaatcgcataggtgattgaaacgcccttgaagctgtttccaatctcctcgagcgaacgcaaacgcttgatatagcgttcgagggtttcgcgtcttgcaccgggccttgaggcgcttatggcgtctgccgcagctacaagaggcgtgtatggattgtccggagcgatatctccgtggtgtcccgctactgcattgagaaccacggggctctcgttgaatttccgcaggaattcagcacctattgccggatggccgccatcgtgttcgtggtctatggccttgccgatatcgtgcaggaagcctgcccgccttgccatacttccatcaagcccgagctcatcagccatcacctgagacaaatacgccacctcgatactgtgctgaagggcgttctggccgtagcttgagcggaacttcaaaacgccgatctttccgagcactttgttcgaaagcccgcgaacatccagctctgtggctgtttccttgcctatctggagcatacgctgatcaacgtccttcctcgtctgctcaacgagcccttcaatatgggtaggatggatcctgccgtcctggatgagccgctccattgtgagccttgccacttccctgcgaaccggatcaaaaccgcttactacaataacccccggggtgtcatcaacgatcacatccacgccggtagccttttcgaatgccctgatattccggccttctcttccgataatacggcctttcatatcatcgttggggatgtcaacagtggatacagtggattcgcagcactgctcagcagaaaatctctggatagcggagctgataatctccctgctttttctttcagcagtttcgtttgcttcctcaaccttcttgcgtatcacaacattcatatcgtgttcgcactcatcttcgagcctttgcaggagcagctctttcgcctcctgaacattcatccccgtaatctgaagaagcaccttcttctgctcggcaataatgtctgtgagggctgattcccttgcggaaagtcgtttctgcctttcctgaatctcgttttgggaaactgctatctctttttccttctcggcaaagagctcagtctgtctttggtttgcatcttctcttttgctgagccttttttcctgatcacgcagttcttttcgaacctgattgcattccttatcgaattcctcccgccttttcataaattcggaggaggcatcgattcttgcagttttaaggatttcttcagcttctttttttgcttcttcggtttgtctgtctaatttatgctttaaagtctgctgttttgcaacagcgatcgaatgaattacggcaaaagttgcaattgccgaaacaactgcagcgccgccgccaactaatattggcgagactgctaatatatttattaacataccagattacctttcaattgaaaatcactcaaaagtgcaatagacaatccggcgtggtgaaaagtataatagacccgcagggcctattgagaacacaattccgcgcacagcggcactaaggcctgcggaaaggcttcaaatagaaggatgaaaaacgtatatttgaacagttattcaatatttagttcctgtagatacaaattttctgcctacttttgatttcaactattattacagaccaccacaaggtctgaatgctattacacttattaaatttatgtaaactgtttcccaacaaagggaaacggttagataataaatttgaggaatggaaaaatcaagtaaaatgttttgattttctttcagaaagttaagcgaagtgtgaaaaaatcgtttttatcgagagaaacagcgattactgcttttctgaatctttctcgtgtatgctgtcgtacacttcctgtctgtgcacagaaacatcctttggggcctgaactcccagcttcaccttgccgcccttaacatcaacaacttttattaccacattgtcgccgataactatagattcatctttttgtctgctcaaaaccagcatccggggactccgttcaccgtaatattatactttaagttgcaagcattataaactatcggttaatgagaacaaagaaattatttaaactaaataacttttttattcatatccgataaaatcaggccgcctcaagccttgtaaaatcaaaactgatcaagaaaacgaaggtcgttttcgtagagcagtcttatatcgtaaatcccgaacttccgcattgcgagcctctcgatgcccaaaccgaaagcccagcccgtatatttctcgctgtctataccgacagaatcaaacacgtttggatctaccatcccgcagccgccgatctcaatccactgctccgagccgtctttgttgtggaaaagaaggtctatctcagcgcttggctcagtgaatgggaaaaaactcggtctgaagcgccattcggtatcctcgccgaaaaacgtgcgtacaaactgatcgacagttgttttgaggtctatcattgaaacaccctcatcaacaacaagcgcctcaatctggtggaacataaacatatgcgttgcgtccaccgtgtccggccgataaacccttccaggagccacaacccttatcgggggcttctgagactccataaccctgatctgaattgtggatgtctggcttctgagcagggtgttgtcgtctatatagaaattatcagcggggtctcttgcgggatgctcttcggggatattcagggcgatgaagttgtgccattcatcttcaacctccggaccgtatgcgatcccgaagcccattcttccgaatatatccagaagttcgtttacagtgctcgagattacatgctgcttgcccacctccggcttcagcccggggagggtaacatcttcaacaagcttctcggacttgcccgaaccgctgccgaggctctcctgcttatgcttgaaggcctgattcacttcgttcttaatcttgtttgcaagcttgccggcctctgccctgtcctccggggccacctgaccaatcttgctgagaagcttggtaatcagtccctttcttcccagatatttaattcggtactgctctaaggcttcgctgctttgaaccttttcaagctcctgcagggcctctttaccggtgttttcaaaatctttaagcataaaatggctctgggctttattaactaaagagcagcttttgcctcttctgcaatcttcttgaaagctgccggatcatcaatagctatctcgctgagcatctttctgttgaggtttatgtttgcctttttcagcccgttaatgaaatggctgtatgagatatcgttgtttttgcaggcggcgctgatacgtgttatccagagcctgcggaaatcacgtttcctgagctttctgtcggttgttgcccttgctcctgcacgaaccgaggcctcctttgcaagtcgtatctgacgacctgaagggcctctgtatcctttaacgctctttagaatccttttgtttttgcgcctttttgcagcgcctattcttgtacgtggcatttcagctttcctttcattaaattttcgctgctggcggcaagctgtaggagccgagaagcagcatttccccgccggaaaaacgccggcaaataactatttcgctttcttcaatccaagcatatcgcggcatttgtctgcatactcatcgctgatatatccgtccttgccgagcttgcggcgccttttcgggctcatcgcactcataaggtggttgctgccggcacgcttatacttgaacttgcccttcgctgtgatcttcacacgcttggacaatcccttgtggggtttcatcttaggcataataatctaacctgtttccgattaaataattcaacctgcccgaacgaccgccgctcaggcaaatggaaaacgtgattatctgaaaaaaagactcaaggtcaagtgatatttttttaaaggggcaaacgcagaaatgcaaaaacaagttaccccgtaaacccgattaggatttacggggcaagagcctgcgcagtactaaaagtactacttgttatgacaagactcacagactcggatcagttacaataattgaattatattgaatatatattataatgtcaagatgtatgtataaatatattcaatttttatcgcaggagatttaagtattatgattacgcttggattggacattggaacgaacagtgttggatgggctcttattgatgaaaaaaacaatgaaattttgcgtacaggtgtacgggttttccctgaaggagttgaccgagatacaaaaggggcagaaaagtccaaaaatgaaactcggagacttgcaaggggaagcagaagaaacagggctcgtatgaaatacaggagggacaagcttgtaagaatgttaaagagaaacggcctgctgcccgcttcagatatagaattttcagagcttttaagagaagacccttacaaattgagggctaaggctatacaggaaaaaatatcacttcaccagattgggcgagtattattccatataaaccagcgaagaggcttcaagagcaatcgcaaatcgggcgacgaaaaacagggcaaggtgataaaaaatgctaatgaactccaggatgaaatagacaaatcggggctcaaaaccttaggggcatattttgcctccttggacacttcaaagaaacgaatcagggataattacacacttcgctcaatgtatgaacacgaattcgaggaaatctggaaatttcaaagcaggttttatcctgagattcttactgaccgccttaaaacaaaagtaaaagatgaaactatattctaccaaaggccgcttaaaccatgcgatgatttaataaaagattgcgaacttgaggaagatgaaaaggtatgccagcgggcagactggttcgctcgcagatttcgcatactccaagacgtgaataacttaaagatacacaatccagaaggcacgattaaagaactctctcaagaccagagagatactattacccaaattttattatccaaggagaaagcaactttcgagagcataagaaaaaagctcgggctaattgattctcaaaaattcaacacagaagaaggcagttcaaacaggaaaaatccccatttaaaaggcgatgtctttcaggccaagcttaaaaatattaacaagaaaatctttgcaggccttgatgaggaagcaaagatcgatatcaacaatattcttatcgaccagacaattgatgatgaggaattcatttcagagatatgcgaaaactataactacagcagggatgaagcaatcaaaatatcgaaaatccccttgcccaacggctacaccaaccactcaaaaaaggcaatactcaagcttttaccttatatggaaaaaggattcttaacatcagatgcggtaaaagaagtttatggaagatggccaagcgagcagaaaacggaaattttagacaggctccccctcccgcctgatttcagaaacccaatcgtaaatcagggcataaatgaggttaggaaggttgtgaatgctgtaatctccgcatacggcaagccggacaagatagcagtggagatggcaagagacgtaaagggctctaaggcagaaagagatgaaataagaaagaaaaactgggaaaacgagcagaaaaatgaagaggcaagaaaaatacttgtagaagaattcggtttctcaaggcctgcaagagaagacataataaaatacaagctctggatcgaatgcagaaaaacctgcccctacacaggcaagccggttccccagcatttacttttcagtcctcagtctggagttcagattgaacatatcattccatactcaagatgcctggacgacagctacatgaacaaaacgctatgctatgcagatgagaacaggagaaaaggcgaaaagacaccatacgaatattattccagcaaaccagagcagtacgaagaaattcggcagcgaattgcgcctctgccctttccgaaaagatctaaatttaaccagaaagaagttaagctcgacaacttcatcgaaagacaaatcaacgacaccagatacataagcagagcggtaacatcataccttaagcagctcgggtgcacggttattggaactaagggaaaaataacctcagatctgagaagagcatgggggcttaattcaatactaaacacaatcggcagcacgaaaaacagagatgaccaccgccatcacgcagttgatgcggcggttactgcgcttaccaatcagcagcatcttcgagaccttgcatatacaaagaaaaggacagaagatttggcaatgactgagccatggaaaggtttcaggcaggagcttaaagagtctattaattctataaatgtttcccatcgggtgcgcaggaaggtatcaggcaggctccatgaagacacggcttacgggcctacgggtataacaaatgaaaacggcgatgaatattacgtgtaccgaaaacccctcgagagccttactctgcctatggtgcataaagtggttgacccgacagtgcgggagatacttcttgaaaggctcagagaaaacgggatacacactgagggcaaaactaaatcaatacccaaaaaagtctgggaagagcctgtgtatatgaagagcaggaaagacgccagagtgcctataaaaaaggtaaggatcaggacagtttacaacaatgttgcaaaaattaaagatgaagaaggcaaaccatacaaagccgttactcttggcagcaaccaccatatcgagatattcgaatttacggacaaaaagggaaacaccaaaagggaggggaaagttgtatcgttgttcgaagccgcaagaagaaacaaagaaggccgacccattgtatgcagggattacggagacgggaaaaaatttatctgctcgcttgcgaaaaatgagatgtttatgatgaaaatggatgacggttcatttaagctccatagagtacaggtggtgtctcttatcgttaatcagcaagtaataatattaagaccagcaacatttgccggagcaggaaaatcttcggacagccctccaattgtgcaaagaaaaaacgctaacactctgaaaggatacaaggtaacagtggacccgctggggaatatcaatcccgctaacgactgagcagttatgattaaaaggataatagagatatctgagagcccatgctctttgaggattagaaacggccagctgattgttggaaggaatgatctgcctgaaaaacagataccctgtgaggatgtaggggtgctgctgatagataatcaggccacaacctacacccacagcgtacttacaagactgcttgatttcggggctgcggtggttttgtgcaatggcgagcatcatccggcaggcatgctgcttgccatagattccaacagtatccagacagagagacaccgccaccagatagaagcatcactgccgcttaagaaaaggctttggaagcagcttgttcaggccaaaatatctcatcaggctgcggttgttaaaacagaaaatccccgtgcatccaaatcaatagagcagctcgctgcaaaggtgcgttcgggcgataaatcgaatgttgaggcaagggcaagcaagctctactggaaatattttctgggctctcgaaatttcaaaaggctaagaggcggagcaccgccgaataacctgctcaattatggatatatgatattaagggcggcagtggcaagggctatctgctcttccggcctgcttccctcattgggccttcaccactgcaacagatacaacgaatactgccttgcggatgatattatggagcccttcaggggttttgttgagaaagaggtgagattgatgtggcgggaaaatcctgatgaagaatattttgccaagctttctcagcttcataaagctaggcttctggaaacacttcacaaatcggtaacaatatcgcaaagctccggcccgctaatggtgggtcttcacaaaacggcagcctctctctataagtgttttgcgggcgaggaagattctttggagcttcctgatttctaaggactaacaatggaattaagcgggtacaggatgatgtggatttatgttttttttgatttgcctactgatacaaaaaaggcaagaaaagattactccgaattcagaaaaaagcttttaaaagacggcttcacaatggtacaatattcggtgtatgaaaggcactgttcaagtgaagaaaatgcagatgtacaccttaaaagaatcaaatcatttcttccccctgatggagaagttcgaatcctcaccatcactgataaacagtatgaaaggatgcacattttctggggaaaaatgcgcaaacctgcacctccagccccaaagcagcttgaattattttaactgcctatcctgcctaaaagcttgctgcacagattcttatgaaaaatgtattgtaactgatccgaatctgtgagcaagccacaacgaccagattcacgtttctctaagtctgcgattgtaactgatccgaatctgtgagcaagccacaacatattctgcccagcgttcttggtaaccaaattgtaactgatccgaatctgtgagcaagccacaacaaataaaagcaattgaccaaatcgaaaattattgtaactgatccgaatctgtgagcaagccacaacaattttagttctttgtacattttgatacctattgtaactgatccgaatctgtgagcaagccacaacttgataaaggtagtgaagctgctggatttattgtaactgatccgaatctgtgagcaagccacaaccacggtgtcagtcggaccagttaacatcaattgtaactgatccgaatctgtgagcaagccacaacttctacccctttttttgttattggaatgttattgtaactgatccgaatctgtgagcaagccacaaccgtgaagccgagaaagaaaagcaaaaatctattgtaactgatccgaatctgtgagcaagccacaactaacaaagcggcttaatgtttggacgactcattgtaactgatccgaatctgtgagcaagccacaacagagaactcgccggattcagcttgaccagcattgtaactgatccgaatctgtgagcaagccacaacaaaaacctcctcatcagctgagctcccatcattgtaactgatccgaatctgtgagcaagccacaacgcgacatttaaggtgtctggcttacctacaattgtaactgatccgaatctgtgagcaagccacaacttttaacgccgatggaaaagctcaataagattgtaactgatccgaatctgtgagcaagccacaacacgggctgaacaagaaaatatctgataaaattgtaactgatccgaatctgtgagcaagccacaactgtgcagctattgcaaacagaagcttcctgattgtaactgatccgaatctgtgagcaagccacaacatatttttcgttccttattgctaccacaccattgtaactgatccgaatctgtgagcaagccacaacctgccggtggtgcgagtttaaccgataggcattgtaactgatccgaatctgtgagcaagccacaactgtcttgcttttgctgcccactacaacgtgattgtaactgatccgaatctgtgagcaagccacaacgttattttttgggtcgctgtaaaaagcttattgtaactgatccgaatctgtgagcaagccacaactccggacttatcaaaccactgtaaaaagcattgtaactgatccgaatctgtgagcaagccacaacgcggacagtggtctttggcgggtttggtctattgtaactgatccgaatctgtgagcaagccacaacctgggatatagttttaatctcagtcaatgcattgtaactgatccgaatctgtgagcaagccacaacatccgactcctgcggactttccatctcaggattgtaactgatccgaatctgtgagcaagccacaaccgactgatgttgtagatacaagcgagtccgattgtaactgatccgaatctgtgagcaagccacaacaaagatacacctggaagcttcccgattggtattgtaactgatccgaatctgtgagcaagccacaacccaagcatagaacgagaaggaccttttatattgtaactgatccgaatctgtgagcaagccacaacgtgaagctttccaaattcagaagcttttagattgtaactgatccgaatctgtgagcaagccacaacagggaagccatatctattgatatattgtgtattgtaactgatccgaatctgtgagcaagccacaacaaggttggcgtgagcgtctcggcggtaaaattgtaactgatccgaatctgtgagcaagccacaaccgatgggcggagatttcgtttcccgctctattgtaactgatccgaatctgtgagcaagccacaacccaagcatagaacgagaaggaccttttatattgtaactgatccgaatctgtgagcaagccacaacgtgaagctttccaaattcagaagcttttagattgtaactgatccgaatctgtgagcaagccacaactggtcatcgctcatttcgtatttactcgaaattgtaactgatccgaatctgtgagcaagccacaaccagccgaattcttcagcttccttgctgtcgattgtaactgatccgaatctgtgagcaagccacaactgaataatctacaaggttatagataccttgattgtaactgatccgaatctgtgagcaagccacaaccggcgatatgcagcttgtgataatactatgattgtaactgatccgaatctgtgagcaagccacaactggacttcctctgccacgttactataccatattgtaactgatccgaatctgtgagcaagccacaactcaactctgtccatatacttgaacgattcaattgtaactgatccgaatctgtgagcaagccacaacaacaggcacagtgtccggcacttctacttattgtaactgatccgaatctgtgagcaagccacaacgcagatgtataacttcgagatataagtcctattgtaactgatccgaatctgtgagcaagccgctaattactataaatatcttaataaaattagcggtttttctgtaaaatgcccagcttattgcaaataataatttttaagcaaaatctgcgaatatcagcttacgatattgaaaaacagatacgcaaacggggcggtgaacacgagggaatctactatatcgaggattcctccaaagcccgggagcttatcgccggagtctttaatgcctgcgtctcttttaagcatagattcggcgaggtctccaagctgacctgcaaaggcgaatattatcccgaaaatcaccccttgccaccagagcatcacagagaatataacggaaaatgcagcacctgagacagcagaaaaaatgcagcctccaatcattccttcccatgttttcttagggctcactgcaggggcaaattttgtatgcccgaacatctttccgaatgtgtatgcccccacatcgcacatcttcaccacagcaataaacacaatcaatgccgaaatgctgtgttccactcgtattgccaggaagaatgagctgaaaaacccccaatacatcacagtgagcacggttgccccgcagtttagtattgttccttcgttgctttttgttctgccctgagcaacgaaagagagcagtacagccgaaagcacagcggcaaacataatgataagatgaaggtatgcctgagagatgccgaatgcaaaaccgaactgcttgaggaagtagctcaggcagaaaagggttgcccctgccattgaagcaatgggaaacaccctcgcacccttgccttttaccagtcctgaaaattcattaaccgcagtgattaaaactgcctctgcgataagagcccagataaacccctgcacctgctccccgcctgttcgccaaatcagcacgctgtccagccagcagaggagcatagctgctgcggccataattatgccgaaaataatgcgctgctttaccatactcgccttcttagaataccccgccggagaggcgggctgaataaaagtttatctcaagcttctcagaaatccatagcctctgctatctgcacggcgttcaaagcagctcccttgcgtatctgatcgccgcagacccagagattgattcctctgccccccgagatagactcatcgcggcggattcttcccacgtagatatcgtctttaccgtctgcgtctatggcgggcatcgggaagcggtttttctcgcggtcgtcgattactgtaacgcccggggcatttttcagcacttcacgaacccatgcagggtctgccggcttttcaaactcgagattgatgctttcgctgtgagcccgcattaccggcacacgcacgcaggtgcaggtgatcccgatctgcgaatcatcgaatatttttctggtctcgtttaccattttcatctcttcttcgttgtagccgctttcgccaattttggaatcatggcagaaaacattaaacgcagcctgatagggcagggcctcgcataccggctctttgccttcaaggatatcgccgctttgcttcttgagctcgttcattgctgcaattcccgctccgctggctgcctgataggtgcttatcaccatacgcttaactttgttctgcctgtgcagcggccataccggcacaagggcaataatcgtagagcagtttgggtttgcgatgatccccttgttttccctgattgcctcgggattaacttccggaacaacgagcggcgcatttgggtccatacggaaggccgaggagttgtctatcattacagctccgctctgcacgaccgcatccgcaaattttttgctctgcgaaccgcccgcgctgaaaagcgcaacatcaacacccttgaagctgtcttctgtcagttcttctaccgtatattcctcgcccataaactgaatcttcttgccggccgaacgtgagcttgcaagcaccttgagcgaatcgaatttgaagtttctctcttctatgagtctcaaaaattcctggcctacaacgcctgtaacaccagctatagcaatattgcggctcataatatttctccgttttctttaaatgataaaatgctgagttcctgcgggtgcgggattatagcagaacaagctcgattaagcaaaacaattcgccagctaatgagcggagggtgtgcgacaatatttttgggcaaagctctttaaagccgaatctatccgcttgctccgtccgccttcggcggactccacgcacggctctgattgtctttagtattacgcagcgatttcacaaaacgagatatttaaaccgagccacgcatgtaggccgccgcaggcgggacggaataagtggacaaaaggatgcagaggaaaaagatttaatccacaataaatgggtaactgtccctatttaaacttggaagttaatcgaacgggcaaaggcaaatctaacacatataaaaccggtacaaaaatgagaccggttcaaaaaccagactggtctaaaaactgtaccggtagtggtctaaaaaatagaccggtttaaaaaccaaactggtctaaaaactgcaccagtagtggtctaaaaaatagaccggttcaaaaatcggactggtctaaaaactgcaccagtagtggtacaaatattagaccggaaccggttcaaaaattagaccataaaagaataagaaaagaaaagagtaatgtggacgagccttccggatatgcttttgtgctgaagggaggaaaaaattactcacttccaaaagccaaactcgaagagtaccaaaaaacgttcacagcattgtgggagaaaattccacacccccaaagtctgactgtgggaaaaacttccaaggcagtgtgggagaaaattccacacccccaacgcttgactgtgggaaaaccgttcacagcagtgtgggagaaactcctacacccccaacgcctaactgtgggaaaaacttcccaaaggtgtgggaaaaacgttcacaaaagtgtgggagaaattcccacgtaaaagaaaagaactatgaaaagagtaatgtggacgagccttccggatatgtttttgagctgaagggagggaaagattactcactaccaaaagccaaactcgaagagtatgaaaacaccttcgcagaagtggatattgacagcgagtttcgcaaggctcagcagtggctgcgggataatccggccaaacggaagaccgcagcggggatgccccgtttcctcggcagctggctttcccgagctcaaggcagcctgaagccaaaagctcagcctgccggcgaaatcttccagcgccgagatcctacgccggaagatctcgagattgccttcggaaagcgagggctggactgatgggctttgcagaccttcgcaagagggaccgggcggcgttggccgcagagcttgaggccgccggggctcagcttaaaggcgattcctgctgctgcccgtttcacgaagacaagcacccctcagcgggcatttaccagaacgaggctggcttctggatgtacaaatgccattcctgcggcttctgcggctctgtgtgggacgttgaagcggagagcaggggtgaggctgcccccgagctgattaaggctgcacagcgaaactcagagcccctgagaggcaagcgagagaatagccccgagccgaagctggcaaaggcatatccggacatcgagagcttaaaggcagcctgccggcgaaatcttccagcgccgagatcctgcgccggaagaaatcgagattgccgctggaactgtttgcagctccataaaccggctggaatccgctgggcttctggaagttcagcagcagtgtatcgggaagtcaaacatttacaaaacctgcccgaaaacccgaccggtaggaaaatccgaccagtccaaaaatcaggcaggtacctgcccgaaaaccagacaggaacctgtccgaaaattagaccataaaacaataagaaaagaaaagagtaatgtggacgagccttccggatatgcttttgtgctgaagagagggaaggattactcactgccaaaagccaaactcgaagagtatgaaaacactttcacagctgtggacacatataatccacaggttacacagaggttattaaatatgagaagcagccgctaaattccgctgagatttataagccactaagcagcgctaagcagcactaaggatttactaaccactaatcaacactaatttttcactaatgattttgccactcgccatccgccgcaggcggacttgcagctctgccactcgccacaggccatatctttatctcatcctgtaaatccttgccccgcagccaaagcggttcggggttgttaatcctgtctaatttatcacatccctccccctctgcggcggacactctaagcattctctgcgaagaggtttttcatttgccgatacaatctgtctttgaatccggccaaaaatatgcaagaaaaaaatgatgaaatcagtgagtagttttatataatcggactctcagagaaatcaaaaataattacagaggtataaaaatggcgaaagcccacgtttacaagcgagaccacattaatacagacgaaataatccccgcgagatatctcaatacagacagccgcgaggagcttgcaaaacactgcatggaagatttggatcctgcattcgttaataaggcgggagagggtgatgtaattgtaggcggacacgacttcggctgcgggtcgagcagagagcatgccgtatgggcgattcagtctgccgacctcggagcggttatagccgaatcatttgcaagaatcttctaccgcaactgcatcaactgcggattctacccgatcgagctggaaaacgcttctcagcacataaacgacggcgacgagctcaagatagactacgaaaacggcaaaatattcaacaaaactcagggcagtgagattgatttcaagccgcttccggatttcgcacttgaaatcgttcgcgacggcgggctgctcaaccatataagcaagaaagtttagagcctgcaagaacgttttttcagggaaatcagctttttattgctgaaagccccaaaaaaatcaaaaaaagcagcaaaagcctgataaaattgtttgacattgaaacggggaagtggtaaaaatatatttggcgaatgagagaagagagatgtgctaaagcatttatttccaaaagccattatattaaaatcattattttctattatctcacctctcttgctcctcatatgccccgtttgcttcgtgcggataattgaagcaaaaaacataaagggcgttccattctctgacgggcgtttaaaatgagtctgttttactgtacgccaggaattttttgtaaaatttagttttcgccagagaatgattagacagattcagtacatttttaatgtaaggagcaattacaatgaaaagaaaaggtttcacattgattgagcttttggtggtaatcgcgattatcgctatgctcatggcaattcttatgcctgcattgggcagggtaaggcgtatggcacagcagcttgtgtgcggtacgaatctcagcggtctgggcaaggcctgcgttctctatgccaacgacaacgatgaggactaccccatcgccggcggcaaaggagacaactcatggacatctcagggctacatgaacgactggaatcaagttgacaagaactggaccgatgatgacgaggttacagtttctgcttctctctatctgttgattcgtgaagcggacgtatcgccaaagcagtttgtatgtccttcaagcaaccagtttgaatttactggtgaaaagatggacgaaggcgcaggttccaacatcgttgaacttacagacatctgggacttcggcgacggcgacggcaacctgagctcaaacagcacagagagcccgagaaactgctgcagctatgcttatcactatccatatcaggatgcagcgaactactctttccctcttactgcaagcagcaagtccggcaaggcagttcttgcagacagaagtccatggtacgataacaaccttgaagaaggaagcag

SEQ ID NO: 4525 - DNA, 22973 bp, synthetic construct
  misc_feature 1..22973: note = Synthetic
  source 1..22973: mol_type = other DNA
accaggcaacaattctacacaaactatccgcgcacagtcaaggaatctcaaaaataatcaatcatcaataatcatttatcaattgaaatgccctccgccttgaaccctaagctgaaattcaatttctcctttccgtcgctaaaacatgctcagcgggcttggcgccgcctgtctgcttctttcaacagtcgtttgcggattcgaatcgaattaggacaaatctcaacaagctcatcctcttgaaggtattccatcgccgcctcaagactcatctttcttgcaggtctgaccctggccgcatcgtctttacctgctgcccgaatgttagtaagctgcttgcttcttaccacgtttacaggtatgtccttctccttgcagtgctccccgacaacctgtccctcatatacttcttcgccgggctcaacaaaaaaaacacctcgatcgtataaagcgtcaagtgcgtaagctgtcacttgtcccgtagtggttgcaaccataactcccgccttccgctgaggaatcgcaccccgcatcagctcatatctttcaaacgtatgatacataattgctctgccctgagttgcattcatcatcctggcatgaagaccgaacagtccccgtgatggtatcaaaaattccatatgaacgaaatctcctgcaccgcttttgggatctattttaattatttcgcttcgccggtcgcccaaaagactcatcacggaattctggcaatccaacgggcaatccaccgcaagtaattctatcggctcatgatgcctctcatcgactattttcaaaattacattcggcttgcccacacaaacctcatacccttcacgccgcatattctctaacaaaaccccaaggtgcatcagccctctgcccgaaacattgaattcttcaggactctgcccctcttccacccttaacgcaacgttctgctgaagctcattttcaagtctttctccaatttgtctgcttgttacatatttgccctctctgcctgcgaaaggcccatcgttaactctgaatgtcattgtcatcgtcggctcacctacagagataaccgcaagtctcgaaggtttatccgcacaggcaatcgtgttaccaatctcaacagggtcaagccccgatatcgcgcatatatcaccggcctgaacgcttgaaacctgctttcggccaagcccgtgaaactgatgaatctgtataactttttgctgtgtatgcagaccttcggcgtcaattactgtaactctctgaccttcatttatctgtcccgcaaaaatccttcctattgctatacgtcccacataatccgaatattccagatttgttacaagcatttgcagcggagcatcatggataacccgtggcggcggtacattatttatgatggtctcaaataccacctgcatattgtcggttttctgcttatggttcgtcgtcgcccatccatcccgtgccgatgcgtatatcaaaggaaaatcgagcgactcatcttcggcgccaagcttaacaagcaaatcgaatacttcattcacaacatcatccggcctgctgtttgggcggtctatcttgttgaccacgactatgggtctcagcttaagctcaagcgccttacccaatacaaatcttgtctgcggcattggcccttcaaaggcatcaaccaaaagcagcacaccgtctgccattttcaaaacacgttcaacctctccaccaaaatcagcatgccccggcgtgtcgatcaaattgattttgtattcatcaccttcagaatcagtatagtaaatggcacagtttttactcaagattgttataccccgctcacgttccagcggattcgaatccataatcaatccatgctcgcctccggccagcttatcaagctcctccggccgaaacatcccggactgatacagaagctgatcgaccagcgtcgtcttgccatggtcaacatgagcaattatcgctacattacgaatatagtctgaatacataaaaaactctcaaaagggactggtagaggttattgactattcagtatttggtgtattcctttttataaaaaaatatttttacattattccacatgaatgtcaacacaaaacccgcaattcccttaaatctaatttctcccccacacctgccctcggggtttacgccgtcatatttcgcccaccaatttattatgtatttagccccacgttttacggggggtcttgtttgggtcatttgaattttgtatttgtttcggatttagaaacctgtcctgagcaggttcgaaggagcgaagcaatttcgttttgatcatttgtcaatttggattttgttattgtttaggatttagagattagggtttaggatttgttcgacatctgaatccagcatccagtatcgagaatccagcatcgagagtccgtcttctgttatccaactttagctcactttaggcactttagttcactttagctcactactcaccaattcaccaattaactaattcgctaattcgctaatcaccaattaactaattctctaatccactaattcactaattatttctttcgtcctccgtcctctatctgtcattcctgcgcacgcaggaatccagtgccccaagcgttagcgcaggattatatttagcccgccaattccagatatttagccccctgcaccgcagggggttctctttcttacttcgaaattccttgttcgttattcgatattcccctggccattccatccttgacacagaatccactttcctttatcatttcttttagcgggctggtggtcgtttagccgttgtcggcacgacaacgcaatactgtttagccccgaagcctgcttcggggtcttttagtagtagggtggcggcttgccccacctttttatgttccaaatcttaaatccgaaatttcctctgaaaacgcccccaaatctgccaaatcaaatcgtcaatcggaaatcgtaaacttgtgcccgcgcaggcgggaatccagcactccgtcattccgagcgcagcgcagcggagtcgaggaatctattgaaaaaactgtcattcctgcgcacgcaggaatccagagccccaagcgtaatcgcaggtttatatttagcccgccgtttcacggcgggttttccgtttgtttcaacgcccaaaaattattaaatataaggcaggccaaatccctcaaaaacctgccgtgttacattttcggataaagagtggtctccgcacttatccataaacgcagtgtaaagtttgtccttcaattcttttacgtaaaattcgtaaccctgtaccgcttttttaattgctacactgctttctggaatctttataacaagctcatctttcttttttgcatagactataaacttcgccctctcctccgttgctacttccataaaatgctttccttcttcatcgcatatttcctgcttatcaaaaaagctttcgccgagctttagcttacctgccggaacacctatctcgtcgcactgtatcttcggccagcccttaacaaatccctccggaaatctaatcgtcccatcgggcaaaacctcctccactatctcatcttttaacttctcaaggtcctgcacaatccgctttttcttctttaaattcctcaatttcggtaataaatgccgctcttcgatgagttcattcaccgctacatataccctctcaaaatcctcttgtgttaaacccaagcacttaaagaatttactttcaaactctctcctgtcttttttcttaacttcttctgaaaaaggcattatgtcacgccgccccaatttttggaacgcttccaatacagcctccgactcctttgtggctatttctttagatggtagtaatagtgccttaatctccggcccgtaggttgtcaacaaaccgtctccgaggttcacccttccaaacacctcagcaaaaagtgctattaaaaccgaattcatggcagcaaacccaaactccgcgtattccctgctctcaaatcctccaacaaaaactacatcaccgaccaggatgttcgcctgattaactggtgcgtaatgccttctatcgataaatcgtagtattagaaagtccgcgccctcttgcttgggtagagtccaccattgcggcctattccgcaccgagggtacatcacaccacttttttctttctccctccttgatgtatctaatggcgtttgtccccgtcaactcttttttgcttttatcacaaacaaatgccctccatgctactttgtccggctctacaaaaacaccatcgatttctttagttgatgtcacgactggctttacaaattcacgttcgataccccaatgttttatttggtcctcggttaaataaaagaactcgttcttaccagtagtaatacctctttgaatatctacatccatttttcctaatgtcactaacttgtttgcgcatttctccaatatctcaaaataaatatccggcccacgcagatattgcccccacctgactgtttgctccgctgcatccacctgctttttcaaatcatcctgtcgaatcatccgcacccgaacctgctcatcttcatacgagattatctccggttgcttcacataatccgcgtcgattcgctcaaacttcttgaacttctctcccccaatcgcctgccatcttgtcccaatctcttcaatcttttcgacaaacgcatccagaccgttccatcttgcctgagcgtccgtcagcgcatcctgtgggaaaagttgtgataacggcttcttgaccttcacaaaataaacagggttgtctttcttctcctgctcatcgtcgcatctctctaagattgtaaacaccgtattgaccgacgattgctcaaaccacggctcacatctgctctcaaaaatccccaccagtttgaacttcgacaaaaagaacttctgcaactcatacccatatgcgacatcaagccacgaattgcttgttataaatcccatccgcccgccaaccttcaagtgtgctgctgtatgaaagaataaatacgcgtaaatatctgcttgtcctgataatcgcagcttatgttcggtctttaccctgctgttcccagcattattgttgaaaagcactgaatagtctttgccccagctctcaaataaaaccttctccagttttttcttatatcccttattcgccttctcaatcaattcctgcctgatgtatggaaaattaccaaccaaagcatcaaatttgggaatcgctactctctctcgctctcctgccttcagaatcttcttcggcggcggaaattcaaaattaagtcttggcaatacatcaaaaaaatcccttgccagaacacgtggaaagttcaaataatcgctaaaatcctgtctgcacaaatttattgtggcaagctcagcgggaaaccctgctatgtcgaacccccagacctgattaagcaattcgtgatgcgattttctcttaacacccaaataccgcagtctgttataactgcgaatcaagaaagttcctgtcccacatgttgggtccattacaaaatcgtccccattgctcacgcaaaaagaaactatcaaatctaccagattagcaggcgtaaaatattgtccaagactgtgccgcgcgtcttcagaaatgagtttctcaaatacagcccctattacatcaagtggcattagctcaaagctccagtgttcgagtttttctgtaagctctattattactttcgctgtatccgccgataattctatttcatcggtaatatccggctcaaatattgcttgataatcgacctccaacgcctgttgaaacaaagaacgcatcctattcattgctgttttataactttttgttggcagctccatcctcggcaaatctaaattgtgccgtcgcagtgtcatataaaacaaaatcttgccgactattttgtaagccacttgttgagctaaagttttataatagtcctggtcatacttgctaaccccttgcagtttagcccacgcattcagccgtttatcaaaatccttttttgctctggctttattgatgtcctttatcattgcctctgacatcagtttggaagcatttgcaaccgatcccacaaaaactgtcgtatctgcaaggggcagatttatattttcatctttatataatcttgcaaggtcgcgcaatatctgcgcacaaacaccttccataataagcgctttttgtggatctcttatatcatcgacggattgtatccgtgggtctggtccaaattcgcgaaccttatctttttcttgaaccgttgcccttgttttctcaggcgtgcgccatattatggccgtttgcatatcccatccgacaaaatacttggcattcaatctctgtgctttttcaacagcgttttcgagaagtcccttgtcacgcgcatccgttgcaggcgtttttaattcccagccacaaaacggcttttgacactcaaaatccagcgtaaccagaacatccggaaatctaaccgttgataggccgtaaagacttgaatcgtttgtggcgttcttaaacgaaagtcctccctgttctatctgtttttttatccaagcaagcgcctgcccctggaattcccgctcgtttgctttagtttttgccattctatttttctgtccgactgcgcaaaccaaaatcgcaacttttgtttctgaatttattctacccctaaaatccgacaaactaaagcaaaaatcttcgtcattttcacccatctttgagtttccgacatttggattttagtaattcgtatttgtttcggatttcgagtttagatattcgaatttctaccagcatccagtatcgagtatccagtatcgagtatcgagtatcgagtatcgagtatccagtatcgagtatccagtatcgagagtccgttttctgttatccaactttagttcactttaggcactttagttcactttagctcactttaggcactttagttcactttagctcactttaggcactttttttcactttaactcactactcaccaattcaccaatttaccaatttactaatttactaattcaccaattaaccaattcactaattaactaattatagctgctataaatagcgataaattatagggatacgaatttttttcagccgaactttctaattgtcaggtgcgtatatataaaagtgaaaaaattttcaaaaaaatttatttttctttacttattatattgacgatattattatatcggctaaaatagatatgttgttggtcaggcaaaggttatacatctatgcttggccattggtttctaatgcgaacataagaaagctctttgacaagttaacagttaagccaaatagaccacgttagaggttaaatctctaaacggggtcagcagcgaaagtgcagctcttgtgatagatacgccttatcgcaatgagctttaaatttttttggttcttggtaatcggtgattggtaattaccagtttccatttaaccattaaccaatttcagcactttcggtgcgtatgccaaagtgttgagcctttttcgacgacatccgccgtagccttgtgcgaaggcggattcgacgatacaaattgaagggtttgatcctggctcagaacgaacgctggcggcgtggttaagacatgcaagtcgaacggactgctcaatttattgaacagttagtggcgaaagggtgcgtaacgggtgggtaacgtaccctgtgcttcgggatagcgtcattcgccttcgggcgaatttccgaaaggggcggtaataccgaataatatcacctgtcgataggcaggtgttcaaagatttatcggcacaggagcggcctgcctcctatcagcttgttggtggggtaacggctcaccaaggctacgacgggtagcgggactgagaggttgttccgccacatcgggactgagacactgcccggacctccacggagggctgcagtaacgaatattgcgcaatgggcgaaagcctgacgcagcgacgccgcgtgcgcgaggaattccttagggacgtaaagcgctgtcaggggtaagaaagtgcgcttcggtgcattgatccaccccagaggaagtcacggctaacttcgtgccagcagccgcggtaagacgaaggtggctagcgttgttcggtattactgggcttaaagcgtgtgtaggcggaaaagtaagcgtttcgtgaaatcccccggcttaaccggggaattgcgtgacgaactgcttttcttgaggcaagtaggggtgcatggaactcttggtggagcggtggaatgcgtagatatcaagaggaacgccggtggagaaatcggtgcactgggcttgtcctgacgctgagacacgaaagcgtgggtagcgaacgggattagataccccggtagtccacgccgtaaacgatgcctactaggttgtgaaagttctgacactggcacagccgaagcgaaagtgctaagtaggccgcctggggagtacggtcgcaaggctaaaactcaaaggaattgacgggggctcacacaagcggtggagcatgtggatcaattcgaagcaacgcgcagaaccttacctgggtttgacatgcttggatgcctacctagaaacaggataggttgcccttcggggtgaaacttgcacaggtgctgcatggctgtcgtcagctcgtgtcgtgagatgtcgggttaagtcctttaacgagcgaaacccttgccgttagttgccagcgggttatgccggggactctagcgggactgccggtgttaaaccggaggaaggtggggacgacgtcaagtcatcatggcctttatacccagggcctcacacgtgctacaatggcggctacaaagcgacgcgagaccgcgaggtggagcaaatcgcaaaaaagccgccccagttcggattgtaggctggcaactcgcctgcatgaagtcggaatcgctagtaatcgcgtatcagctacgacgcggtgaatatgttcctgagccttgtacacaccgcccgtcaagtgatgggagttgggagtacccgaagtcggtttgctaacccgcaagggaagcggctgccgacggtaagcccgacgactggcactaagtcgtaacaaggtagccgtaggggaacctgcggctggatcacctcctttctagggataaactagaacccagcttttttgggctggtgtaatgtcaggcactttcgttgcggcttaactgttcttgtaaataaaaagcctccataagggaggcttttttcatgcgcccttgccggggtaaatcctaaattcgaatatctaaatcctaaacaatcacaaattaacaaaattcaaaggctcaaaaccgtttaatttacatcattagaaaattagatattgtttcggatttaggattttgtgcttaggctttgcggcctctggccgctgtgctgtcaggcctttcgctgctttttaggtccttcgatttcgctcaggatcttcgacccaccataggtgggtcttcgacttaactgttacttgatattaaagccctgtcttcggacagggcttttttaatgcaaaaactgaaactaaaactgcaaaattattttggctaataaagtgcaagagaatatatctagtccttttgattaatcaaaaggactacgtgccttcgaaaattgtcgatggcttgacaaggtgttgggattgtctaattgatgaatagatgctaaatcaggcctttcgctgcaaaacccccaagataaacttgggggctaaccaaaaggcattaactgttacttgatattaaagccctgtggggaaccgcggggctttttttatgtttcttgaggccataaaaaggtttaccccatcttacctttaaggtaaaatggggttaccctgcgtgctttcgcacttgttatgaaaagcacacaaacacggatcaaatatataatacatgaaaaaatacttaaaaacaagcaaaatttgtgaaaaattttgaatatttaaggagaggagattatgagctcttatacactcggtttggatattggttctaatagcattggctgggcacttctggatagagacaaaaagccatcgataatagatatgggggttagggtttttccagagggggtggatagagatactaaaggtttagaaaaatccaaaaatgctacacggagagaggcaaggggtgtgagacgtatccaccagaggcggaatttgcgaaaagaactattactaagtacgttgcaaacagcggggctattaccgaagaacgaatcagatttgaggtctctatttcacacaggcccgtaccaattacgcaaaaaggggttggacgataaactcgaatcctatgaattcgggagggttctttatcatttaagccaacgtagaggtttcaaaagcaaccgtaaaagcggaaaagcgaaagaagacagtgtagtaataaagggggcaaatacacttcaagcagaaatagacaacaaaaagtatcggacgattggagaatattttgcgggtcttaatcccaaggagaagaggatacgtggacggtacacgttccggtcgatgtatgagaaggagtttgatttactgtgggctaaacagttggaattttatccgcaggtgctgacagaagatttacgcaaaaaggttcgagacgtgattatattttttcagaggccgctgaaaccgacagacgaattgataggcgattgcgaattggagccgggcgagaaacgttgcccgagaggagactggcacgcgcggcaatttcggattttgcaggatgtcaataacctgattatccaaaacccggatgggatggaacagaaactcacggcagaccagcgaaaaatactactcgatgagttaggccaaaaggagaaactacctttcgacaagattcgcgaaaagctgggattaatagaaactcagaagtttaacgccgaatacagagtcagcaagaaaggtaagagggtcgaatcattaaaaggtgataacttctcgtgggctatgagaagcaagaatatctttgggcctaaagtctgggacgaaatggatgaggcagagaagataaagctcaacgagtggcttgtggaatttgaagatgaccagcttaaggaaaagctgcaaagcgaatatggctttgacgataagaagatagaagctgtattgaaaatatcgctgccacagggatatatgagtttttcgcgcaaggccattcagaaattaataccttatatgaaacaaggtatgctgacaccagaagcgcttgatgccgcgtatccagacagaaataaaaaagagggagttgaggagaaggaaaaacttgacctgccagaggacttacgtaatccgattgtgaacaaagctctatttgaggttcgcaagatagttaatactattgttcgtgaatacggcaagccagcaaggataaagatagaaatggcaagggacgttcagggcagcagacgacagcgagaggaattgcactggaagcaacgggaaaacgaagagaggaatgaagatgcgcgcaagcgattgaaagaagatattgggattagtaaccctacacgcgacgatgtcatcaaatacaatctgtgggtggagtgcggaaagagatgtccatacacaggaaagcagatttcgcaggagacttcgtttggtcagaatccggaatttcaggttgaacatattctgccttatgaccggagtttagacgacagttatatgaacaagacactctgcgaggtgcacgaaaatatacacgtgaagaagaaccagacgccttacgaggcatacagccatgaccctgaaaagtatgagcagataaagcagaatacaaaagttttaccctggccgaagcgacagaaattcctgcagaaagaaatcgaccttgaccagcatattgccagagagttgaacgacaccagatacatttgcaaagaggtagtcaaatacctcaaaaaactgggtgtttatgtaagtgggacaaggggtaagattacaggagaactgcgccatcagtggggtttagacggtatttttgaggaacttggaacaaggcgcgatgacgaccatcgcagacatgcggtcgatgcagttgtggtcggcgttactgaaaatgagcatttgcgcaaacttgcaagaagcaagtattcggttacaggggaacgatttgacccgccctggtctgttttcagagaagaagtaagagaaaaagtaaagcacatcaatgtctcgcacagagtacagcgaaaagtatcagggaagttgcacgaggagacgaactacggggcaacggataaaaaaggtctgtacgttttccgaaaagagttgaaggagttgacattgccgatggtggacaaaatcgttgacactgttgttcgtgagattgtcaaggggcggctgacagaaaagagtatcgatcttacgggaagcggaaagccaccaaaggaagtttggaatgagccattgtatatgaagtgcaaaagagaggataaaaaagtgccgataaagaaggtgcgagtttacaatttggccaagagtgtaatagcaatgaaagaccgttcaggccacatatataggtacgttgagccggggagcaatcaccatattgagatttttgagtatatagacaaaaagggcaaagctaaaagagacggcaaggtcgttaccatgttcgaagctgttcagagaagtcaaaagggtgaatcggtcgtccagaaagaacatggaccgggcaataaatttatttgttcattggcgataaatgaaatgcttatgctggatttggaagatggatcaaagcaaccgtatagggtggagaagataagtcagaataagcagatatttttccaacctcatacatatggaggagaattaaaagaccacccaccaataagcaagatgccaaatcaattaaagggttataaggtaacggttgaccccttaggcagaatacgatgggcgaatgattaagcgtattgtcgagatatcatcggcaaggacgcatttatctattagatacaaccagttaattatcaaggaggaaggcaaagaggttgcaagcattccctgcgaagatgtcggagtactcttagttgaccatagagggacgacatatacacattcagttttcacggagcttttgcactgtggtgcagcggtagttttgtgcggagaaaatcatcatccaacaggaatgctacttcctattgaaagtaatacactccaagcagagaattttcgccagcagatagaagcaaaagagccggtcaagaaaagattatggaaacagattgttcaggcaaagattaaacatcaggccaaacttgtcggcaaagatagtgacatttatccgatacttatgctactacgggataaggttcggtcaggtgacccggaaaacattgaggcgcaagcgagcaaaaagttctggcctgtatatcttgcagatacaacagattcctcccgttcggcaagctcagagcaggcgacttcgctcggaatgacaacctttcacagggacataagtggtcttccaccgaataacatgctcaactacggctatatggtgatgcgtgcagcggttgcgagggcgctatgttcggcggggcttttgccatcacttgggattcatcatcgaaatcggtacaacgcattttgtttggctgacgatttgcttgagccattcagagggtttgtggaatccaaggtaagggacatttatgcagatattgggcctgtggatgagcttgaacaatcgactaaagcgaaactgttggaagttttacatgaggaagtaaatgtggccggctttaaagggccgttaatggttggattacatcggacgatggcatctttgcagcggtgtttcgcaggggagcagaaatttattgatttgccaaaattatgataataagcgggtatagggcagtgtggatatttgcaatgttcgatttgccgacggatacaaaaaaagcacgaaaagattatacacattttcgaaaaaatttgttgaaagacggctttagtatgctacaatattcggtgtatgtaaggcattgtgcgagcgatgaaaatgcagatgttcactataacagggttaaaaattttcttcctcctgatggggaagttaggctcattactgttacagataaacaattcggccgtatgcagactttttggggaaaaatgcgaaaacccacacctccggcccctcaacaactcgaattattttagaaaaaagagcccgcaagtccttagaaaacaaggacttgcgggcttgctattataactgatccgtgcctgagtgcaagccacaacatcctgatgctcgtctatctctttgagtaaattataactgatccgtgcctgagtgcaagccacaacactgtcactacccattattggagcattttgattataactgatccgtgcctgagtgcaagccacaacttaaatgacgaacaatctcttagtaaagaaattataactgatccgtgcctgagtgcaagccacaacataacgggccgccaggccgattgccgcagtattataactgatccgtgcctgagtgcaagccacaacaattcaggctttcgtggcgccacggcctcaattataactgatccgtgcctgagtgcaagccacaactgattggccttttcatactcattcaacattattataactgatccgtgcctgagtgcaagccacaacaggttaggcatccttgcactcatctttcatattataactgatccgtgcctgagtgcaagccacaacagtggcctgaagaatgaattgctctttttcattataactgatccgtgcctgagtgcaagccacaacagtaatcgctgactatatccagtccgaatcattataactgatccgtgcctgagtgcaagccacaaccgaacaggcagctacaacatcgcggtcgtattataactgatccgtgcctgagtgcaagccacaactgcatcgagccgactggtcctcaaggacatattataactgatccgtgcctgagtgcaagccacaacccgcatagactcttctccccaacccttttaattataactgatccgtgcctgagtgcaagccacaactattaacttcttcatagctttctccttaaaattataactgatccgtgcctgagtgcaagccacaaccttggcattggttgactaaattccttgtggattataactgatccgtgcctgagtgcaagccacaacctgactgcggcaggaatctgtaagaatattattataactgatccgtgcctgagtgcaagccacaacctggtggtggttgtgccgtgcaaaatagtattataactgatccgtgcctgagtgcaagccacaacaaggttacgacctcactctgcgccagatttattataactgatccgtgcctgagtgcaagccacaacaaaaatacgactgttcgccgcctgagcggattataactgatccgtgcctgagtgcaagccacaactgaatgcaatcacgaagcctggccgatataattataactgatccgtgcctgagtgcaagccacaactaatacgctcctttagataatgcccggccgattataactgatccgtgcctgagtgcaagccacaactttcaggcggccttgacagccacggccggtattataactgatccgtgcctgagtgcaagccacaactgcgccttatgtgaaagcaagagaaaaaatattataactgatccgtgcctgagtgcaagccacaacacaacaaaaggtatccccttcggcgtaagtattataactgatccgtgcctgagtgcaagccacaactgtaatcgttatcaagccgccgagatatttattataactgatccgtgcctgagtgcaagccacaactttagtgaacattttatctaagtccgttctattataactgatccgtgcctgagtgcaagccacaactatcttatcgtccgtggcatcgaagccttaattataactgatccgtgcctgagtgcaagccacaaccactaagcgtgttaggaaagtgttataagattataactgatccgtgcctgagtgcaagccacaacattgggctggttgtgcctcttagtgtttgtattataactgatccgtgcctgagtgcaagccacaacttgatgtcaggataagaaattctctcgtatattataactgatccgtgcctgagtgcaagccacaacgcacccatcgctccttgttctcttcttgaattataactgatccgtgcctgagtgcaagccacaactcacaatcacttcggccttgatattacgctattataacttatccgtgcctgagtgcaagccacaacttaaattcggtcgggggtcttaactcgtcaattataactgatccgtgcctgagtgcaagccacaactcacaatcacttcggccttgatattacgctattataactgatccgtgcctgagtgcaagccacaacttaaattcggtcgggggtcttaactcgtcaattataactgatccgtgcctgagtgttttccacaacaagatgaccagagaaatctgggaaattcgcaggcacctgccttcgggcgaccagccacagcatgtgtaacccacgtcctgcggctttttttattgaataatcctcaaaatcattttatactgttcgtagtatggtaactacaagacaacaagcacttgaaatagctaaaaaagtccgcgacgagcttgagaaattatacggcaagcgtctgcggggggtgcttctattcggctcagcagcacggggcaagctggacgtagatagtgacattgatattgccataattcttgacaatatacctgaccgctttgccgagcatgagcggaccggcgatttaggctcacaaattagcctggattacaatacgctcgtcagcttcttgtttgtgagcgaaggcgactatcaaaaaggccgatttgctatccacagaagaataaaagaagaagggattctcgcgtgaacgaagaagtgcgtttgcacctcgaaagagcggatgattgcgtaaaggatgccgagctgttgttgtcttctcaccggcactcagccgctgtaggcagagcttattatgcaatgtttcacgcagcaactgcagccctgctgaagagggacataaaaaggcattctcatcaggggattatttctgcgttcggacagtttattgtaaaaccagggaaggtcgagccgaagtttcataaatatattgttgaggcatttgaccttcgtcaggaaagcgattaccagcctttggtcgagataacagagcagcaagtgaacaaggtctttgagcgtgtgaaagaattcgtggaggtttgtcgaaatctctgcatataatcttggcattttcgctgcaaaaccccgcgtaaaacgcggggctaaatatgtccttcgatttcactcaggatcttcgacccaccataggtgggtcttcgacttaactgttacttgatattaaagccctgtctgttaaacggggcttttttatttgtataaaagctatcagaaagttataataatattatggttaggccatcttacaaaacgacaagaatatatgcagacacttcggttttcggcggtgtattcgatgaggaattcgaagcggcaagcaaagctttttttaacgccgtcaaaaagacaagattcatcttggtaacttctgagcttgtcagacaagaaataaaggccgcacccgaagctgtgcgaaagctatttcaagatgttttgccatttgcggagattgcggaagtaacagcagaggcgataaaactgcaacaggcctatatttccgcaggaattgttgcgaatatgtatgccaccgacgctttgcatgtggctttggcaaccacttcgcaggtgtcagctattgttagctggaacttcaagcatatagttaactttcagaagattccgttatataatgcagtaaatgtcctgcaaggctatcgtgagattgcgatttactccccactggaggtgattgagtatgaagactaagacattcgattgtgttcagatgaaacatcagggtgctgagataattcgaaaggaactggagggcaagtcattcgaacaacaacttgagtattggcaaaagggaacaatagaattgaagaaactccaacagagactgcgcaaaaggacgtgatgctgaaagtcaggcctttcgctgctttttaggtccttcgatttcactcaggatcttcgacccaccataggtgggtcttcgacttaactgttacttgatattaaagccctgtgggaaaccgcggggcttttttgctgcgcaaaaagggcaaggtctaaatcatgaacaaattcgaaagtcaaagaacggaacaggaggttatcccggttgtcgttggaattctgcctgcggccgggcaacgacgagccaactctacacgttagctaaagccccaatcaacaacggcatcttgcggcaacctctgaaccgtcggaaccgcttctcggcttccagcaagagcgtgccgaccatcgcccttattacgacatatcggatgttttcagggcccgacccaatgaactgtcagagtctgcgtagcactataattacctgcatctgccatctggccggtgtaattgcttgctctaacataaagtgtcacttgcacagcattgtcacctgatatatgcgttacagtggcaggagaacttagaaataagtcataactggtaaaatcaaccgttgagccgccggtttggctcactccgtcgccgtcaaattgcagtttatactctgtgtataagttggcaccaccggctttggtaagtctggctgtatcagtgttatccgcggagatttctgcattgccgcttgtatagagagttacctgagaacttccttggcatatttggtctctgcttccaatgtttgccaacgcaatcgggctgaaattaccgctccaatacataagcccccatgtagcccagactgtggtcttgccgggattggtgacgttgtagtcaacgttcaccgtgcccatgccgtcgtaggcggtaatccagccgctactgatgtatccattgatagtcgacactacattgccgtttactatcagtgtgcccccggtaatatccatcgtgcctgtaccaccagacggtcgcatggagaatatgcctgcattaataacaccgccgtccaggtccacatgaccgttaccagcagcaatcctgggaatatacatcgcgtcgctgacattaatcgtaccgccggtcatagtgatggtagcagggcccccgttgctgacccagagttgattagtaatagtagccgtaccgccactcatattccacaagccgctgccgactgccgagtaccccatctccatgttagttccgacggtaagggtgcctccgaccatattcagcgtgaagagtccggctgtggtcacaccaggtccgcgaacatagtaggccaccgcggctaccacggaagtaattcgagcggggccggcgctgccaatgtaagcgttgtcggtagatagaggctctagatcactactccagttggccgcagtgctccagcggttgttagcagtactaccaccgtcccatgtcctagtggcagccgaaagaggccgcacgaaaaccatcaacaaaacaatcacacataacattaatcttcgagtaaacatcttcttagaggttgctgctgaagcatcggcatggagaccgaacagaaaaactaaggccgcaaatactaacgtttttcccatcatcatcttgtccagctccggatctttgcaaaagcatctgctccggccggcaacaaaaccattaacactaaaaatgccgctttcttaatcacaactaccccccttcttaaaataaccctctctccacattacaagaatttcatggccgtaagctacgatgaaattcaaaatcacggcaactctctgcctgaggattcatcttccttacctgtatccggcaaagccgttgctccccgcagggcatcaagttcttcttccgcatctatcagattatgcccgtcggaaaaggcaatttttccttcttttatcaattgtggcgtgataaagataatcacctctttttctatagttttgatctttgtggaacggaagagaccgcccacaagcggaatatcgccaaggatcggcactttctttacattattttgctcctgagtttcaataagacctcctatgacaattgcatcaccttctttgacccggacgcacgtgtcaactttgcggcgtcgaactaatggcaggtctcccgaagcgttgccctctatttgattctggcgagaagctacatcactaacttcagtgacaacgtcaactgtaatgtcgttattgtcacctatgtgcggtgttatttccaacagcacgccggttttgattaccttaaggtccgtccgcagcccagttacatcgtaaatatctgtgacaatggtgaagtattcctcaagggatatgtctatgatggctttttcaccattttgggtggctacccggggtcgagagcgtatggtggctttgtttttaccaaccagcgcccgtagagtgaagagcagacgtgtcaactggctctttggtacgcttgtgtactgtgccatgccagtgaaaaatccgagaccctcctccatactaagattgttgtggtggtcagaatactcccaatcaagaccgaattcctcggtggcttcttcccaaagctccacaacaagcacctccagcacaacctgttcggggggaacatcaaccttggcaacgatttccatgacgtgttccatgatttcaagcaccgcataaagcagcacctcattctcccgttggccgacggatacgtattgctggagggactttggaagacaagactgtagatgctttgcgcttatgtatttcaggcacagccgttcagagtctgccatttccagggagctgggacacgtcggagctccgcagccaataaggtaaaacttcttacctttctggtgaacataaacgcccaatccggataggagctcctccatacaatcgcgaagtggcttgcctgaaccggtgtcaagcgaaacgagctggtcaggaacgtgtgggcaggttacaatagcgacacctgtttccattgatatgtcccggagaacctgcgtaagtggcacgtcggcccaaacattcttgaccgttatcgcttcgttggcatccgtaatcgcgacagcagatgtatctgcgtaggtggcacgatgagccaacgcaggcgatagcacaaggggcaccagcgcaatcattttccagaaatcaatctgtcttatggctgtcaatagggtcattaaccgctctcactcgatagccccccaatatgcttaatgactgatatttgaaccggaatttcgagcaccacaacattatttacggcttgttcggtcaggcccgaacgttccccttctaccttgatggttgcgttataatcctgtggttgtgcatctgctggtattcttactgcgcaaagcacattgcgccgagtgttgggcgcgagcgtgaactccggggacttcagttccatccagccttcgtgaagttggtcgcttcgtagtgagcagcgaattgaaacagtacttaaactcgcgttcacaacgagaaattctgccgttgtgaatcgtccgggggttagtgccaggtcaagctcaccgggctgtaactccagtatctgcgtgtcgtcccctttgaaattgtccgcccattgactggcgatttcctggcttatcgaaaactccacgtccttggttcttgtacgtgcatattttgagtcggagttaaagaatacttgcgctctgtattggccgggcggcagcggctgcgccatcacgccggtaaaccagcgactgtgaccgggaaagatctgccttcgacttgcgtacagtgggatagagccaatgcgacgtgagtttccggaatagaggaaagcctttccttccggctctacggctgtcaatccatcattttttaactcggcgtttattttgaacaggtattgcgtctgaggcggttcagaagtctggccattggttgattcttcggtgaggccctgttcgagggcaagctgaggcaaagatacattcacatcaataatacttgtctgttcaatatagtttcttttcgctgcccgtacaaacacgccggatgctgtcctcagtataacgttcacgttctttttctgagctcctgcgtcgcccaatgtgaacatgattgcggcccagtaatccccatcagcactggcaggagctgatacctttccccttagctctttagattctcccggctcgaggataaacctgttggcgtcaagaccgatccagtcaacggccgagcgaccgtgttttagttctccgccgaacgaaagccgtccgtacgcggagaccgtgaaatgaaccacgtccgcataaacggtgcagggggctgtttgcgggcctctatttgtattttttacagtcaccgagaagaacgcttcctcgccgggcttgacttcaacccactgttttaacggactgaccgccattcccgcaataccatcgacagaaaatgccgacaaaatgactgcgacaattaccggtgccgcgcgccgactcccacgtgacccgcttgagttccaatccacttctgactcctagtccccccatttgaatcgcttctctgtgtctacagttgaaacgggagtgacttgaccactccaggactagttttatttaacatgcccgccaagctgtatttcaccctactgttctattagaggttgggtgtgctaattgctcgtccaggatgctgtcagggtctgagtggcgctgtaggcgccctgatcacggaccatagaaccagtggtagcctgcacgtatagggtgacattggcagcgccgtctgcggctacgtgtgt

SEQ ID NO: 4526 - DNA, 22967 bp, synthetic construct
  source 1..22967: mol_type = other DNA
  misc_feature 1..22967: note = Synthetic
gccgattcagccctcagcctcgacgcagccgccgtcaacagaaagctcgcggcgctgccgaaggacaagtcagcatttatcgagcggtacatccggcagttcctccaggcgtacggtcgcaggcgcaatatgccgccgggcccggagcggacgcggttcatcctgtcgcggctggcggcccggccagtgtattacatctggttcaacgaaaagctatggaaaagcaactgaacgccgcgattcaatccctgccgttagagcggctgctggcccatccggcgaactgtaaccggatgagcgaggcgaactttcgcaagctgcttggccacataaaaaggaccggccgatacgagccgctggttgtccggccggacccggctaaagacggcttctggcagatcctcaacggccatcaccggcgcgaggtcctggcgaagctgggctgcgtcgaggccgactgcatcgtctggtgcgtcgacgacgccgaggcaagcctcctcgttgcgacccttaaccgcctgaccggccgcgacgacctcaccaaaagagccgaactaatcgagcacctgaccgcgcattttaagcccgccgagctaacaaagctcctgccggaaaagtccgaccagattcgccgcctttgcgagctggcccgctgcacatcgcaggactttgctgcccgcctgccacagaggcagatgacggcacaaccacaacctttggtattcttcctgaccgacgagcaaaacataatcgtaaaccgtgcacttcaagcagcgtcccagcgggcaggagacggcggcccacttagcggcgcagctcgcaaagctgcagcgcttacggcagtcgcaaaggcatttattgccgggacaaccagcaaccaggaggttggtggggtgaaccccaccttaccagaatgattgtgggcatcgttatcgtagggcgggggcttgccccgccgaaataatggggcctgggaaaaaaccgatatgacggctgcgctccgcaaagccgcagggacagcataggaaagttggtggggtaaaccctaaccctaccccggcgcgccaggggccgggtgcgtatctccagaagccaaactacaaacccgccgccgccggcgaggaccgcgagtacctaagaacgtatataaaatatcaaatggcaaatagaaaaatcgccttgatatttgatatttgatttaggttttatgggttatgcgaaatccgaaaaacgaaacaacgagcccgccgcctgatcccggcgcgccgggagccaagctctcccgtcgccagcagcaggtgattacagacttgttcgagtcggacctcgatgaggcccgggtgctggcccggcacggcgtaagcgcaaaccttttccgccgctggctcgcccagccgcagttccgccgacagctcgccggccgcatcgaatcagcccgcaggcaaagcgagattataatcgctcgcttcgctccggtcgcggcggccaggttggtagagcttgcggcctccggcaaggacgagacggcccgccgggcgtgcctcgatattatttctttgccttctgcaggctcccaaacgggatttacccccgacaaatcgagcttggcgcagccagacaaaaccggcccggacactcccgacgcgccgggcgggaccgctaagctttcgcccgaaaccgccagccgactcttggccgccctggcagaagaacagaacaacaacagcaaccccgctgagctcgaccttttaaagccgcaggcagaggacttattatagtttttgacaaaaaactttaataagagatggacgtccatcgtgtcaggctgctttaggagtcgatggttcctgccgatattaatataaaaatattttacattgctttgacagcatttctttcatctgttataataatgcggttttgactgaagggagcataaatggcagcggatttcgacaagaaaatctcgcgaaagattgcgaaactcagagagcaggcgggcctgtcgcagcaggagcttgcggacaagctgggggtggatagggttaccatttctcaaatcgagtgcggcgaaagaaagataaccgctgccgagatagcaaagctcgcgcgaatattcaacacaacctcggacattctgctcgaccttcagcaggacatcgaggtccgtcttgagaagcccgtgggaacttcaaagaagacgccagcagccgtccgcataaacgtccctgttaagaacgtctccaagtttaaggaggtattgctctatatcctgagcaaggttggctccaaaccgaatgtaggagagtctgttctgtacaaactgctgtactttactgatttcgactactacgaaaagtatgaggagcagctcatcggtgcgacatacataaaaaaccattacgggcctaccccgaaagagtttgcaaaaatcgtggagcaaatgaaagacagggacctcgtacaggtgcagacaaagtatttcaggtacccgcagagaaagtatctgcctctgagaaagccggacctgaccaagctttccgccagagagcttgcaacgatagaccgggtgctggatagattatccgatatgaacagcgaacagataagcgattattctcattacgacgtgccgtggctgacaacagaggatggcaaggtaatagactacgagagcgttttctaccgcacgccgggctactctgtgaggtcgtacgatgacaaagatattcagtgaagtaaggaggcttcctgagtttgataacgatttcaaccggctgctcaaaagattcgggactcttgaagaagacctgaaggtcttcattgaaaagcagctaaaacttctgcacaagctgggcatcgacaacggaggatgtgtccgcatttcggggctgggtaaagattcgccgctcatatacaaggccaggaagttcgcctgcaggtcgctttttggcaaaggctcggcaagcggcataaggattatctatgcatactggccgcagcaggacaccgttgatttcatagaaatctactataaagacgacaaagaaaacgaggaccgccagagaatactccgaaagtacgcctgcccgtagcccgcagggcagggtaaaacccggccaatttcttctgctcgctgttttataaatcagaaaggccggcctctctcataccaggactcaggacggcacttgagcgaagcgaaggatctgtacgctgaccgctgaaccctgaattttggaaaggacagcaggtgagaaattctctcatataccaggcatcggcagcaaacttagccggtatctactcggccttgcggcggatgccgccacgcaacaagcaggacctgaaaaactacgtcaaggtgttcctcggcctcgatgtgccggacgtgcacatctgcgaaggacacaactcgccgatggattatctatggcactgctacagcgaaaaagccccccgcgatgacgcaccagcaaatccgaaaaacgccgacgcagtcatctgggcctgccggggcggcggaaaaaccatcctcgcagcagcagcaacgcttttagattgcgtctttaagcccgcctgtcaggtgcgaatcttaggcggaagctacgagcagtcggccagaatgtacgaatacctcatacagttcacaacacgagccttcacgcagcatttgcgcagcctgcgcagccgaaaaatgctcttcgccaacggctcgggcgtcgaggtgcttactcagtcggctacgagcgtccgcggcacgcacgtccagaagctgcgatgcgacgaggtggagcttttcgacaaagaggtcttcgccgccgcccagttcgtcacccacagcacagccggcgccgtcgcagcgctggaggccatcagcacaatgcaccagcccttcggccttatgcaccagctcgtcgccgccgccagccggaacagggtgccgcttttcaaatggtgcctgtgggaggtaatcgagcgctgcaccgaccgaaactgctcaagctgtcctctcgccgccgactgcgccggcagggcaaagcaagcaacaggctatcttaaaatcgacgacgccatcgcccagcagcgacgagccagccgctcaagctggcagtccgagatgctctgtgagagaccctcgctatccaacgtggtttttgcggaatttgaccctgctctgcacatagcatcgctcgattacgacccgcttctgctgctgtaccgggcgctggatttcggcttcgtcaatccgttcgtgtgcctgtggattcaggtggacggctcaggcgcggtgcgggtcatcgacgaatacgtccgcagccgcgctactatcgacgtaaatgtcgaggcggttaaggcccgcacaccaggcgcagcggtcgcggctaccttctgcgaccccgcaggcgcaggcaccagcgacatcaccggcaccagcaccatcagagagctgcgcagcctcggcataccgaccaggtaccgccgaagcactatcggcgaaggcatcgagctaatccgccggcatctgcacgcaggcgacggaaaaaccaggctcgttatctcgccccgctgccagcggctgattgaggcaatgagctgctaccactaccccgatattgcttccggcggcaatcgggaagtccccgaaaaagatggcctctacgaccaccccatcgacgccctgcgctactttttcgtcaactacaccgccacccgacaaatcgccagcagacgctattgactcctctcagcctgcgcctcgccggaaccgggaaagaccgataaaatacaatttgcttcgggaaatttacgaaaagttctgatttcccgaacttttacttgaaatttgccgaaaaataacgtataatattctggcaaactggaaggagatgagaaatggaaatcggacggcgattaaaaatagcaagggatgctatcggttacacactggataaggcctcgcagttaagcaaaataggaaaatcatccctgagcgaatttgagaacgccagacgtgagccgaagttcttccagttggccaggctggcagaaatttatagaaagccaatagagttctttttgtccgaccagccgattctgcccgaaatggctctctggcacgacccacccgaaaacgaagaagaaaaaaagaaaaccgaagcccggttttttgaactatgtgagcagtaccacagacttgaggtgctgacggatgaagtacacagacccgagcctctgaatccgtatgtaagccgctgtgaagaacccaactacacggaggctgagtcattagcgcgaaaagttcagcgggaatttggcctcggtgagataccaaccacctcgctgaaaccagttctggaagagaagtattacgtaaaaatcttctatttggactttgccggaagttctatctcaacggtgtcggaaagattcggccctgctatttgccttaacggcagaaacaagcaatggcgccgcagttacgacctcgcacacgagttatttcacatccttacgtgggaggtttttagagccaatgagcaagtcatctccgtagcaagcaaacgtgaggaaaaactggcaaatgccttcgcaagccgacttcttatgccagagaaacctttagcacagagaatccgttcaaaagcaaaccggcagggacgaattacgtttgaccaactcgaagagattgccagagaatatgacgtatctttagccgctttaatttatagattagccaatatttttgagctcaaaaaagaggacacccagaaatatcgtgaggctgcggataaatggttaaaatcccgcccgccaagggaatccggagagccagagactctaccggagcgatatcgtgagctggctattagagcattaagagcaggaaagctgtctctaatgcagttcgctaaatatatggatatcacttacaaaaaggcccaggaatatctgacggaaggcgaggatttcacggatgaaaaagttacaattcctgttgcttgacaccgggcctattctgaagctctttgaacttggtatctgggatgcgtttatccaaagatacgatgtgagtatggcccgcaccgtagtagagcaggccttgcacacaccggacggaacgcaacatatcgatttaacgccttacgaagaaaaaggcctaatcaaagtaatcgaagttgatttgcctgttgtagaaaacttcgttaaccagctcggcgcaaaatacaaaagcgacatccacgccggggagaaagaaactttggcatttctgttcggctcttcagaggattggctgttatgctctgctgatcgcaccgtttttagagtcttgggtctgttcgggaaagccgagcagggtatatccttggaggaggctttagctaagattggcctttcgcagaatctcgaatggcggttcacaaaatgcttccgcctgcactatgcgaaaaagggacaaatagattctatccaggatcaggaccttaaccggtgaacttttgaaaaaccacaccgttgaccccggcgcgccggggtgaagaatctcgtcgtcttttgtcgtgctgagccgaaggcgaagcatctggcgcaaccagcggtcagcatacagcgacgagatccttcgctgcgctcaagatgacagaggacgaaggattgacagtctcagctttatcatttatcgttagacaactcggacacaccgccgccagcgctcaaaaacgcagcggtcggcttctaatcatcagcacgcagggtctatatgccggcggacctgcttatggtaaactgtcggctgcttgactcgtcagtcgcgcagcccgtagcggtaagcatacataacggcgtcatctcggcgctgggcccagcgcccgcccggccccggcccggtacgcccgtgctcgacgccgcaggccgatggctcgcaccaggctttatcgacatacacatccagggcgccggcggcgaagacgtactcaacgccaccaaccaggccctcgagaccatcagccgctcctgtgcacgcttcggcgtaacaagcctgctggcgacaacccttttccagcccgccgccaacaacccgcacctccccgtcgccgccgatgccgccagccgaaagcttcccggcgccgccatcctcggcatccacctcgaaggcccgttcatctgccccgaccgacgcgcaggcatcgagccgcagttcatctgcccgccggctgcgacggtcctcgagacaatcctcgataacacccgcggccggctgcgaatgatgaccatagcgccggagctgccgggcgcgatgcagctcgtcggcaggctccgccaagccaacgtcgtcgccgcactcggccattccgacgcctccttcgacgatgccgctcacgccttcgccgcaggcgtctcgcacgtaacccacctctttaacgctatggcaggctttcatcaccgctcgcccggcccgctggccgcactcgtcgattcgcccgaggttaccgcgcaacttatacccgacggcacgcacatccaccccgccgcagtccgcctcgcctggcggctgctcggcccacagcgaattatcacaatcaccgacggctgcagcgccctcggcctgcccgacggccgctacaacagccccaccggcggcacctacgagacaaaagccggcgtcgcacgccggcccgacggcagactcatcggcacagccgtagggctcaacgagctgctccgccggctgataaccttcaccggctgctcgcccgcagaggccgtcggcaccgtcaccgccaaccccgcacgcctgctgggtatccacgaccgaaaaggctccatccagcccgctaaggacgccgacctcgtcatcctcgatgacgatttctccatctgggcaaccatcgtcgccggccgcatcgtctaccgccaaagctcgtagtcctcccacccgtatcttgcgacccagatgcccgccgccggcccttccttcagcaccagaaacttccagacctctcccggaagggatactgcgtaacgccgccgcgccgctacacccgcgcttgcgccgcaaagaagaaatagccccccacgccgacaatgcgggccgcggacgcctaaagaaagtcccccaggccgcccgcggcccgtatatagagagttctaaaacatcttataacctgccggaaaccgcttcgtcaataccgaaaacgcctccatttccggctacaaaatgggctctaaggcaaactctatttgggcgccctcggcggcggggtctgcctctgcggctcaggttgagccccgggcccggccccaggtcgctcctcgggctcagccccgggtgccggctgcggcagcacctctaacagctccacctcgaagataagaaccgagttcggcccgaccttcggcataggccgttgcccgtacgccaattccggcgggataaacaactgccacttcgcaccgggcttcataagctcgagcgcctccgtccagccgggtatcaccgcgtcgagcccaagcaccgtcggctcgccacgagtgtacgagctgtcaaactcggtgccgtcaatcagcgtgccgcggtagtgcaccttcacctggtccccgacgccggggctgcggcccacgccttccttcagcaccttgtattgcagaccgctcgccagcaccgtaacgcccgccttggtcttattggcctccagaaacgcccgaccgacccgcagattctcctgcgactgcttttctaattgctgctgacgcacagctacaatgcgcttcctgtagtcctccatcgcccgctcaatctcctccgccgtcagcaccagcgccttgcccgccgtggcatcctccaggccgcgcataaacacagccgtattcagcttgataccgccggcactaaaaacctccgcaatcttggtgccgaacgcgtagctgatccgctccgcctcgtcagcaaaagcacccgcagcagcagccggggccgtcggcttcgcaggctccgcaggcttcagctccttggccgcaggcgccgcaggcttgttcggctcggcaaccggcttggccgcaggcgccgctggcttcacaggcactgccgccggggccgtcggcttcacaggcactgccgtcggggccgtcggcttcggggtcgctgctaacaaccaggccgacaaaaccagcaccggcaccaccaagcagattcgcttattcatttttgtttccccttccttatggacaaccataaattgtcgccgaacaccggcaacaaaaagtttcaaattacctgctttgccgctgcaacgcaagaaaattccccccgcagccccgactatcgactaactgcccccggctttaccgagggtcttgctttcctatcgactatcgactaacgactatcgactatcgactaactgggcgggggtcattctttcttgccccgccaaattcctcatacacccatttccccatatacccgcgcgtctttcccatcgatacctttcctgatttagcccccagaccgcgccctgggggttatcttttatcctttttcccaccccgcgcggcggggatcttttcgcccgtcccaacgtttagccccgccacctgtgggcggggcatatttaaccccgcgtttcacttggaggtttgggtcgccgccgcagacactccttgccttatcccgtcttggatggtatcatttggcagacatttgctgaacgctgtactggaaggtctgctaatatcaaaatggcaaacgccaatggaaaatccaggaaaaaagattccgcccggctcgtctgggacactaacccccgcccaacgcccccgataataaaggtttgccccaccaagcctgttaggccgggtggggcagagcctgcgtgactttcgtcacttgttgtgacaagcccgcaggcacggattagttacaatacacatacttaaacaaatactgacgagccagtcaagaaaaatctgttcgagaaaaaattttttcggaggtaaaagaatggctccatacactctcggtctcgacatcggctcaaacagcatcggctgggcattgctaagcaacaatgccggtagaggaataatcaatcttggggtgcgggttttccctgaaggtgtggacagagatacaggaggactggaaaaatcaaaaaatgctacacgtagagaggcaagaagtgcaaggcgaactcaccaaaggcgaaatctgagaaagcaacaattgctgaatgttctcgagaaagcagggttgctgccggagaatgagtcggaattgaggtcgctatttcacatcagtccataccagttgcgtaaaaagagcctcgatgaaaagctggagccatatgaatttggcagagtgctttaccacatcggtcagcgacgcggttttaagagcaacagaaagactggcaaggcgaaggaagatggaattgtgacgaaggaagcgggaaagttacaggccgatatagatgcaagtaattgccgcacgataggtgagtattttgcgggtctaaatccggaggagcaacggataaggggcaagtacacattccggtcaatgtacgagaaggaatacgaccttctgtgggccaaacaagcggagttttatccagatgttctgacagagcaactccgcaagaagattcgtgacgagattatatttttccagaggccattaaaacctgcagatgatttgattggcaagtgtggactggagccggacgagaaacgctgtccgagaggagactggtacgcgcggcaattccggttgcttcaggacgtcaataacctggagattcgaaaccccaatggtatcgaggcgaaattgacagaccagcagcgcagaatcgtgcttggcgaattggctgaaaagaaagaagtgacttttgacagcctgcgtaaaaagctggaactgatggagacgcagagatttaatcttgagcaggacggcaaggtcaagaatctcaaaggggatgcgtttgttgcagcgatgagaagcaggaatatcttcgggccgaagtgctgggatgcaatggaagaggtagagaaaataaagctcaacgaatggctggtagagcttgaggatgaccagttaagcgaaaaattgcggagcaaatatggtttgagtgatgagcagatagggcacattttaaaaattgctctaccgcgtggatatgcgagtttttcacgcaaggcgataatgaaacttttgccatttatggaagccggggcgataacgagtgaggcgatagaaaaggcagggtacaggcctgatgagggggatgctggagaggcgcttgagcgattactacagccgccggatttgaggaatccgatagtgcagaaggcactatttgaggttcgcaaggtggttaatacgatcgtgcgcgagcacggcaacccagcaaaggttaaaatcgaaatggcaagaaatgtccacggcagcatgcgccagcgagaagaactgcactggaagatacgggaaaacgaaaagagaaacgaggatgcccgcaaacgcctgagagaagatataagaattgcaaatccgacccgcgacgatgttatcaaatacaagctgtggatcgagtgtgacaaggtatgtccttatacaggcaggtcaatctcgcaggaggctctatttggggcaaatccagagtttcaggtggagcatatcctgccttatgaccgcagcttagatgacagttttatgaacaaaacgctctgcgaggtccacgagaatatacacgtgaaaagaaaccagacgccttatgaggcctacggccacgatgcgaagaggtttgagcagatacttgagcgcgtgaacaagtcgcagatgccataccacccgaaaaggaagaaattctggcagaaggaaataaaccttgacgaaggtatcaagcgagagttgaacgatacaaggtatatatgtcgagagacagtgaaatacctcaagcaactcggagtttatgtacgcgggacaagaggcaagataacggcggagcttcgacatcagtggggccttgacgggatatttacagaattaggtgtccgcagggacgacgaccaccgccggcacgcggtcgatgcggtcgtggttgcagttaccgaaaatgagcacttgcgccgactggcacggagcaagtattcggtaacgggtgtggtattcgagcagccctggccggatttcaggcaagaggttaaagaaaaggtaaaacacataaatgtttcccacagggttcagagaaaggtttcaggaaaactgcacgaggagaccaactacggggcaacagataaagaaggtttgtacgtatttcgcaagaagttagaggatttgacgctgccgatggtggagaaaatcgttgaccctgtggtgcggaggattgtggagggtcgtttgacagaaaggggtatcgatcttgcgggaagcggcaaaccaccaaaagaggtttggaaagagctgttgtatatgaaaacaaccaggagcaacaagcaagtgccgataaagaaggtcagggtttacaacgtggctgagaaggtgattgcgatgaaagaccgttcgggccggccatatagatacgtcgagccgggcagcaaccatcatattgagatattcgagttcacagacgccaagggcaggacaaaaagagatggtctcgtcattacgatgtttgatgcggtacagcggagtcaaaaagacgaacctgtagtcaaacgggattacggcgacggcaagaaattcatctgttcgctggcaataaacgaaatggttatgatggaacaagatggcggagtaaacgagctttatagagtacagaagattaatcagaatacacagatattttttcaacctcatatatacggaggggatttgaaaaaccatcctcctatcagcaaaatgccaaatcagttgaggggttacaaggttacagttgacccacttggcaggatttggcctgcgaatgattagtttgctgtaagttttatctcaaatagccaaagtgcccgctgctcttcgccgataataaacgtcggcagcagactcaaagggcgcggctatgataaagcgaattatcgaaatctcgcaggcaaaaacacaccttgcaataaaaaatagccaactgattatcaggcaggacggggacataaagtcaaccatcccctgtgaggacatcggccttttactcgttgaccaccccgcaaccacttacacccacagcgtctttacggagctattgaacgcgggcgccgccgttgttctttgcggccaggaccatcaccccacaggattacttctgccgcttcaggcaaataccctccaggcagaacgctttaacgagcagataaatgcaaaagagccgttgaaaaagaagctctggaagcaaatcgtaaaagccaagataaaacaccaggcaaaactcatccgcgatgataccgtaacctacaaggctcttatgacgcttcgggacaaggtccgcagcggcgaccccgataacatcgaagcccaggcaagtcgaaaattctggcctgcctatcttcaggacgaaagctttagaagaaatccggcaggcacgccgccgaataatctgctcaactacggctatatggttatgcgggctgccatcgcccgagcacttgccggcacaggccttctgccctgtctggggctgcatcaccacaatcgctacaacgccttctgtcttgccgacgatattctcgaacccttccgcggctttgtcgaacaaaaggtgcgagctatatgcctgtccggcgaagtgcccgaaaaactcgaccagcagactaaggcaaaactgctcgatgtgctttacgaagaagtgaaaatcgccgactacagcggcccgcttatggtcggtcttcatcgcacggcagcatctttacagagatgctttgccggcttgcagaaagaaattgaacttccagaaatatgattctaagcggatacagagccgtgtggatttttgcaatgttcgacctgccgaccgacacccaaaaggcaagaaaacattacaccgatttcagaaaaaaccttctgaaagatggcttcagtatggtacaatattcagtgtacgcaaggcactgtgcgagcgaggaaaatgctactgttcaccacgaaagggttaaaagatttttaccccccgacggcgaagtccgccttatcaccgttacggataagcagttcgcccgcatgcagattttctggggaaaaatgcgaaaaccaaccccgccgccacctatgcagctcgaattattttaaaaaaattcgttcgcaagcccttgtaaaacaagggcttgcgaacaatgcattgtaactaatccgtgcctgagtgcaagccacaactctcttgtaccgacgtatcgcggcaaattcattgtaactaatccgtgcctgagtgcaagccacaacaccacaaaaaccataacggcctggacaatcattgtaactaatccgtgcctgagtgcaagccacaacagcttcgcttcaagctcgctcattccctgcattgtaactaatccgtgcctgagtgcaagccacaacagcgttctcgacgtggacgatagcttccgcattgtaactaatccgtgcctgagtgcaagccacaactcgcaggtcagcgagaagaagttcataccaattgtaactaatccgtgcctgagtgcaagccacaacaggcgggagaatgcgatttcggtctgaattattgtaactaatccgtgcctgagtgcaagccacaacgcctgctgtgagcgtttgatttttactccaattgtaactaatccgtgcctgagtgcaagccacaacgggctgcctactatacccgtatcggccataattgtaactaatccgtgcctgagtgcaagccacaacgggagaaacagggaccgcaccggcgtttgaattgtaactaatccgtgcctgagtgcaagccacaactgcggaaccgacctgcgcgaagccgacctgattgtaactaatccgtgcctgagtgcaagccacaactcacttgtcaatgtgccacttctccggtaaattgtaactaatccgtgcctgagtgcaagccacaacacagtgcgtcccaagccttgccaggtttatattgtaactaatccgtgcctgagtgcaagccacaacaaccggcggcggcggggaattcgccgtacaattgtaactaatccgtgcctgagtgcaagccacaacacaaaaagcggtattgtgcgaaaatagtaaattgtaactaatccgtgcctgagtgcaagccacaacacattagctcttgtccaactaccgcagccgattgtaactaatccgtgcctgagtgcaagccacaacaccgagatctacacccacccgaactcgcttattgtaactaatccgtgcctgagtgcaagccacaacaagcggctgcatttgaacatctggacatcgattgtaactaatccgtgcctgagtgcaagccacaactgcggaggaggtcagggaaatgcacggagtattgtaactaatccgtgcctgagtgcaagccacaacccgatagcgaggttaggcccttgctggcgaattgtaactaatccgtgcctgagtgcaagccacaacaccgggcctatcgcatctgctccgattatgattgtaactaatccgtgcctgagtgcaagccacaacccaatgacattgagtatcgtttttcaacaaattgtaactaatccgtgcctgagtgcaagccacaactgcgctcgtggtgagaaatccatttttttaattgtaactaatccgtgcctgagtgcaagccacaacgctgagactattgtaaacaaccggatagccattgtaactaatccgtgcctgagtgcaagccacaacgccctgttccctgcttggctgcttgccctgattgtaactaatccgtgcctgagtgcaagccacaaccagttacttctgtctgcctaagcgcttttaattgtaactaatccgtgcctgagtgcaagccacaacgaacgaaccatccccctgatggttcgaacgattgtaactaatccgtgcctgagtgcaagccacaaccttgtgctgcttcgggtgaatttttggtttattgtaactaatccgtgcctgagtgcaagccacaacacgaggtgtatggtggtggttctcctgtagattgtaactaatccgtgcctgagtgcaagccacaacgagacttcggcatagatgtatagcggtgtcattgtaactaatccgtgcctgagtgcaagccacaacacctccacgtccgccatcaaactatataaattgtaactaatccgtgcctgagtgcaagccacaacctcgccagtgtagtggtaatcgccccccgtattgtaactaatccgtgcctgagtgcaagccacaacaatcaagattatcgttgcatcaaaactcacattgtaactaatccgtgcctgagtgcaagccacaactagttatgaggatatgagatgaagccggaaattgtaactaatccgtgcctgagtgcaagccacaacatcgcaagcgccgcaacaatggccgtcctattgtaactaatccgtgcctgagtgcaagccacaacacacgacctatcaattacgacataccagttgattgtaactaatccgtgcctgagtgcaagccacaacccgatatgatgtgaatgcggctatcgcggcattgtaactaatccgtgcctgagtgcaagccacaacgaataactcatttcgtccgatacgtcaggaattgtaactaatccgtgcctgagtgcaagccacaacacatatcgcggtaagttcgcgggtgttaagattgtaactaatccgtgcctgagtgcaagccacaactggcagctaatgcggtctgtttggtctataactatatataaactatgtattaaatagatatagtagctactttagccgtcctctgtggtctcttccgcatggtccattagggaatgacttatccctttttccttttcctttttacctgtccgctggagtttacccgccgcaggcgggctgcctgctatcccttatcccctattctctcctgcccccaaaagtccgcgcttgtcaaccccaaaaatgctaaaagcctaatccatccgttgacaacccaaattgcccctatagtttttgcgcaaaaagcgttcatttctgcgcagaacctgtacacttttgttcaaaacccgctcaaaaccagcgcatttctgctcatttttgcattatcgccttttcgccgctaacttctttccgtacaaacacttacaaaaattttccgccggagtgctaaaaaccaactgtcccaaaagccccctcccgccccatgcgaaaagtgcttcgatagttacaactaaaatcacccggacgattgtcccacaatctttgggcatagttactcaacccctttgtctttgaacaggcgaacctcgtagtttatactggaattttggtgtaagaccagcggcttgagccgctggtttcgggaaattgatatggtaaacagcgttattacggcaccgagagggttcctggcggccggggtagcctgcgggatgaaaaggtccggcaaactggacctgggcctgattgtctgcaggcaaggagcgattgcagcaggcgtatttactaccaacaagattacctccgcagcggtgcaggtatgccgggagcacgtaaaaagccccaggatatacgccgttgtcgtcaactccggcaatgccaactgctgcaccggtccggccgggcttaaaaatgccatcgaaatgtgccggcagacagcaaaacatatcgcagttgacccgcatacggttctggtaggttctaccggcatcattggacggccgttgccgataaacgagattacgaggggtatcgcccgggcctttaagaagctgtccgattctgcgtcggcggggctggattttgccagggccataatgaccaccgacagcaggtgcaagcaggcggtgcggcggttgcaggtatcgggacgcgaggttaccgttgccgggacggtgaaaggtgcggggatgattgcgccccgtatggccacgacgctgtgttttatcacaacggatgtggcgataagcaaaccgttgctggtgaaggcgttaagagaagctatcgggaattcgctaaataaattgactgtggacggccaccagagcaccaacgatacggccataatcctggcttccggccgcgccggaaaccagcccatcgtaacgcaatgtgcacgatacaagaagttcgcgcgggccctggcggatttgtgccaagacttagccagacagatggcccacgatgcggagggggcgacgcggatatttaaggttattgtcgagggtgcagccagccggcaggaagccgcgcgggcggcccgggccgtggcggattatcctctgttcaaatgtgccgttcacggcggcgacccaaactggggcaggataatctgtgcagtcggctcggcgcaggtgaggctcaggcccgaaaagctgtcctgcaagattgggccggttaccgtctttcgaaacggccggggcacgagattcgaccagcaaaaggtaagacggattatctcgcaagctgaacacagcgttacggtgaatctggggattggcgggttcagcgacttttgctatgggtgcgatttgagcaaagaatacgttaccatcaacgcagactaccacacgtgaccacgctgccggaccggccgggcttttcggcaccggcggacaaacacttgaaaaaccaccgaccgtattataagctacctgctcgcaaaaattgcagttgcggtttcaaacttgactggagagaaatgtggcgggacttgtaaagcaggtgggcttggcctgggggctggtgttatctcggagcttggcggcacaggctgggcaggggggcgtagttgccgagattccggtaacctggtggattgcaccgatcgcggcactggcagcattagttgcagcgtgggtgttctaccaaaagatgataaccgcacctgcaggcaacgagacgatggagcggatcgctctttacgtacggcaaggcgcctacgcgtatcttttccgccagtatcgcgtggtcttggtagtctttttgctcttggcagttatcctcggtgtactggcatatataggggtacagaatccatttgtgcccgtggcgtttcttacgggtggatttttcagcgggctgtgcggttttctgggtatgcgagcggccacctatgcctccagccggaccgcccagggggcaacgataagtcttaaccgggctctgcaggttgcttttcggtccggtgcggttatgggtctggtggtggtgggctttgggctgctggatatttccctgtggtacctgattttagacaagctggtctacacggtcgagcacatggccggcgggctgaagattctcggcattacactggttaaggccggtatggacagcgatcgcaagctggtggaaatcaccactacaatgattaccttcgggatgggggcttccacacaggctttgtttgcacgggtaggaggaggaatctacaccaaggcggcggacgtgggggcggaccttgtgggcaaggtggaggcgggtatcccggaagacgacccgcgtaaccctgcgaccattgcagataacgtgggcgataacgtgggcgacgtagcaggtatgggggctgacctttacgagagctattgcggctcgatactggcaacggcggcgctgggggcggcactgccggcagcagccctgcaagagcgaggaatgagcacaattaaggcggttctggcgccgatggtagtggccgggctgggtatcatcttttccatagcaggaatgttcctcgttcgctgcaaagaagacgccagccagaaaaacctgctgcgggcgcttttgttcggcacgctcggaagcacgattatgataccggcggcgctggcggggatggtgtatatgcactggataagctggggtattttcggatcggtgatagcaggacttttagccggggtctttatagggcaatttaccgaatactacacctcggacgaatatccgccgacccgcggtatcgccgcacagacaaatatgggagcggctaccactatcatcgaaggccttgcaacgggtatgtactcgtcgggccttccgacggtaacaattgtaatcggcatcctttgctcatttggttttgcgggtggtttttcggacctgtcgatgggcctttacggcatcggctttgcggcagttggtatgctggctacgctgggcataacgctggcaacggacgcttatggtcctattgccgacaacgccggcggaaacgcccagatgagcggactgccgccggaagtcagaaccaggaccgacgcgctcgatgcgctgggcaacaccacagcagcaaccggcaagggctttgccataggttcggcggctttgaccgctatggcactattagcggcctacatcgaggaggtgcgaatctggattagcaggctggcgctggaggccccggacgggaagtaccgcgtgggtgaggtggtattttcggcaggcggaaatataagcggcgccataaacgccaggaccgccggtattatggattttgtcggcgcattcggaatggatgttatgaacccgaagtttgtctgcggcctgtttttaggctgtatgatggcgtttatattctgtgcgatggcgatgaaggcggtgggccgggcggcgggagctatggtaaacgaggtccgcagacagttcagggagatacccggtattatggaagggacaggtaagcccgattacgcacgctgtgtctccatctctacggccggtgcgcagaaggcgatgatactgccagcgtcgctggcgattatactgccggtgagtacggggctgcttctgggcgtggcgggagtgatggggctgctggcggcggggctgtcctgcggctttgtgctggctgttacgcttaacaatgcgggcggggcctgggataacgccaagaaatatattgaaaaaggcgcctacggcggcaaaggctcggcagcgcataaggccgcggtggtgggtgatacggtcggagacccattcaaggatacgtcaggcccgagtctgaatattcttattaaacttatggcgatggtgagcatagttttcgcgggagtggtggtcaaatacggcccgtacgttggtcagtttcttggtatcggcagataattgagtacaggcgaattggcaagaaagcgtaagtccgtcagtaaacaagccgcggagggcaagagatttgcggtggccacggccaagattgccgtgcaaagacattgccaggacgttgtagtcctgaacctcaggggaataagcccagcgacggattactttgtgattgccaccggcagcagcgaccggcagatgcgggcggtggccgatgaagtccgcgaacttggccgggcgacgagcttcgggcttttcgggcgggccgggtacgaacagggccgctggatactgctggactttatcgacgtagtcgtgcatatctttgacagtgagtacagggattactacgacctggagcttctgtggggcgacgccaaaaaagtcaggtattgactgactggtgcctgtcggccgaacagccttagcgcgatgaggcaagcgcggcgggcgccggcgtaccatttctcaagggtttcgggtgaaatcgacggcggaaattctcgaggaactggtgagtgcggcgatgggggcagcgaccgggcgggagggttgccctgcgctggtccgcccggcaagcgaccctgcgttcggggactaccaggcagacggcgtaatggccatggctaaacagctaaggaccaatccaggtaagctcgcccggcaggtggtggctgaactggatgtgtccgatatctgccagcagccggaggttgcggggccgggatttattaatcttcgcctcaagaacgaatttgtggcggaaaggctgcttgagatttttcgcgacccgaacggccgtttaggcatcgaaagggctgctgtgcccaagaggattgtggttgacttttccagccccaacattgccaagcagatgcacgtaggacacctgcgaagcacgacaatcggcgactgcatctgccggatgctcgaatttgcaggccataccattatccgccagaaccatatcggcgactggggaacgccaatgggtatgattgcttatgctttgtggaactatgcttttgaaataatctcacgtaaaaccttttcggatacagagtggggaaagaacctcggaaccgtttctttagatgtgtgggagaaaacattcgatgagattcccgtgcagaatttggatgagttcgtgtccctcaacttggacgcgttagaggatcactataggaatattagtagtcttgaaagtacagaccccaaaattgctgggaaggtacgcgaattcactgccaaccttcagagcggaaagagtaaattcataaagaaactgtgggagcaggcatgcaggataacattgaaagaatgttacgaactgtatgactgcctaaatgtgacgcttcaagctcgagacacgtgtggcgaaagtttttatgcggatatattagctggggtggttgaggatttgcggaagcgggggcttgcgcaagaatcgcagggagctatatgtgtttttccgccggggtttaagaataaaaagggcgaggcgctgccgtttatgattcaaaagtccgatggggcgtatttatatgcgacgacggacttagcggcgcttcggcaccgggtccgggaactgaaggcagacgcgataatatatgttaccgatgcccggcagaagctgcatttcgagatgctgtttgcgacggcgcggctggccgggtgggcgacggagaagaccgagctggtgcatgttatgtttggcagcg

SEQ ID NO: 4527 - DNA, 20587 bp, synthetic construct
  misc_feature 1..20587: note = Synthetic
  source 1..20587: mol_type = other DNA
ctttttatcttcgcaatcgcatcgagataataatcctttgtcatattggactgaaactggctgatgtcaaaatcatcgcaaggtttcaaaagtatcgtatcttcgctgtctgctgcctgatttaagatttccataagctgtgtaattttttcttcgccgcttttttcgtcatccggcagtccaactgcaaaaagataaaaacagtttctcagatggtcgaaacagataaccttatcataaaacaggagtctgattaaaggcaatctcaactcgtcggcagtgatggtaggtatatcctcaataaacctgttaaggtcataactgaaaaagccaatccagccgcctgtgaaaataccctccagtccctctatactgtcatcaagacaatatttttttagaacagtccttaatttttcaaatggtctttcctcatctccaaagaactcaaaaacttcaacaggttcagcagcaaaataactatagcgattcctgacaggatttaaatcagccccgccgagaatagatgaattagaaagagatgaaaaataccgcaccagcttctgtagcccagcctgcaccgatactttttcacaaaccaagcggcatcgctttatacagacggattcagcaacagaaagcaccattacaaactttcaagccgaagttttttatcgtgttcaatcaggccggatatcaactcgtccatatcgccggccataattctctcgagattgtaaagcgacagatttatccgatggtcggtaacacggttctgcggaaaattataagtccttattttttcggagcggtcgcctgagcctatcattgtctttcgagtcttgtcgcgatgcgcactttcgatgctctgaaaatgctcataaaccctgcttcgcagcagccgccaggcctttgacctgtttttgtgctggcttctatcctcgcgcatatttaccgttataccagtgggtatatgctcaagtctgacggcgctgttgagcttgttgacagcctggccgccgggaccgcctgagcggctgacatgttcgacaacatcatctggatttatttcaatcgccagctcctccggctcaggcagaacagcaaccgtaaccgcagatgtatgtatcctgccctgcgtttcagtctccggcacccgctgaacacgatgccctccgccttcatagccaagatgagcccatacgccggggccttttacgttgaatataacctcgcgaaaaccaccaagctcatttgcgctgaaatcaagcagctcaaccttccatttctgcttgtctgcatagtgagtatacatatcgtacaaatcgcgggcaaacagcgccgcttcatcgccgcctgtaccggcccgtatctccattatgaccgagcctaccgccgcatcgtcagacattataagagaatcctttatctgctcaaaaagctgtgtcttcttctcctcaagccccgccaaatcctcagcggcaagctgtttaaattcctcttccgccccgccgtcgttcaaaatcgcctgtgcctgctcgatttccgcaagcagttttttacagctgcggtactttgtaacaatcggcctgagtttgccctgttcctttgtaagcggaataagccttgccgaatccgtagctacagcagggtcgtgaagctgggcctcaatttcagcatatcggccttcaagttcctcaagtttttttacaactgctgaatctgtttcattcataaggtctgctcaaaagatataaaaaaattacgctgccggtgcataacctgtttgattaagtccaacagcgtaatttgtaaacaaaaaaatctacttttcctttttttgtgccttttcgtccttctgtgtcttttccatgtagctttggccgtatttcttctggaaacgctcgattcggccggccgtatcgacaaatttatgtttgccggtataaaacggatggcacatcgagcatatttcagcgtgaatttcttttacggtgctgcgggtctcgaaggtgtttccgcagccgcatttgacctttaccgtctgatatttaggatgtatgtcctttttcatttcttttcaccttaaaatctaaaacgtagtattatatcggcttctttggctaatgcaagaagtttataaaatcaatcccctgatgaatcaaagggctaaataactcttgtcgaaaatcccttcttattctatacttacgtaaaatatctggaaaggataaaagatgaaaccaaaacttataatcatcggcactgccggcagaatgggcagacgaattatcgcccttgcctgtgaatccagacgattcgatataatcggagctgttgaagacagaaactgtcccgaaatcggcaaagatgcaggacttccggccggaatcggttcaatcaatgtcaaaatcagcctggattttccgccaaaggcggatgtggtaattgacttttccgcacctgccgcttttgacagcacagtcgaatactgtcttaaacaaaattgtgccctcgtatcaggtactaccggcctgtctgccgaacaaattaaaaaaattgatgaggctgcaaaaaaaatccccgtcatccaggcaacaaatatgagcattggtatgaatctgctttttgaacttgtcggacaagtcgcagcgaaactcggcgatgaatacgatatcgaaatcatcgaagctcatcaccgcttcaaaaaagattcgcccagcggctctgctatgacgctcgctgaaagaatagcagcgcaaactaataaaaaatttccagactgtctcgatatcggcagaaaaggtaaagaggccctgcgaaaaaaaggcacaataggcatacaggcaattagactgggcgataccgtaggcgaacattctattatgttcggctcgctcggcgaaaccgtaaccatttcgcacagcgcacacagcagagatacgtttgctgcgggagcaatcagagcagcacagtggcttgtcggcaaaaaaccggcccgatactcaatggctgatgtcctcggcctcaaatagcacttcatcctaataacgcaaatgctattatggcagcattgaaaaacaggtgtataaaaatcggccgcagcagcgagccgcttctttcataagcatagcccatacagacagacaaaatcagcaacgccggcaggtgcatcagcggatgaagaattgaaaaaattatcgaagcaataaatatgctctgccagggactgtaatcaagatcgcgcaaataagtctgcaaaagacctctgaaaatcagctcctcaaaaatcggcgttaaaattgtcgcaaagaaaatcatcaaaagccgcagactccattgcttgttttcaagaataacggccagtccttcgttctgctgcatctgaaaatccggcccctcaataagcctgccgattataataatcagatagattgccgccagaaccagcggccagaccgcgacaaacatcgccgcagcagaggcaatatccttaaagataccctttaaactcagaccaaaaccgctcaagccgccctcaaaatatcttctggctgagatgaaaataaatacaataataacaatttcaatcaggacaaaactcgaataaacagcaagtttttgctgccagtcgggcaactgggccgtaagattctcggccagattcgaagtaaccagataaaggccgagccagccgaaaataaccgcaaaaggcagataataaggcataaaattctgccgaaaaatcgcccgctcgagggtgcctctgccaaacctgttttttaccgcccagtaaataaacaatgccaaaccggccagggtcaaaataatcataaaaatagacgcataatcagcaacaaaacgccggttcgctgaatcggccgataataaaatttccacaaaaaacacaaaacacctccgcctacagttgcataaactgcttttttgtattagattatctctttcttttcaaggatttttaatatggctcttgatatatttaaaattacaggccctgtcagcttgaacggcacagttacaatcagcggctcaaaaaatgccgccctgcccacaatggccgcaacaatcctcgcaccgggcaaaaataccctgctcggcattccgaacctcagcgatatatcagtaatgtgcaaacttatagaaaatatgggctgcaaaacagctgttgacagcaacactgtttcaatcgattctgcatccatcgacagaccgttcggcgattatgaaattgtccgtaagatgcgggccggcgtctgcgtcctcggccctctgcttgcacgcgaaggccatgccgaggtttcaatgcccggcggatgcgcgatcggctacaggcccgttgatattcacctgcggggtctgcaggaactgggcgcaaaaatcgaactcaaaaacggatacatagtcgctcatgcaaacagcggtcttaaaggagcaaatatatttttaggcgggccgttcggttcgagtgttcttgcaactgcaaatgtcctgtcggccgccgttctggcaaaaggaaaaactgtcatcgaatccgctgcctgcgagccggaaataaccgaccttgcaaactgtcttgtcaaaatgggtgctaaaatttccggcatcggctcgcctcaactgataatccacggcgtaaaacatttaaacccggttgaatataccgtgataccggacagaatcgaagccggtacttttatggctgctgctgcgataactaagggaaaactgaaattaaaaaactgcagacctgaacatctgatggcagtaatcgataaactcagaagtatgaacgttgccgtcgaagaaaaccaggacggctgcgaagtttcatcgaatggccacatccagccgaccgatatcacaacgcttccttatccgggctttccgaccgacctgcaggcccagtttatggcctgtttgtgccttgcaaaaggaaacagtgtaataactgaaaaaatcttccccgacagatttatgcacattgcggaactcagcagaatggctgcaaacttaagaaaagaaggccctcacataatagtcagcggcgttgaaaaacttattgccgctccggtaatggcgtccgatttgcgcgcctcagccgctcttgtccttgcagcccttgccgcttatggccaaacaatcgtaaaccgtgtctatcacatcgacagaggctatgaaaaaatcgaagaaaaactcaacgccgtcggcgctaaaatcgaacgacagagtgtttaaactttatctgttatgactgaaagaacggatatacacaaacttgccaacggaatgacaattctgggcatcccgatgacacaggtgcagtcggctgcgtttgattttctgctgccggcaggagcctctgttgtgcctgacgactgctgcggcgcgcctgccgtaatctgtgactggattttcagaggcgcaggcggcaggacaagcagagaacttaccgatatgctcgacggccttgggctgcaccgcggcagcagcgtcgaatcaaaacatatcaatttatcagcggctctcggagcggataatcttcttaaagctgtcgagctttacgcagatataattcttaatcccgctcttaacagcgaacagtttgatttctcaagacaactcgcattacacgaactgtcaagcctccaggatgacccaatgcataaaaccatgctcctgctgcgggaacatttctatcccgacccgctgggaagaagcccgctcggctgccagaaggatttacagaacctgacagcacaaatgtgtaaacagataatttccgaaaatttcaatatctctgaaattatcttcgccattgcaggaaaatatgattttaaaagcctttgctcgtcgctcgaaaaactctttggctctgaaaaacccaaaaaaacaaaaaatataaatcccaaaaaacaatctcttgtctatcaccatcagcaatatgacggagctcaggtgcacatcggcattatgaccccgaccgtaacacctcaaagtgcggattattacaacgcaagagttgctgttgccatcctttcagacggcacgagctcaaggattttcacagaggtcagagaaaaaagaggtctttgttacgccgtcggcgcaagctatcacagccttaaggaaatggcaggtatcggctgttacgccggaacaacgccggataaggcacaacaaacctatgatgtaataataaccgaattcaaaaagcttgccgatgggctaaacgaagatgaactcaaaagagcaaaaatcggactcaaaagcagtcttataatgcaaagcgaatcgaccatagcgagagcacaggctgccgcgatggattactatatgctcggcaaagtcagaagccttgatgaaataaaacagcagatagaaaaaatcagcatccagagtgttcttaaatatctgaaaaataatacatttgaaaaattctgttctataacaataggaccggcaaagataaaaccccaataacatggaattcaaacacaaaaaacttgcaaacggcctcgacatcatcgcggaagttaataaagacgctcaatccgcagcggtaggtttctttgtcagaaccggcgcgagagatgaaaccgacaaaattaacggcacaagccattacctcgaacatatgctctttaaaggtgctgacagcctttcagcccacgatgtcaaccgctgttttgacgacctcggcgcacaatacaatgcccatactactgaggaaaacaccgtttactactctgcgacccttccccagcagctttacgaagctgtgaaactgtggtgccagcttatgcggccggcgctgcgagacgatgatttcaatatggaaaaaaacgtcatcctcgaggaaatcgctatgtacaaagacctgccggatttcgagacaagagaaaaatgcagagctctgcatttcggctcgcatccctgcggtaaaagtgttctcggctcggttgagagcgtaaaggctctgacaagcgaacagatgagagaatatttcggcagcagatacactcccaataacgtaaccgctgcagtggcaggaaacttcgactttgaaaaaatctgcgattgcatccaggctggctgcgccgactggcagcccaaatatgccgacagaaaaaaagagtatttcgcaggaactgcaaaaaaagaccaccagaaaagaaaaaatctgacctgccggcacatctgcctgatgagtccgactgtttcctatcaggaccagagaagctatgccgctgcactgcttgcaaaaatcataggtgacgatacaggctcaagattcttctggcagcttgtcgatactgccgtcgctgaaactgccaccatgcactgcgaagcaatggacggtgtgggagcatattacagctatattcgaaccgccgaagaaaacggctcaaaagtcatgcagattgttgaagatattttcaaatcgctgcaaaaggaaaaaatctccgaccccgaactccagaaagcaaaaaacaaggttctgtcgtcaattacaatcaaaaatgaaatcccaatgggaagactaatcgagctgggttttaactgggtctatctggctcagtatcggcctattgaagatgaaatacagcggattaaagaagttagcctcgatgatttgacagctttgctgcgggattttccgcttatgccgtttacgcaattttcgcttggcccggagtaacctctttggggacacgaatttacactgtttttaacttcgatattcattattcattattccatcctccgtagccggattttctcttgcaaaacaaccggctaatgatagaataatagaacaaggatggatttatgcaaaacgatagttacaacaaccggattgagcaggatattgcaagatgcaaacaggacttcttaaaggctgtcgggcagcagaacgaaccatcccagccgaaaaattcaaaatcatctccacgtgtcatgcctgtctttgaggatattttaaaaaacaaagccgcacaggcacatccgcctgttcagagcaccggctcactcgtcggggcggagcccgccgcagcccgaaaagagtttgtaagtcgaatggtcgaaaaaataagccgtccccagcagcaggaccgctcaagcgaaatgccttcgcttgacctcggcagtcagattcttgctcaacaaagaaaagtagcaggacttaaaagaaaatcccctctgcaaaacaacaattcagacggcaatttgcagcaggaagttcagcctcaaaaaatgcctgtaaattcaatgccttctgctcccgcttcgcctcaacagcttatcatcgccgacatcgtagcaagagaaatcatgtccctttctgccgcaaggtaaatcagaaaaataataaaaccgttatcccgatttatcgggattccacaatttttatttttgaattttgaatttaaaaaaacagacgccttaaaaagacgtctgtttttataatctagccccaaggggattcgaacccctgttgccgggttgaaaacccggtgtcctggaccggcctagacgatggggccgaagatataaattcaatcacccaatgcagttttcgcgattctaccgccgggcttactccatctctatcgcttcaacagggcactcgtcaacacaaacaccacagtcaacgcaagtgtcgacatctactaccgccttgccatcgaccatttttatcgcttcagccgggcaggcatcaatacacgcctcacaaccggtgcatttgtcttcatttacttttgccggcataaaaaatccctttcaaaaacaacataaatgcaacgttttacaaattacacaatttgagggggaaagaatacaaaagtcaagccaatttgacaacaaaaaattcggcaaaatccaaataaaaaataaatttagcttattcataaccctatattaacaaaggtttaaaactaaaaagtatacatacgcaatacaaagaagacaagaccagttcagttttcccgtttttccaagaagcaaaaagccaaaatagaaaacgaaataaccatccgccttcgctaaagcttcggcggacaagaaataaggatttacaacacaaatagttaataaaaaataaggacttatggcccattcgacatggttcgactacgctcaccacaggcgctcagggcaggcaaaatcgactgcataaaataaagacttacgataaaaagtaccacgaaaataaaggagttatgaacgattttctcgaaaatttgcgcaagtttttttgatatttgcgcaagttttaaaaattaggctaaaaatgggggtggttttaaccacgaattaacacgaattgacataaattacaattttttgacgacttttttcgattttttatgaatttctgtcaaaatctgcaacttgagcttgcgcgaaattgattattcgggtatttggtaccttttaaccacggattttacgaatttcgttcaaaatctgcaactacgatccccgactactcgaggacaggcttgcgcaaatttgactatgtggactattcaggtaaactttgcgatccgccgtcgcctaaggcttccgtcttcgcacattcatgctacgaacggacaagatggcgagacctccgctccgcccgcctgcggcgggtaaacttcgacccccgttttcacgagggcaggctttgcgcgaatttgcttatgtggagaaaagatagccatccggcttcgtcaagacttcgccgcgacaggcagagaaatgcgcataaaaaaggcgaagccttaaaaaggtttaccccacaggcctttttacaggcctgtggggcagagcctgcgaatttcttcttgttatgaaaagattcacaggtcgagattagttacacaatttacactataagtttttttctggacaagtcaagtattttttgtataattttcactggacaaatactcagagagaaaaatattcttatcttattagcaggaggtaagttatggcttatacactcggattggatattgggtcaaacagcatcggttgggcaatccttgacaaagaaaaacaacgattgattgatagtggagtccgcgtttttccagaaggcgtggatagggacacaaaagggctggagaaatcaaaaaacgctacacgccgagaggcaagaggcgcaagacgaacccaccaaagacgaaatcaaagaaaacaacaacttttaaaaacattgcagactgcggggctgctaccacaaaatgaacctgaattgatgtcccttctccacaacaatccatacgaactgcgaaaaaaagtattagatgaaaagcttgaaccttataaatttggcagagtgctttatcatttaagccagcgcagaggttttaaaagcaaccgcaagagcagcaaggcaaaagaagacagcaaaattgtgaaagaagcaggcgaactgcaaaaacaaatagagcaggcaaattgccgaactatcggagaattttttgccggtctgaatcctgatgagcagcgaataagaaaccgctacacattcagaagtatgtatgaaaaagaatttgatttgctatgggcaaaacaatccgaatattactctcaagtactcactgaaaacctccgaaaaaaaatacgtgacgagattatatttttccaaagaccactaaaacctacagatgaactaatcggagattgtgaacttgagccgggtgaaaaacgctgtccgcgagccgactggtttgccagaaaattcagaattctgcaggatgttaataatttgaggattcaaaactccgatggttcggaaagtaaattaaccgcagaacagagaaatctcgttctggatgaactcggtaaaaagaaggagttaaaatttgatgatattcgcaaaaaattaaatctgatggagacacagttatttaatcttgagcaggacggaaaagtagcctcgataaaaggcgatgtctttgcagcagcaatgagaagtaaaaacgtttttggctccaaagtgtgggatgcgatggacgagcaagagaaaataaaacttaacgatgctttcgtagagcttgaggacgaccagcttgccgaaaaactcaaaactcaatacggtttgaatgaaaaccagattgaaattgctatgaaagtatctctgccgcagagatatatgagtttttcgcgcaaggcaatcctaaaacttttaccgttcatggaacagggttgcttaacttccgaggcaattgaaagggccggttacgacagagacaaaaacacaagcggtgaaacagccaataaattgccattgccgccggatttgagaaatccgattgtgcaaaaggctttgtttgaggttcgcaagctggtaaatgctgttattcgtgagcatggcaaaccaaaaaatatagccatcgaaatggcaagggatgtgcagggcaatcgcagacagcgagaagaattgcactggaaaatgctggaaaacgaacagagaaataaagaagtaaggggaaaattaatagccgatatggaaataataaggccgagccgcgatgatgttataaaatataagctgtgggaagaatgcggcagaaaatgcccatataccggcagaagtatttcacaaacagctttgtttggtcttaatcctgaatttcaagtcgagcatattttaccttatgaccgttcgttggatgatagttatatgaacaaaacgctttgcgaagttcacgagaatattcacgtcaaaaaaggtcaaacaccttatgaagcgtatagtcataatcctgaaaaatacgaacagattaaacaaaatgtaagggttttaccctggccgaaacggcaaaaatttctgcaaaaagaaatagacctcgaccagcatattgccagagagcttaacgacacaagatatatatgcagagagacaataagttatcttaagcagcttggggtttatgtacgaggcactagaggaaaaaccacagcggagttgcggcaccagtgggggcttgacggaatttttgacgaacttaacacaagacgagacaatgaccaccgcagacacgctgttgacgcagccgtagtggcggttacggaaaacgagcatttgcgccgccttgcaaaaagcaagtatgcggtttcaggagttgcttttgagccgccttggccgaatttcagagaagagataagagagaacgtaaaacagataaatgtatctcaccgtgtccagcgaaaagtttcaggaaagcttcacgaagaaaccgcttatggcccgactggcaaaaaagatgagaatggacaagatatttttgtttaccgtaaaaaacttgaggatttaaccgtcccaatggtcgaaaaaatcgttgaccctactgtccgaaaaattgttaaagatcggcttgccgaaaaaggcataaataccgccagtgtggaaagaaaaattgccaaagaagtctgggctgaacctctgtatatgaaaaccaaaaaaagcgacaaaaaagttttgataaaaaaggttagaattgaaaatgtcgccaataatgcgatagaaatgaaagataaattcggcagggtttatcgtgttgtagaaccgggcaataatcatcatatcgaaatttttgaatataccgataagaaaggtgaaaccaaaagggacagcagagttattacaatgttcgatgcggtgcaaagaagccggcaaggaaagcctgtcgtttgtaaagattacggcgatggtagaaaatttatctgctcattagtaattaacgatttagttatgatgaaaaacaaaactggcgaaatagatatttacagagttcaaaaaatggacgtaaataagatggttcgattccgctatcatacagcatcaacaattgagaagaaagaaacttacatagataaaactgcacatctttttgaaggttacaaagtaacggttgatttgcttggcagggtatatccggcgaatgattaaaaaaatagttgagatatcacgggaaaggacatctctatcaataaaatacgggcagttgataatcaaacaagacggtcaagggacaaattcaataccctgtgaagatataggcgttcttttagtcgataaccaagcgacgaattatactcactgcgtttttacagaattattaaaatgcggcgcggccgtggtgctttgcgacagtagtcatttaccagccgggatgcttttgccaatagaagcaaacacaatccagaccgaaagatacgcaaaacagataaacgcaaaagagccgctcaaaaagaaactctggcagcagatagtccgggcaaaaatcagacatcaggcaaagcttattaaagacgaaacgcaaacttacaaagcattaacagcattgataagtcaggttcgcagcggcgacccttctaatgtcgaggcgcgggcaagtaaactgttctggagggcatacattcagggaatggaatttaggcgcgatgcggaagggaagccgccaaataatttattgaactatggttatatggtgatgcgggcggcggtggcaagggcgatttgcagcgcagggcttttgccttctgtcggacttcatcatcgaaacaaatataacgcgttttgtcttgctgacgatttggttgaacctttcagaggatttgtcgaggcaaaggtaagagagattatccaaagcggcgaagattatgaggaattaacgcaagcgataaaggcaagattgcttgaggtgctttatgaagaagttgaaatatcggattacaaaggccccttaatggtagggcttcaccggacagcggcgtcgctgcaaaggtgctttgcaggggagcaaaaagaaatagatttgccggtaatatgataataagcgggtatagggcggtgtggatatttgcgatgtttgatttgccgacggatacggaaaaggcgcgaaaagattatacgcattttagaaaaaatcttttaaaagacggctttgctatgatacaatactcggtgtatgcaaggcactgtgcaagtgaggaaaatgccgatgttcattacaagagaatacagaattttctccctcctgacggggaagttagactggctacgattacggataagcagtttgaaaaaatgcagattttctggggaaaaatgcgaaaaccgacgcccccggcacccaaacagctcgaattattttaggctgtttggtccgcaagtccttacaattgctcaggttgtggaaaaggcagtgtaactaatcccgacctgatgtcaattcacaaccgagcacctcatcagtcaaatcgccgtattagtgtaactaatcccgacctgatgtcaattcacaactattcgctactgttatatagtatttggttgagtgtaactaatcccgacctgatgtcaattcacaacccgccaatgagcctgtccagtccgttttcaagtgtaactaatcccgacctgatgtcaattcacaacgaatcagataccgtactctatcctgtacccagtgtaactaatcccgacctgatgtcaattcacaacgctttgtaagctatcaatcgcttgttaaatagtgtaactaatcccgacctgatgtcaattcacaacactacgagcataagattcacgccggcggaaagtgtaactaatcccgacctgatgtcaattcacaacttctacaggcaaagtgacgggtgaaagctaagtgtaactaatcccgacctgatgtcaattcacaacttcaaccggcaaagtaacgggcataaatcaagtgtaactaatcccgacctgatgtcaattcacaactatagccggcgttggagggctttgtggaatagtgtaactaatcccgacctgatgtcaattcacaaccatcggtcgagtgggagaacaaactcaataagtgtaactaatcccgacctgatgtcaattcacaacataaccgccggtagataatcgcgtaattacagtgtaactaatcccgacctgatgtcaattcacaactcggccgtcagtttgattactttattgcggagtgtaactaatcccgacctgatgtcaattcacaacgcatcagataccgctgttaaaatctcagccagtgtaactaatcccgacctgatgtcaattcacaacgtgcaagccttcgttaaaatgccgtaagttagtgtaactaatcccgacctgatgtcaattcacaacatattatcaccggacatgtggagtaaatgtagtgtaactaatcccgacctgatgtcaattcacaactgataagtgcagtcagttccgccgtgatatagtgtaactaatcccgacctgatgtcaattcacaacgttgtgtgacctttccggtcatcgcatctgagtgtaactaatcccgacctgatgtcaattcacaacacaccgtttgtatgcaccgctccattgacaagtgtaactaatcccgacctgatgtcaattcacaacgcatatgaacactgggacgggggggcgccgaaagcaaaggcaacaattcgtcatgcgtcatgtgtagtgcactaaaaaattgccacagggaaaatcaatccgcagaaggcggattaggcggattgatatcgttggtgtcggttctttcggtgttactcaagacaggggcaacactacctgaaaggagcgcagccaatttccgaacctgcggctgcgggtcgtttttggccgtccagcttaaaacaggcttaaacttttcatcctgagttctggcaagagcaaaaacagccattaatcttacaggccagttgggattatttaattccgccgatactgcttctgtcagccggtaatccagtttcagccttaacattgcagcgattgtctgcacctttaaaatccagtcatcttcagccagacacctggcaagcgccgaacttaataactgcggctccgcatacaggaacctgtaagcagggccggtttgtctgaacttctgctgttcggcaagtaatcctgcaaaaagctgggcggattttgtcttctgaccctgatgccctttcttcagcgcatcaagcctctgctgcagatagcgggtgctgatatcaagtttgcgacgacttagaatcacctgtgcaggttttattgcaagtgcgtttcttatccggccgtccgcagttacctgcgggtcaacgtaggccgtatattcaaggttcagttccgcctgcgggtgacagtcaagaatacattttatcctgccggtatcgagccgcagcggaataaacaacgcatcgcccggcctgatttcataagacggacggacagttttaacaataagagccggcatctgctcggtcaaatcgccggctatcttcgcatcgattcttatattgccttttatcatcgcatcggggcatacgaccatcggctccgaataattatttattatcgcaagattgcctgtgatttcacttccgtaagaaaacgcagaaccttttaccttgaactccagcgataccatcttctcaggttcaataaactgactgaaaaacgtctgcccaaaatcactctgcagtgccgttataaacgctgcggaatcaatcacaggttcatattcagagccgagctctttaagttttgcttttgccttttgtgcctcaaaacttcccggcagggtatcaaccaccttcttaagcaggtccgctgctgaatttgcatcttccttttgcataagaaccatcgccttggcaagtcccgctgcctgtgtcgtggtaccgactttttccagcagcggcccggcaagttcgctctgttcgcttattataagtgcataagcaaaaagcgaagcagcactgaccgaattcggctcggcatcataggccttcgtcgcccaggtcagaacctcctcggaattgacgccggctaaaaaagcgaaaaaccatgcgaaatcctcaagctccgatgcagagaccttctgcctgccggcaagaatttcacctgcacgtgcttctatcctatcgagtatcgctttctgattctgcttgtcatcgctctgcaaagctgctgccgaagcaattgcttcgacctgtacatcaaagatacctttgttgcgaagctgctcaagtatctggcgacactggctgtactgccgggcgttataacagttaagaatccacggcctgtaaatgtccagtcctacagatttctgtttgttaagatacctgaataaatccacacagtatcggtatgccgccgaagcaggctcataaagtccgagtatttctacatattgcgcaaatctcaaggcagagtcaaaatcaagcgggttggcccttactgcgaaacggagattctgaagatagacaatgtcaggcagcggttgtccccctgcctcggcaagctcggcaagcttggcaaaggcaagacggttgtatttgttcgctgaaaaagcccgcgcaagatatctttgagccttggcagcatcggcagtttcagccaccagaagcccaagctgtgccgagaggtctgatgcaaacatgacatttttctgctggaactgataagtcagcttcgtcagcagctcttctcgctcctctctgctgtcgagtctttcaagcagataccctaccgcctttgacgcaacttcaaggtctgttgagcggtcgatatattcattaagcgccagtttaacagcatctgaaaaattctcttcgggatattgccatgcaatatcaataatatcagccagaacataatttgccctgctgtcgagattaaccgcggcatcgaaaaatataatcgcctgcctcgctgaaagaaaattagcatctttggctgtataaagctcatagccgacatcataaaaagtttttgccgtcagaggagaaagcaattcttcctgcccggcaactgtaccggtgccgacaatcgtattaatctcggcatccgcctcggccctggcagccgtatcagtcctggcaactgtatcaaccttagcagccgtattaacgtcggcaacaatattagcctcggcaactgcattagcctcgacggctgcaccagcagcggaaaaaattataagaataaacaaaatcagaatttctgcttttttactaaacatttccaaatctatttaaagtgtcccttaatccttatatcggctataactgtttataaatgaagtatttatgcaacaaagacaactgtcgaaaacacatttgtcccccattaggtttaacttgttttattttaacaacttacggcccgttatgagcgaaagcatctcgattttcatcactgccgctccaacaagatacacccccgtagccgttatgactacaatcagtatttgaataagctgcggcaaataaccggcaagtttcattacaagaagggcaacaaaggacataataaccgtgttgattacggtttttgtaaattcagccgcaaaaccgtcaaacagtcgtcttccgaatttttttacaaggccttttaaaagtatcgcaacctgaagatatgaacacaaacttgtcgaaagcgcaaggcctgcggtgcccatcggccaaatcagcacaaggttaagtatcaaatttaatactaccgctgtcagagttgttcgcatcggcttgcgcgagtcctgcgttgaataatacgccttcgagcaaatctgctgcagaaaaaagccggtcagacctaaagtataacatacaagcacagatgccgtaagaatagtatcttcggaagtaaatctgccatgttcgaaaaaaacttttatcagcggctttcgaatcataatcaggccgaccattgacggaaaagccacaaatatcgcgctcctgatgcttttcgatatcgttgcacaaagcgctgccgtgtcctttctggcggcatctgcgctcataacaggaaaaacgactgtagctaaacttatcccgaacacgccgaacggaagttgatacagtctttgagcataaaacagctgtgagaccgctcccgcccgcataggatacgcaatttctctgcctaaaaagaaaaaactcagacctttttcagcagaactcgagaaccacagggcaatgaatttatccatcagaatatttatctgcgtggcggtaagaccgagaatcatcggagccataagaaataaaacccttttaaatgcctcggactttacctgccaggcaggtttgatatgaacgcctatgattttaagaggcacgaactgcgtgaaaagctgcaaaaacccggaaacaacaaccgaacaggcaagaaaataggcttgtccgtcaggactaaatgtcataacccagccgccaaaaaacaatgaggcgaccataacaacattcgggattatcggcgcaaaggcaggcgcaaaaaaatgccgatgcgaattaagcactccgcccgctatcgcctcgagacataccagaatcatataaggcagcattattccggtaagcgacagcttaagcgcggtagcggacatcggcgaaaagaaactgaaccagacccagacgaaaatttcgccggccagaacaatgcaggaaagtattgcaaaaacaaccgtcattgccgttgaagcaagctgctcggccgatttgccgtctttggaaagctcctgactataaacgggaataagcgaactcgaagcagcgccttcgccgaagagactgcgggcaagattaggtattgtaaaagcgattacccagctatccatcagctctgttgcgccgaaaaagaacgcaaatgtcatttctcgcagcaaacctgttatgcgacttattatcgtaagtaaaactgtctgtctgaatcccttaaacataatcagaaagtttataatcctattacatcaattttgcaacgatataacacgatgagtttagcctccgccacttggggcggggtttttggccgccgccagcggcggccgctaaatattatccttctgccccgcaacggccaacacaaacgcaaaaaccttgttcgcccctgcctctttcaaggtcttcgcacattcattcagtgttgctccggtcgttttgacgtcatcaacaagacagatatttttgcctctgaagttgtgattttttcttacagcaaacgcccctttaacgttttttctccttgccgttgctgtaagagaggtctgttcttccgtatggcggatgcaaacaaggtctgtgttgaacctggcgtcgccaaagtttaaatctttggcaattaacgcagactgattgaaaccacgctgaaatctctttcgccagtgcagcggcaccggcacaacataatccacagagtcggaaaaatccgagcgaagaatcgcatcccgtgcaagattcaaaagcggttcgagaagatacgtgcggtcagacaatttaaatttaataatcaggttccttaacggttcccgataaacgcctgcacaggcaatcgaatcaaaatcgagattttgcccgcgacagtcggcacaaccgcccggcagccgggcaaaaacgcttaactccttgccgcagcggaaacagtacgaatcaacaatgcaaaactggaggttttgccagcagtcggagcagaaatattcgtcatcttcacaaatagcggcatcgcagcagcggcagtaattccgccaggcaatctgcc

SEQ ID NO: 4528 - DNA, 18687 bp, synthetic construct
  misc_feature 1..18687: note = Synthetic
  source 1..18687: mol_type = other DNA
gtggatatgcagcgtgacgcatacagcgccaggtggaagaagacgataacgacgttacattggagcagaagcggtgaaaaccgaaaagcaggatagaacagtgctctgtaatgctgctacagtctccctttttcaatccttaaatattgtgacaagtataccaataacacttattagtgcgtcaggaaactgttggcggtcacattcgagaaaacaaccggcgtcggcaccatggcccgggtatagaccttggccagggggctgaatgcagtatcgtctccgtcgccattgcgggcctgggcccggaaggtgtattgcgtgttgggcaacaggccatcgcttgtccagaaggcgttctgctgctgccaagtggatacccggccggcggtgacgttttccagcttcaggccggactggcctcgattcaggcccgaaagtgcgttgcccgatttgacctggatgctgctggtggtaatctcgccgaaggccacgccggccggcgcttcaatcgccgaatacgcgtaccgaacggttgagtatgctgtttcgttgccgaggccgtcgcgcgccttgacgcggtagccgtactgatggttgggattcaaacctacgtccgtgtaagacgggctgaactgccagggcgaatccgagccgccggccccgcccgtcgggctggagatgaaatcgaagacgtattcctccggtcccgacacgtctcgtgctatgtcggccatcatgatgatcgacgaggtatcgagctgatcgggatcgaacgaccataccaccgggtgaggaatgggagggacagtctcggccagtgtgacgaaactgcccgtgcgcccggagctgctttcctcggagttctccgcctcgacgttatagaaatagagggtttcaggaatcagcccggcgatcttttggctgaacaccgctccgctggactgattctcgatccattcggtctgccagtggcgctgcccgtacttccaatagacgaatctgcacttgcagtcgtcacccccgtcgtcggtcaggattccgcgcagtgtcaccgtggtctccgtggcctcggccgagctggtgactaccgtaggggagctgatatccgggttgtcgtccggggccggctccttttcatccggcgtactgatcttggagatagacgaagcctccacccggcggcaataaggtatcgggcaggccccgtcggagtacgtgcccctgacctcgacgtaggtaccggagaccaggtcctcggacctgtcgtaacagatatcgaccgatgtcacattgtccagaacaccggccggatcggaaatgacgtttatgatcgagacttcgaccgtgtattgaccggcgcacaccgggaaaatctcgcggtgctccgctgtatccacatacgcctggaattcgacctcgcccgtgccccaacccgtggtttggccgggcacagcgcccagcagagccagaacgattgcatagacggacattgcagacatagtacacccacctcctcactcggtttgtagtgacgccgtgaggcgtttctttcaatgccctgacgggcacactacaaactgaatccactgtaactatatcatcctgaaaagcggcctcctcgcgtggcatccaagccggcactgattgaacattgcatgaacccagctaatatgccgcggcaggtcccccgtgtcaagtgaaatcaggcccattttggccgttttggcatggcacaggccaatttagcggattttgggcttgcaaagcaggccctggggttttatactcctttttgaagaaatgcaaaaatcaaaatgcaaaacgtaaaattaaggaagtcgccccggctcgccgggactccgcaattttgatttctgatatttcgtatttgatttttccttgaagaatcgggtcatgtttgagtcattgacagagaaattgaattcggtctttcggtcgctttccggccgggggcggattaccgaagcgaacatctccgacgccatgcgggacgtccgcaaagcgctgctggaggccgacgtcaactacaacgtcgtcaaaaaattctgtaaggacgtcacgcaggccgccctcggcgccgaggttatcaagagccttcatccgggccaggtcatggtcaagattgtcagcgatgagctgacccggctgatgggtccggtcgatacgcgcatctattacgtctcacccggcccgacggtcatcctgttagccggtctgcagggctgcggcaagaccaccaccgccgccaagctcggcaagtacatcctcgccggcggcaaaaaaccgctgctggtcgccgacgacctgcaacggccggccgctgtcgagcagttgattatcctgggccagcagaccagcatcgacgtttatagtgaagacagcaagaacccggtcgcggtcgcaaagaacgccctcgagcacgcccgcgcgaacaattacgacgtggtcatcctcgataccgccggccggctgcacatcgaccaggacatgatgaatgaagtcgccgacgtggccaaagcggtcacgccgcaccagatttacctggtctgcgacgcgatgaccggccaggacgccgtcaactcggccaaagaattcaacgaacggctcgagctggacggcgtcatcctgaccaagctcgacggcgacgcacgcggcggagcggccctcagcgtcaaagccgtcacgggaaaacccatcaagttcatcggcgtcggcgagaagctcgacaagctcgaagagttccaccccgaccggatggccggccggatcttaggcatgggcgacgttgtcagtctcgtcgaaaaggcccaggagcagttcaaccaggaagaggccctgaagatgcagcagaagatggccaagggcagcttcggcttcgacgatttcctcaagcagatgcaggcggtcaagaagatgggcggcatcaaagacatgctcaagctgatgccgggcatgggaggccagatcgacgacctggacctcgacggcgccgagatggggcaaatggaagccatcgtgcagtcgatgacgcttcaggagaggcgcgacccggacctgatcgaatcatccagacgaaagcggattgccgccggggccggggtcgaggtgcacgacgtctccggcctggtcaagaccttcacacgcagcagagacatgctcaaggcgctgagcggcggcagcctcggcgggctgcggagcctgctctccggcggcctcaacatgggcgccctgggccagatgatgtccagcggcaaaaaaatcaagcagcgatccagaagaaagaaaatcgtcaagcgaagaggcaaaataaaaagacaataacgggtgtgcgtttggcccccgggctcgtcctggggcagcacagtataatgacaggtatgacgaaaatttcgattgagcagtatctggagaaggtggcgcggttctcggccagcgaatacggcaagctgatcagaacccagttcgaggacgtccttggcgacagcgagctggcgatgctggcggcgcccagccccgatgagctggagcagttgagaagggccgtggcgattatgacgccggccgagaaagagaacgccgatacgctcgcggatgagcagatcgaacgactggccgccgatgctaaagtcgatcccgccaacctggccatctttatgaacggctatgccctccactgcaaacgtgttccgtgatcgacaggtgattcagacaggatgacaggattaacaagattaccgggatgaattaacaagttcatcctgttatcctgtcaaagaagtaaacgtgttccgtgacgtgcgttgtgtttgtcacgggaattgatgatagtcataagaaaggaagagaaacatgtcagtaaaattgagaatgacgaggatgggaaggcggcatcggccgttcttccgcatcaacgccgtcgaatcgcgtacgccgcgcgacggcaaaatacttgaaaagctgggacactacgacccgatagagaaagaccccgccaagcagatcgtgctggacaaagagcggacgcagtactggctggataaaggcgccataccgagcgacacggtctcgcaaatcctgcttcgccatgggatcaagcacaaatacgccgaacaacaagccgcccgccggacaaaagccaaggtcgtggcgaaagccaagggcaaattcttcaccaaggctcaggccgtagccgcccagaagcaggccgacgcaaaagcggccgaggaaaaggccaaagcagacgccgaagcgaaggccaaagcggaagcggatgccaaggtcaaggccgaagccaaagcagcggaggaaaaggccaaagctgaagcgaaagcggcagaagaaaaagccaaggcgcaagccgaggccaaagccgccgagcagaaaacggagagcgaaaccaagcaggagccggcttcgagctaaatagacggcaagaacgatgagagttgacgttcttacgctgttcccccaggcctttgaatcgcctttgagctgttcgatattgaagagggcccaggacaaggggctgctcgaaatcgtgctgaccgacatccgggatttcgccgaggacagctacagaaaagtcgatgacaagccctacggaggcgggccgggtatggtgatgatgcccggcccggtcttcgcatgttttgagcacgttcaaagcctctcgccccggaagggccgggtcattctgctgacaccccagggacagaaattcgatcaggcgaaggcccgcgagctcagcagcgaggaacgtctgattcttatcgccggcaggtatgagggattcgacgagcgcattcgcatgggcctaggcaccgagcaaatctcgatcggcgattacatcctgagcggcggcgagctggccgcgatggtcatcatcgacgccgtggtcaggctgctggccggcgcgctgggcgacgataactcggccaaggacgaatccttcagcgagggtctcctggagtacccgcactataccaggcccgaggtctttcgcgggatgaaggttcctgagattttattgagtggcgaccatggcaaaatcgccgagtggcgacgccggcaggccctcgaacgaaccatagaatggcggcccgatctgctcgacgcagacgatccaagactgcgaaacaagtgatgacagcgtcctgttcgacaagctcatggccgaggacggccccacaatgatcgactcagtaaatcctgcaaatcccgtctgaaagtagtttgcattagccacagagggcacagagcgtgtattttgcggctaactgagcaattaaccaacgagccaagaccccatttctgccccaaaatcgcggatttgaaaaaaattctgcaaatttctgaaaaaatcgcaaaaaaagtgtcaacatttcgagggtctcatacgccttgcttatagtacaggatataatcgtgaatgccggacaggacaaaaaagactatggtttccgagtgctcaagagaaaggtttaccccattgggcattttcgcaaatgcccaatggggcagtgcctgcgagatttcttgcgaaatcttacttgttatgacaagcacgcagacacggatcagttacaatacggtgaaaatagcatgtagtggagcattttgtcaagcataaagcgtaattttttggagaggaaatcatgggctcatacacactcggattggatattggctccaatagcatcggctgggcattgttccagacacatccgaaaccaagcatcattgatattggcgtgagggtcttcccggaaggggtggatcgagataccaagggtttagaaaagtcgaaaaatgccacaagaagagaggcaagaggtgcgcgacgaacacaccagagacgtaaccaacgaaaggaacaattgaaaagtaccctgcaaactgtattgcttctgccgagcgatgactcggtattgaggtcactgtttcaggccagcccttaccaattgcgaagaaagggtttggatgagaagcttgaaccttatgaatttggaagagtcctctatcatctgagccaacgtagaggcttcaagagcaacaggaaaagcggcaaagcaaaagaagacggtgttgttataaaaggcgcgaacactttgcagatggaaatggacaacaagaagtgccgcacgataggcgagtatttcgccggcctggatcccgatgagcagcgcataaggggaaagtacacgttccggtcgatgtatgaacgtgagttcgatttcttatgggcgaaacaggcgcaattctatccggatattttgactgacgacctgcgaggcaaggtgcgggatcacatcattttctatcagcgaccgatgcgatgggaccctgacaggatcggcgggtgcgagttggagccgggagagaaacgctgtccgagaggggactggcatgcacgccgatttcggctgctgcaggatgttaataacctgattctccaagatgcggacggcactgaacgtaagctctccagcgaccagcgaaagataatcctcgatgagttaagccaaaaggagaagctgactttcgacaagattcgcgaaaagctcgagctaatggaaactcagaaattcaacgcagaatacaagataagcaggagcggcaaaaccgtcgaatcaatgaaaggggatgttcttgtcgctgcgatgagaggcaagaatgtcttcgggcctaaaaaatgggatgccctggatgagcaggagaagatgaggttaaacgagtggcttgtggagcttgaggatgatcagcttagagaaaagctgcgaagcgaatatagccttgataataagcagatagaagctgtcctgagaataccgttaccgcgggggtatatgagcttctcccggatggcgattgtaaagctgcttgagtatatggagcaaggggccatcacaagtgaggcgatagctgtcgcgtatcgtgacaggcaagcatccgctcaagaaagcgagagcctcaataaactgccgctgcctcatgatttgcggaacccgattgtgaacaaggcactatttgaggtccgcaaggttgttaatgcgattgtgcgcgagtatggcaagccggcaaaagtaaaaatagagatggcaagggatgttcaaggaagcagccgccagcgcgaggagatgcactggaagatattggagaacgaaaagagaaatgaggatgctcgcaaacggcttagagaagacatagggataaccaggccgactcgcgacgatgttatcaagtacaagctgtgggaagagtgtgggcacacttgcccctacacggggaaacatatctctcaggaggcgctcttcgggccgaatccggaattccaggtggagcatattctgccctacgaccgcagcttggatgatagttttatgaacaagactctttgtgaggttcacgagaatatacacgtcaagaagaaccagacgccatacgaggcgtatagccacgaccccgagagatatgaacaggtaaagcagaacataaaggcattgccgtggccgaagcagaagaaattcctgcagaaagagatagaccttgaccagcacatcagcagagagctcaacgacaccagatatgtctgtagacaggttacacagtacatgaaacaactgggcgcccacgtgagcgggacaagaggcaagataacaaatgagcttcgccatcaatggggccttgacggcatttttgacgaattgggcacaagacgcgatgacgaccaccgccgccacgcggttgatgcagttgtggtggcagttaccgagaaccatcatttgcgaaaattagcggtaagcaagtactcggttacaggtccgtcatttgagccgccctgggtgaatttcagagatcaagtcagagaaaaagtaaagcccctcaaagtgtcgcaccgcgttcaacggaaggtatcgggaaggctgcacgaagaaacggcttacgggccaacaggccggaccgacgctaaaggccaggagtattttgtgtatcgcaaagctctggaggatttgactgtaacgatggtcggcaagatcgttgaccctgtggttcgcgatattgtcaaggaacgactccgacagcaaaacatcgagcctgatgccggaaacagaaaaatcccgaaggaagtgtggagtgagccattgtatatgagacagaccaaatctgataaaaaggtgcggattaagaaagtgaggattcaagacgtcaggaacccaaagaacatggttcccctcagtggcaaagacggcaacccatactgcgctgtcgatccagggaacaatcatcatattgagatatttgaatgcatagacacaaaaggcagaaccaaacaggacgcagtagttgttacgatgcttgaagcggttcgacgaagtcggatggccgagccggtgattcaaaggaatcatgggcccgacaggagattcctatgttctttggcgataaatgagatgttcatgctcaaactggacgatggaaccgaggtgcttcatagagttcagaaaatagaccagaataaacgcgtaatcctcagaccgcatacacacggcgggaagttgagcgattccgactcaccgccgctgatacaacgcaagagtgcgagcaccctggtaggctacaaggtaacggttgatcccctgggtcgcatttggccggccaatgactgattttggaggttgatatttcaacaagtgccccttcggttttgccgatagtagaatatagacacgccacccgcggcagaaccgagagggcaccatgatcaagcggattgtcgagatatcgtcggcaaggacgcggctatcaatcaagtacggccagttgatcatcaaggacgacagcgaacaggtctcaagcattccctgcgaagacatcggcgtcttgttagtcgatcaccagggaacgtgctacacgcattgcgttttcaccgagcttctgcggtgcggcgcggcggtcgtactgtgcgccggcaatcatcacccggcggggatgcttttacccatcgaaagcaacaccgttcaaaccgagaggtttcgcgggcaaatcgaagcgaaagagccggtcaaaaagaagctctggaagcaaatcgtccaagccaagatcaaacaccaggcgaagctggccggcaaagatagcgacgtttataaatccttaatggcgctgcgggaccgcgttcgatcaggtgacacgcagaatatcgaggcgcaggccagtaagaaattctggtccgtctatttgccggaggtcgcgtttcgcagagacgttaacggcccgccacccaacaacatgctcaactacggctacatggttatgcgcgcagccgtagcgcgatcgctgtgctctgccgggctgctgccttcattggggattcatcatcgaaaccgctacaacgcattctgcttggccgacgatttggtcgagccgttcagaggcttcgtggaggccaaggtcagagatgttttcttcggcagcggcccgatggatgacctcgatcaacccaccaaagccaagctgctggaggttttgcacgagcccgttacgatagcgggatttaacggcccgctgctggtcggcctgcatcgaaccgcggcgtcgctgcaacgctgcttcgccagcgagcagaaagagatcgatttacctgagatatagaccccgattaacacagatttacgctgaatactgtaatggacattagcgggtatagagccgtgtggatttttgccatgttcgacctgccgacggataccaagaaggcaaggaaggactacacgtattttcgcaaaaatctcttgaaagacggcttcactatgttacaatattcggtgtatgttaggcactctgcgagtgaggaaaacgctgatgttcactatggccggatcaagaattttttgcctcccgacggtgaagtgcggcttattaccattaccgataagcagtttggccggatgcacactttttgggggaaaatgcgaaaacccgcccctccagcccctcgacagctcgaattattttagcaaatttagcccgcaagcccttgaaaacaaagggcttgcgggccaagcattgtaactgatccgtgcctgagtgcaagccacaactcgtttgggcctacggttgtgaatcacaagattgtaactgatccgtgcctgagtgcaagccacaacctcaaacaaagtggggcagggattatcgtattgtaactgatccgtgcctgagtgcaagccacaacacagacggcttggaaacgatagccgaaattattgtaactgatccgtgcctgagtgcaagccacaacatatggccgtcgcggcgacgcaaacggccaattgtaactgatccgtgcctgagtgcaagccacaaccaggaaacgagtataggccttttggccagcattgtaactgatccgtgcctgagtgcaagccacaaccctgactcagcaaggcaagattgtggaccgattgtaactgatccgtgcctgagtgcaagccacaaccttcgagatatgcattgagtgcctggagcggattgtaactgatccgtgcctgagtgcaagccacaaccggcttggatcgggcctgggcgttcgttatattgtaactgatccgtgcctgagtgcaagccacaaccgcttcttggccgggaagtcacctgggttcattgtaactgatccgtgcctgagtgcaagccacaacacgtgcccgaaagcacgcaagtaccgcgtcattgtaactgatccgtgcctgagtgcaagccacaacagaccgtcgctgggtctgccacggcggactattgtaactgatccgtgcctgagtgcaagccacaacccacgaaggggcgctgaacacgaattgcaaattgtaactgatccgtgccttagtgcaagccacaacaggccataaagggccaaaaggacgccaaaattgtaactgatccgtgcctgagtgcaagccacaaccttaccgacggccgtagcgataaagcccccattgtaactgatccgtgcctgagtgcaagccacaacccacacttgaagcgtcttctggaccctgagattgtaactgatccgtgcctgagtgcaagccacaaccaatggccggcgggtgaacgatgacaatcccgtagtccagtattctcagaccgtcggttcgttgaagaacgcgattggaggaatgtcggccatggttttgaggccgggggccgcctgaagaatcgacctgacggtgttcagcgcaaagctggtgaggtttgaggatttcagggcgtgacggctgggggcacgaccaccatccatttgaagacgtaggcttggagcatgacgagaacgcccatgagcgtggcgagcgccaggctgtgccagaacaccacgcgcaggatcgagcctgcatcggggctgtccggctttccgcccgtggcgacgctggcgacgacgatgctttgtgcgtcgatcatcttgcccatgacgcctcccgcactgttggccgcggcggtcagaatgggcgagacgccaatttgttgcgcggtgaccttctgtaaattgccgaagagcacgttggatgaggtgtcgctgccggtcagggcgacgcccaaccaaccgagcagcggagagaagaaaggaaacagaaagcccgtcgaagcaaacgccagccccatggtcgtgtccgtgccgctgtaacgtgtggtgaatccgagcgcgagcatcagcgcgatggtcagcagcgacgtgcggacgcgcaagatcgtgcgaccataaagccggacgagtccgcggggcttgatgcccaggaacaagccggcgaggacgccagccacgagcagcgccgtaccggtggccgagagcagattgaacgtgaactgcgcggcctcgggttcgggcttggcgaccaccggcggcatcttttgcaccgcctggtgcaaagcggggacggacaacttcggtgcgaagatctcgtttagcgcgttcttgacgggcacaaaactcacgccggccacgaagaccgtcagcaggatccaaggcagccaggcgcgccagttctcgcgggtgcgggacaccgctgccggcgcgctcgaatcgggagcggcttccgcgtggccgggatgggtatgtatttcccgaggtctccagaagcgcatcaaggtgatcagtgccccaatggcgctcaagccggcgacggcatccaccaggtaggggccgtgatagttgctcatgaggaattgtaccagcgcaaaactggcgcccgtgacgaaacaggcgggccacacgcccatcatccctcgccagccggcttgggccgccacgagccagaacgggacgagcagcgagaagaacggcaactgccgccccaccatcatgctcagagcgctttcatccaaaccggtcaccttggccagcgtgatgatcgggatgccgaccgagccgaacgccaccggcgcggtgttgccaatgagcgcgagcttcgcggcttccagcgggcgaaagcccagcccgatcatcagcgcgccagtgatggccacaggcgccccaaaacccgcgaacccttcgatgaacgcgccgaagctgaaggcgatcatcagcgcctggatgcggcggtcgttcgataggcccgacatgcggtcttgcagcactttgaacccacccgtctcgacgctgagactgtagatgaagatcgcgttcagcacgatccagccgatgggaaacagtccgaacgcggcgccgtaccctgcggacgccagcgtcagtttcgcgggcatgccgtaaacgccgatggcgatacctgccgccgccagcagccccaccagcgccgcgaggtgcgcacggacgtgccagaaggccagcagcgccagcaaagtgaccaccggcaccgcggccaccagcgctgatagaccgatgctgtcaaccaggggactgtagttctgcgaccacgtcacagggtactcctgtttgattgggtttcgaattcatagccgtattgtagggacaagccggcggaaaggcaaacggaatcgaaccggtcagagcttgtggtcgcccaaaaagatattcagcagatattcaggacagccaccgacttctttcatagtccaggatggtcagacggtcggttcgttgaagaacgcgattggaggaatgtcggccatggttttgaggccgggggccgcctgaagaatcgacctgacggtgttcagcgcaatcgcacacgtggcgacgtcgccgttgacgccgccggcgattcgggactgaatcgggggttcgccgtcgatgtgcacctggtcgtaggattcgggctcgccgaccgccgccgtgaaattcagggtaatgacctccctgtcgccgacgaagccccggccgacctgatgcacgcctcgggccatgcctttggcaatcggtttgtatccgctgtcgatttgactttcggcaatgaccggatcgagcgtttcgacgcggcgatcgagcttccagccgagcctgtgggcgataaagtccgccgattcgagcagaccgacgtgccggagcgtgcccgcctccttcttgatctcgaattcctcaagcgtcaatcccgccccgattttctgctggaacggaacgcggcgcacggaggcgtcctggattcgccagacctcgactttcctgacgtcctggcacagacccgtcaggaaggtcggcaacagatccatcaggtatcccggattgacccctgtgccgacgcacgccaccgaattctggaggcacatccggtcgatccggcctgcaacctcgggattcgtttcccaggggaagaacagctcttcgcacgtcgagacgatgctcaggcccgcctgtgcgagctccgcaatctggctctcgatggcaacgaggctgctgaccgtcgtgagaaaagccacatcagccgagcgttttgcaagcgcatcgcccagtgtgctgcgcacgatgattcccaacggctcgattccgcacaattcgccaaggtctttgcccgcttttcgcggatcggggtcaacagcgccgacaatgttgaagcagccccgttcgatcgtatatctgaccaccatttgtcctaacgggccaatgcctacgtgaaccgtatcaatcatgcgaatcaatcctttcgcaatttgagactgcgtgtttcattgagcactcatgttacccggcgagtgcggaaatgcaaaaatgaaaatgcaaaatgtggctttgccacgcccagaggcgtaaaatcaaggaggtcattgccggaaagcggcaattccgctattgtgatatttgaaatttgacatttgatttcttcctgggaaagggaccgcgatgagggcaaacagagttatttcagcgatgtttgtgtgccttctacctgccgtgggtcaggttacttcatctttggcgcaaggcgctccggcggtgtacgaagccgccgagatatttcctttggtcagccagcacgtgcacggctcgacaatcgttgagctgcccaacggcgacatgctggccgcctggttccaggggtccggggaacgatgggccgatgacgtcgcgatcatgggcgccaggctccgcgcgggacagaagacctggagcaagccgtctgtcttcgcggatgtccccggattccccgatatcaatccgattttgttcatggacccgcagaagcgcctgtggctgatgtggtacacggtgctcgcgaaccagtgggagacttccctgctgaaatatcgcattagcgaagattaccaaaggcaggacggggcgccgcagtggtgctggcaggacgtgctgcacgtcaaagccggtgacccggccgaacgcggcatacagcccggcgaccgcttcgtcaaatccgtcgaaagacagatcaaggaatactcgcaggccgtcatctcgcagaatcgcaccatgcccgagcaggtcgcacgcggcatcatcgacagatgggccgaggacctgctttccaaagcgcggggccaagacctgattcgcagcgggcggctctacgacgggacgggccaatataccgaccagaaaatgggctatccctattttcgccggatgggctggcagaccaagaacaaagcggtgatcgtcgatgataagcgaatcatagttcccctctactcggatgggttcagtttctcactgatggctatcaccgatgacggcggcgcgacctggcagttcagcgaaccgctcgtgggggcggggaacatccagccgaccatcgcccgcaaggccgacgggacgctcgtcgcctacatgcgggacaacgggcctccgccccatcgcctccacgtcagcagctccaccgacaagggcctgacctggagcctggtgatggattccaatctgcccaaccccggctcgggcgccgatcttgtgactatgcagaacggccactgggccctggcgtacaacgacaccgaaagcggcaggcacagcctggcggtttcgatctccaccgacgagggcaagacctggccatacacccggcacctcgaacgggacatgcgtgacagacagattgcgaccagcagctcgtatccgtccatcatccagggccgcgacgggaccttgcacgttgtgtatagttaccaccataacgaccggcaaggcggccccagcaagacaatcaaatacgtgcgcttcaacgaaacgtgggtcgagcagggggacagcccaaaacctcagaccccagacacaagacccaagacgcaagactgaagggcggggtctggagtctgaatcaagtgggagcagattcatgaggagacgagagtttatcggtagtgcgatggttggctttgcggcctatgccgcgggccggcccgtgagagcagaaggggcgaagtaccgggtcgcggtcataggcaggaccggccggggtgattatgggcacggactggacgtcgtctggaacagcatagaccaggcgcgggttgtcgccgtcgccgatgaagatgacaaaggtcgtgccgctgccgccaagcgtctcaaggcgccgaagacctacgcggattatcgccagatgctggagaaggagcgtccgcaaatcgtcagcgtcgccccgcggtggctggactgccatcacgagatggtcctggcatgtgccgagcacggctgccacgtctttctcgaaaagccgatgtgcccgacgctcgagcaggccgacgagatgatcgccgctttcgagaagcgcggcctgaaactggcgattgcccatcagacccgctacagccccaccctggagcacgcacggaaacttatcgccgacggggagttgggtgacattctcgagttgcgaggccggggcaaggaggatcgccgcggcgggggcgaagacctgatggtgctcgggacgcacatcatggacttgatgcgtctattcgcgggcgatgcgcagtggtgctttgcgcgagtcaacgaggccggtaaacccgtcaccaggagcgacgtgcgcgacggggccgagggcatcgggcctctggccggcgatgagattcatgtgatgtatcgtttcgacgggacggcgatgggctacttctcgacatgccgcgcgaggcacggagcagcccagcgcttcgggctgcaaatcttcggtagcaaaggcattctcacgatgaccaccggtgcattgccgcaggttgcgttcgtcgaggatccctcatggcagcccggtgcgagcaaggccccctggcatacaatcaccagtgaggggattgacagacccgaaaccctcagcgacgccgggcaaagtctcggcaatcacctgatcgcccttgatctgatccgggccatcgagacggacacgcgacccaaaggcagcatctacgacggccgagccgctcttgagatgatattagccgtctatgaatcgcatcggctcaagggtccggcagctttgcctttgaaaagccgcgttcatcctctgacccttctctgagtgtgcctgctgaacagacgtcgttggcaagccaattagaaaaggggcctgcacctactcaagcggtgcaggccccgaactgatacaaatcctgccgtgtgtcccgtgtaagcgggaactccggccggcatcaaattgatactgactaaagcggcttatcaaacggcaacgtcatgccggccaatcctgcgacctcagcctccgacagaacgcggctgtaaatctggacctcgtccacctggccggggaagaaacctcccgtgtctatgcgcttgccaatccgaacgtcgccctgggtattcagacccgggtgggccgcactgccaatcaacaaaccatcgccgtaccagcttatcgttgtcccatcatacgtagcggcgaagtggtgccatcccagatccgggggcatgatgttccgctcccagccgtaaacgtgaattccatagtacccggccgttgtcgtgcctccgccgaccacctcaatgtcgaaatgcaaatcatttgaacccgtggccgagaaaccaaagacgtttgtccagtcggttatgcccgtcgtcacgttcatctttgcccagccggcaatcgacctcggagccgcaccgcttatgccgacactgccgacagcgacgtagtcgtcaacgccgtcgaggctgatggcttggccgatcttgcccaacgcatacaatggaccgccgttgggggtgccgttatggccaccggcgctgtcgttggcgttgccttcaaacgcatagcgggccgccaaacctgtcgcagccggctgcaccggcgtgaccaactgacgaggcaaggcatacagcctgatatcgtcaaggagcaaggtgccgctggtgcctttggtctcaattccaatcgccagccgggtgacgctttgcaggttcacgccgaccgaggttaagttgatattccacgtctgccagatcggcttcttcaggttgccggcatcgccatcgtatgggaccttgacgccgttgatcttgacgtacagttgtccgggcacgttggccgcatcgccatagaaccacagcgagagtgtttggataccgtggtcggtccagttctgggccgcgaacgtgcgttcgacctccgagaaggacgctgtgctgttgttgtaaatcagcggcacggctttgccgccgccatgaaccctggccgtctcaagggagcttcccgtgggatagcccatggtcgagccgttggtcgtggtgccgaatccatccaaccaggccaaatagaccaggttgctgcctgcctgtccggcggcaatgtcgttgtaggactcgaaatcctcgacgagagcgtagttggctaccgagaaactccaaacaccgccggttgtgatcgtcccgtcggtattgacctcgtcgatgcgccagtaataaggcccgccggccaattgaacgccttcgggcggggtgtaagaggtcgcgctctggcggcctcgatagacgcccgtcgtatcggacgtcccggcgttggtcacagcgtctctatccagaccgaaatagacatcgtgttgagacgctttctcgccggcagaccagctcaggggcgtcgcccgattgaccggcgtcagagcaccgctgctcgggttgagagcaccggcccggagcggatcttcgcccttgctcatgatctcggcaactttcgcagcgctgatggcatgattgaacagccgaacgtcgtccatcaggccttcgtagtagcggttgccgttgcctgt

SEQ ID NO: 4529 - DNA, 17946 bp, synthetic construct
  source 1..17946: mol_type = other DNA
  misc_feature 1..17946: note = Synthetic
gttggctcgctgcagagtcagcttggcttcggcgccggctgaacaagttgctaaaacaaaggtaatagttccagccaagacaatgaccttgttggataaaatcggtggcaacgacaaggatattgttatggtcaagcttgtcgacaatcagatactgttcagctgtgcaaatgtagttataagctcgaatcttgtcgaaggcaattttccaaaatatgaggatataataccggaggattacgacaagaagctggtgctgtcaaccgaagcggtattaagtgcggtacgccgttcggcgttgctgacaagcggggagtccagggggattaagctttcgattggaaaggatagtctggtgttttccagcaggacgccagaggctggtgatgcgcaagttgatatgcctgttgattacaaggccgagccgattgagattgggtttaatccgcagtttttgatagaggccttgcgggttattaagacggcggagttcgaattggagttgggccaggcggacaggccgggcttgataaaaagcggggcaaatttcctctatgtcttgatgccaattaatctgggctaaaaaatggtagatgaaggcgaacaattgcgcaaggctgtcaagtggcgagcggcgcatcgggcggacaacacagtcagcttgggcgatgtcttaagtgggcttatagagaatcaggtttcaccgcagcagaccaggtttggattgataaccgaggcctggagtcagttgctgccgaccgagctttgtcagcactgcagaattgttgatatttccggcggcaggctgaaagtgcttgctgacttgccgtcgtatgtgtacgaattgcaattattaagttgcgaacttcttaaagagttggcccggcaatgtccgcaggcgcggatacaagaaattaaatttgctgtcggttgagcattctgtgcagcagacagagggttgatatgaaggaccacaagtacgatgcgagcaatataaagatactcgggggcgtggaggcggttcgcaagcggccggatatgtatatcggcgaccggggcagcggaggcttgcaccgtttagtctatgaggtgctggacaattctatcgatgaagcattggccggattctgcgacaatatagtcgtgcacatccaggctgacggcagctgcacagtcgaggataatggcagaggcataccggtcgaagagcataaagaggctaaaaaaagcgctttagaggttgtgctcacgactctgcacgccggcgggaagtttgatagtgacagttacaaagtagccggcgggctgcacggtgtagggggcagcgtggtaaatgcgctcagcgagtggctcgaagcggatgtatatcgggatggaaaacactaccactttgagtgtgcaaggggcaaggccaaaggccgggtggaagaagttggcccgaccgacaagcgcggcacaaggatatccttcaaggccgacgaggagatattcggtgatacagagtttgcatacgacacacttttgaagcgaattcgcgagatggcttatttgaacgccggcttacaaattactttcagagacgatagaaacaacaaaaaggaggtgttcaagtttaatgatggggttaaggcctttattaaacacctcaacgagggcaaagagaccttacataaggatgtcatctattttgccaaggaagaccccgaagcgaagatgagttgtgaagtagggatgcagtataacgacggctatactgaaaatgtgctggtcttcgctaataacatccgcaacatcgacggcggcacacatctttcaggatttaaaacggcgctgacgcgcacgatgaactattatgccaaaaacaataacttgctgaagagcgaccaggttactacaggtgacgacctgcgcgagggattaaccgcagttgtagcggtgaagcttactaatcctcattttgaagctcagacaaaagtgcggctgaccaacccagaggtgagcggtttcgttgagaccaccgttaacgagcagctcggccattttcttgaggagcaccccgctgaagcaagacggattttgaacaaggcgattcaggccgctacggccagagaagccgccagaaaggcgcgtgaattgactaggcgcaagggtgcgctaggcagtaccagcctgccaggcaaattgtgggactgtacgagtaaggaaaaggcaggtactgagatatttatcgttgaaggcgactcagcaggcggctcggcaaaagccggcagagacagaaatatccaggcaatcctgccgctgaaaggaaaaatcctcaatgtcgaaaaggccaggctggaaagaatgcttgcgcacgaggaaatccgaacaattataagcgctctggggaccggcatcggtaccgacgagttcgatttaagcaagtgtagatacggcaagataatactgatgactgatgccgatgttgatggcgctcatatacgaacgctgctgctgacctttttctttaggcagatgtcgcaattatttctcaacgatatgatttacatcgcccagcccccactgtatgaaatcaaggttaagggcaagaagaaatccgaatatgtcctcagcgaaagtcagatgcataagcggatgattgctcgcggcctggaaggcacagagcttgtcatcgggaatggtaagaaaggtgaaaagagcaaaaaaacgcagaaagtttcagacaagcagctggccggtcttgtaaaaaccctcgccgatgccgaacgcaacatagctgttctggccagacgtgggattaacttcgctgatttcgtgcagtcttattatggcggcagcgagcttccgcagttccatatctgcgttggtggccaggaggagatttattatgtcagggccgagtatgaaaagcggctcgacgaactaaaacagcgcacgaacacaggcacagagggtgggggcgaagaatcaatggttgctgaggaacttcacgaggtgggccgaatcaacgagataaatgaaaagctcaaggacgcctggaatctggacttaaaggattttcttctaaaacccaccaagactgtgtctggcgaatcgctgccgacaaagtttcagcttatcaacggtgcaaacacatacgacgtcgcttcgctgggtgatatctgcgctggcataaggcagattggcggagagggaatggagataaaacgcttcaagggtttaggcgagatgaacgccgagcaattgtgggatacgacgatgaaccccgcatcccgaacgttgttgagtgtcaaattagatgatgcaggcgaggcggacagactctttagcatcctgatgggcgaggatgttgaggagcgccgaaatttcatccgcgaccacgccctcgaagtccaaaacctcgacgtttaggccgcctctggtagaggggaccccattttgtgatggaggggaaagtggaagttagcgggacgaaaaaatcacaggtgaagattttagcagcctttctggtgctgttggcttttagtttggcttgctttgcagacacattcacacatcgccagaccggagaagttctgcatgggtacatagccggccaggccgaagatggtgaaacaatcgccagtacaaaggaaaaaggccaggtcgggctcgatttggcgcagtggcagattgttactgaccggctgggcaggaataataaggtaatcgttttaacaatcgaggatgagattaggcttgagattgaaacccaggccctggagcgggaagtggccaagctctcgaatgaagggcctttatttattttgtttgagatagacacgccgggcggccggggcgatttaacccaacggatttgtggggcgatcacgcaacttaagggctgtcccacagttgcttttgtcaagggcggcaagtacggaggggccctctcggccggggctgctgttgcattagcatgtgataagatttatatggctgacaatactgtaataggtgccgccacggcgataaccttttccgaaaccggccgtccggaaagcttaaaagaggcctttggagaggaagtgggcgagaaatttgcctcagcctggcgggcgcatcttgcttctctggctgagcaaaaccaccggccggggctgctggcaagggcaatggttgacaggaacaccgaagttattgaggtggctgatgccaaccagcgactttttatcgaccccgtcaacaaaaagcctcagcagcgcctcgtgcacacctggagcaaaaaaggctcgctcctgacgttgaccgctgcagaggcggtcgaatgtatgattgccgacaaagttatcagctcgcgccaggagcttcttagcgaattggatgcggccgacgccaaggtagtgctaaacagcgaaatccaagatgccagagcagaactgaaaagggccagggggcaggtaaacagaataagaaagtcaatagatttaaaaatcgagcagtctaaataccggcaacccaagccaaaggtccttgaaatcctgcgcagcgccaaaagcgaatttcaaaccttgataaaattggccaagaagtatcctgatttggaattggatgtacaatcgctggagaaggaattaaattttgttgaggcggcctatcaggatgtaaaaaggaagtagccggaaccctgcgtgtggtgttttattataaaaaaatcaaagattttacttgcaaagattttccagcttgtcaaaattacagagcatagtatttaaagatataaaagatatatattatgatagatacggagtgcaaattatgagatggagacgagaacaggcagggaaacaaatatctattgctccggctcttttggtttgcatattgttgttgctcggcggctgcggtggaaaggccagaacgcctaaggaggttgggagaacggaagccgagaagaaaaaggtcaagttgttgaaggcaatcgagagtaaattcgaagatgctgaatcgcatttcaagcttggcaagctgtatcaggctgatgggctgtgggctcaggcagaggaccagtatggtatcgctttgaattttgatcctgttcacaggcaggcccaggcggcgagggtgaaggtgttagtggggggcggcgatgcggccaaggcaaagctgttggcggacgagtatataaagcaggcatccatttcggcggcggcgtctcttcagcttgcactggcgtttcaggagcaaggcctggatgagtatgcattgaaaagttaccagcaggcgctttatatggcgccgaattcggccaagattaacaggcagattggcttctattatttgggcaagggcgacaagagcctggcgagggagtatttgagccgcagcttccagcttaatcccaatcagcctgatgtggccggcgaacttggccgacttggtgtggctgtgaggataccgcgaaagaccgagaagggcactaagaagttagacaagattgtagaaaaatccgacaagggtcgttaatcacaataatggcgttgggggtgatagatttttatagccctgtggcgaaaggattcgccgcggggtttttttgtggggattttgggaggcaggttcgacacttcgactggttcgataagctcaccacaggcaagctcagggcaggcaagctcactataaattgggttcgtttgggttcgttttgaccaagtgtccattgtgcatttttcgttgtaattggttgttgaaattacggttataaacatttgacttttttggaaattgggttcgtttcgcataattaacttcattttgattgatttttccgctcggcgcaaacgaaaagcggggataaatccgaagctttaaacggataatccaattaactaaacgaggtttaatggtttacttaactttagccagagggcattgggtttcctttcaagagagactttctctctacaattggaggaacttgcgtgattgatgcgaaaattttggggttttcggggatgcggctttggctaagtcgttacggctaaaagggtagagaaaattttgaaaaaatggatttttggttttaacctgctgtgcttttgattgatgtttaaccacggatgaacacagattaacacagatattaatgtttgcgggaaaatgatttgcgggtaaaatggggcggtgaagctttggggagtatatgggcataaaaaggaacagcccgcttttggcgggctggtgtccgcgtgcttacgcacttgttgtgacaagcacgaaagcacaggtcagttataattaagataagatatagtggagaggcagaaaaaagtcaagggaaattcgagaaaaattgtggagggcatatgggcacttacacgcttgggtttgatatcgggtcaaacagtattggctgggctttggtagaaacaaagaagaagccatcaatagttggtattggggtgagagtgtttccagagggggtagacagagatacgaaggggttggagaaatcaaagaacgccacaagacgagaagcaaggggcgcaaggagaacacatcaaaggagaaatcttcggaagaagcaattattgaaaaccctgcagaaagtgggattcctgccgacaagtaaatcagaactaaggtcggtgtttcatacaaacccatacggtttgcgtaaaaagggtctggacgaaaaacttgagcggtatgagtttggcagagtactgtatcacataagtcagcgcaggggcttcaaaagcaatcgcaagagcggcaaagcaaaggaggatggcgtcgtcataaagggagcaaacacgctgcaaacagagatggatacaaaagaatgccggacgataggcgagtattttgcatcgctgaatccagaggagcaacgaataagggggaaatatacattccggttaatgtatgagaaggaaattgacttgctgtgggcaaagcagagcgagttctatccagatgttttaacagaagaactcacaaagaaaataaaagacgagattatatttttccagaggccgttgaagccacaggatgagctaatcggaaattgcgaacttgagccgggggagaaaagatgtccgcgtggggactggtatgcgagaaggtttcggattttgcaggacgttaataatttgctcatccagaatcctgacggggcagaaagaaaattgacagaagatgagcgtgtgatattgctgaaggaattgtcacaaaaaaaggaaatagaatacgacaaggtgcgcaaactgctcggcctgatggagacacagaagtttaatctggagcaggatgggaaggtaaagaagctaaaaggagatgggtttgcggcagcgatgcgaagcaaaaagttatttggcccagcgaaatggggtgaaatggcggagacagaaaaagttaaactaaacgagtggcttattgaacttgaggatgatgaacttaaagagaaactggcaagtgagtacaaattgaacgaaggacaaatagaagcagcgttgaaaattgaacttccacgtggatatatgagtttttcgcggaaggcgataacgaagattttgccatttatggaagcaggagcgataacaagcgaggcgattgaaaaggcgggatacaggcacgatgatagaagcaccggagaggcagtcgagaaattaccgatgccaccggatttgagaaacccgatagtgcaaaaagcattgttcgaggttcgcaaggttgtgaacgcgatagtgaaagagtacggcaagccgggtaaaattaaaatcgaaatggcaagggacgtgcatggtagcagacggcaacgagaggaactacactggaagatactggaaaatgaaaagagaaacgaggatgtgcgcaaacggctgagagaggacataaatattgcgaatccgacgcgggatgatgtgattaagtacaagctgtgggaggagtgcgggaaaatgtgtccctatacaggcaagcaaatttcacagacagctctgtttgggccgaatcccgaattccaggtcgagcatatcctgccatacgaccggagtttggacgatagttatatgaacaagacgctctgcgaagttcacgaaaatatacacgttaagaaaaatcaaactcctttcgatgcatacagccacgaccccgagaagtatgaaaagataaaacagaatataaaggtcttgccttggccaaagcgacagaaattcctgcagaaagaaatagaccttgaccagcatatcagtagggaactcaatgacaccaggtatatctgcaaagaagtggtcggatacctcaaacaactcggcgtgaacgtgcgggggacaagaggtaagattacgggagagctgcggcatcagtggggtcttgacgggatattcaccgagctgggcgtacggcgcgatgaagaccatcgcaggcatgcagtggatgcgataatagttgcagtgacggaaaatgagcatttacgaaaactggcaagaagtaaatattcggtaacgggagaggtctttaaccaaccttggccggatttcagagaggaagtaagggagaacgtaaagcagataaacgtatcgcatcgtgtgcagcgaaaggcgtcgggaaagttacacgaggaaactaattatgggccgacagggaaagaaggtttgtatgtatttcgcaagaagttagaggacttgacactggcgatggtgaaagacattgtcgatgatgttgtgcgggagattgtgaaaaaacggctggaggaaaaaggcgttgattttaacgggaagggtaggaagccacctaaagaggtttggaaagagccgttgtatatgagaacaaccaagagcaacaagaaggtgctgataaaaagcgtgagagtgtacaatgtggctaagcatgcaattccgttgaaagacctttcaggccaaatatacagatacgtagagccgggcagcaaccatcatatagagatattcgaatacgctgatgagaaaggccgtgtaaagcgagactccaaggtcgttacgatgttcgaagcggtgcagagaaaccaaaaaggtgagccggtggtgaaaaaagattacggcgacgggaaaaagttcgtatgctcactttcgattaacgatatggttatgatgaaaaacaaggcaggtgaaatggatctttgccgagttcaaaagatggacgcgaacaagatggttcgttttcgtcaccacacagcatcaacgattgaacagaaggaaacatacatagacaagacagcacatcttttcgagggtcataaggtaacggttgatccacttggaaggatatatccagcaaatgattaaataagcctcaggcttataaaaaggcatatcgtgtttaaggggggatgtttctcagccgataatatttctggattccgtgtcaagcacggaatgacaagacaacggggcggtctatgattaaaaagattatagaaatctcacaggcacggaggcatttggcgattcgattaggccagttaattatcaaagaaaacggtactgagatttcgacgattccctgtgaggatgtcggggttttgctggttgaccatatcggcgtaacatacacacattcggtatttacggagttattgcggtgcggggcagcgattgtgctctgtggagggaaccatcagccaaacgggatgcttttgcctcttgagagcaatacgctgcaagcagagagattcgcacagcagataaatgcgaaagagccggtgaagaagaagttatggcggcagatagtgagggcaaaaatcaggcatcaggcaaagatagtcggaagggacagtgacgtatataaatcgctgatggcacttagagagcaggtccgcagcggagacccggataatatagaggcacaagcgagcaagaaattctggcctgtgtatatacaagatattatctctgagtttcacagaaacatcgacggacggccaccaaataatatgcttaactacggttatatggtgatgcgtgcggcggttgcaagggcattgtgcagcgcggggctgctgccctgtttagggatacatcaccacaaccgatataacgcattttgtcttgccgatgatgttatggagccattcagggggtttgtggaatcgaaggtaaagcagatttgcgaaacagaaacggcggtcgatgatttgacacagcagataaaagcgcaactgttagaggtgctttatcaggaggtgacaatcggggaaacgtcggggcctttaatggttgggctgcacaggacggcagcaagtcttcaacggtgttttgcaggagagcagaaagaaatagagttgccgaaattatagccacagagattataaattttgtttcagctatagagttcacagagagtacagagattttaaaattaagattgagattgccacgcccctacgggggctcgcaatgacaaagcgtatgatattgagcgggtacagagccgtgtggatatttgcgatgtttgatttgccgacggataccgaaaaggcgagaaaggactatacacattttcgcaaaaatctcttgaaaaacggttttacaatgctacaatattcggtgtatgtaaggcactgtgcaagtgaggaaaacgccgatgtccactataacagggtcgaaaattttctaccagacgacggagaggttcggcttattgtcattacggacaagcagtttgcgcggatgcacactttttgggggaaaatgcgaaaaccacccccgccgcagcccagacaactcgaattattttaaatcgaaccgttcgcaagtccttacaaaacaaggccttgcgaacggtctattataactgacctgtgcctgagtgcaagccacaacgaaaaaatggagaagggtcgagtcccaaacattataactgacctgtgcctgagtgcaagccacaacccgtatgtggcggtgggttcgtgagtttaaattataactgacctgtgcctgagtgcaagccacaacgtgatactcgatgaggcctgccacgatgatattataactgacctgtgcctgagtgcaagccacaacggtgaggcgagaggtgcaatggttcaagcaggctcaccataaagagaaacggagtcgtcctcctcccgaacgaccccgcgatattcaacggttcgactacgctcaccataacgaataacagaaccggcgagttttctgtgaaaccgattctggaaatttttgaatcgggcgggttctgcctcctcctttgttttatattgggtttagagagtcccgcccaatatcattttcttaagtaagtgagattacctgcaaagaatatgccaacaacagaaaataatggttcgactttgctcaccacttagggcaaagagcggagcggtttcatttaacaatttgcaagataagcagttacatctgtatatacgttctgtgcagcaaaacaaagaagtgtagttcgactttgcccgccacttgtcgaaattcgacggcgtgttgttttttctcaacgccaactttacccagataatccatttttacatatacggcctttgtggagtaagctattttgacaataaaaccctacaaagcagaaaagccatcttgatgttgacaaaaaacaacatagcattaagcaaaagggacagcgagagattgatactcgatacttgatgctcgatgatgaagttaggctatttttttaggttggggcgatatttggcagaggcgacgcggttgttccagcggcaaagccaggtgtcgaaaagggtctttttcccgactcgctggtggtcgagcagaaaaatagtaccttctcgccaagcgacaagacaatcggcaatttcgcgtctctgctggtcgggcagctctgccggggacaattcaaacgggtctgcgctcaaatcatagacggagaccactttgtttgccggatagtatatgaacttttgattcgcttttacaaatccggcagggctttggctgagccagccggagaaatatactttgcggtcatcgggtattgacccaagagcattaacgccgtcaaagccgagggcttgcgtatcgaaacccaacagggccagcaatgtcggggccaagtcaacagagctaacagcttgagtaaccgtggttttcggctgaatcaaaaacggggcccgcaaacaaaatggtatgcggatggtctcatcaaaagcgattctctcgtgaccgagcaggccgtgctcgccaaatgcttcgccgtggtctccaataacacaaagaatagttttgtcggtgagattgagctttgcaagctcgacgtcgagtgcggccaggaatttgtccgtgtaggtaacagcctgccggtatctggcgagaggctctttggcgggttctgcaaaccactgcgggaccacgtaagggtcgtgggtaaccgaaagcataagcgtcaggaagaaaggcctgtcgtcatccgtcttcgcttgcgctacgccggacgagtcggcttttatccaatcgacgataggctgcagcatagcaaattcatcacaggccagatagccgaggaaggcgtcagtgtcattcaaatcgtctctggcccagaacttgtcaaagccgagattgtggaccagtcccgggcgggattcgaagtttccctttgcggactggaagaaagcggtccggaaattggcgttctgtttgagaatcgtagggatggaggcgtaaggcttttcgagcgggacagcctcggcgatatcctgcgagacagaagggaatcggcctgtcagaaggctaaacagaacctttgtcgtatgtgtaagtgaggagcgggcgtttgtgaattcggcgccctgttctgctaaagctgcgagatagggcgttaggctgctttgtttgttatggcgtaagccatctcgacgataaagcgaggtatatccatattgtatgccttcaaggacaacaataacgacattgtggtttaaccgctgctgtttcggtgaaattgcaatttgtatgtcgtcaaaagcaggtatttttcgtttggcgtcggctaaattggttttttccagcagggcggaatcagagaaaagcaaagacgttacagcccttaactgacaattgtaacgcaggccttcggagacaatctgtggagagcccctgtcggtgagtgtgtcgcgagcgaggacggcgataaggacaaggagaacagaaacagcaattctacctgcgaagcgtttttggttgtaatggggcggcagtggttttgctaaaacggaaaagaaaaaagcaagagcaacaacactggggacaaggaggattacggcagcggtcggtgtttttgcaagattgacaccaataatacatagtgcgtttatcgggtcgcgaaataatggcaagaggacggtgggcaagagctgcgttccggttcttatcagccagccggcactcataaccgaccaggtgcatacaacagcggcacaaatgcaagctgtgcggatgacccatctgtgaggccagcgaaaacagagcagggccaggataacttcgatacccaacaggacagagatgtcggcgaatatccagctaaagtattcgttgagcaggccgatacgccaggcgtgaaagaacttgaccgcgagggtgtaaaataaggcagcgaacataataacgctataggcgcgtggagctaaaagggcatacaagcggcgaaccggtaaaaacggttttgctttgaggccggattgtgaaggcctggtaatcatagtgcgccaaaatactaaaagctgctacataaaacaagggaatagcgtaagaagcacctctgcggcggggcaggctatcgggagttttatttattcattgaggtgtaggcctttaagaaggaatctgaataaatctgcttgttcatcagcatctccgctgtagcaaggatgttcataagcttttcgtcgaagacatcagcgatggcggagtccatgccgtgggagacggccatagcgagaaatacggaatttatcaggctcctctccgccgctccctgcgagatgtttgaaagccctacggtaatatgtggggccggttctgcaagaattcttatctggtccatagcggcgaagacatttgccggctgggtctgggcattggggactttaacgggcagaacgatagggtcgatgaacagccgttgtgtgtcaaagccaacttcgattgcctttgatacgatttccgccgctattgcgacacgagtgtcggtgtcctgaggcacaccgtttttgtccatagcgagtgcgatgatgcctgcctttggccctgcgtttttggccatttcgatgtatttatcgagaatttcttcatcggttctcctattcaacggcgaagaattcaggaggatgccggggtcggtatttgccacctttagtcctgcggcaatgacgccgggtttttgcgaatcgaggcacaatggggtagagcaggtttgctggattgtttcaaccagccactgcatagccgcctgctggtcggcggcggcggtgccgacattaacatcgaggtaaccggcgccagcgtcggtttgttttttggcgaggtcctggatgatttttttatttttctctgcgacggcctgcctgacatcactgaacattccgttaattcgttctgcaattagaatcataactatctcctatccggctacggctcggcctacgccgagacgagttgccaaatttgattgatgaagtttttgacgatggcgacggcccgcggatggcgcatccgaattatgtcggcgccggcctgcaacatacagattgcggtggcagcttcccacatcggcccccggtctttgacatctccccaaccggtggcgtcggcgagttttgcttctttagcccgccaggtttcataaccgacatcgcaaatcatcggcatagccatcatcttatcgcccgcgagggcggcgaggcgctgacgctcctgaatcgaataagcatactccatgccgtagcctaacgcccctgtagcctgaaacgttactatcttttcgagcggaaagcccatatcagaaacgaggatattgacctgtttgacgatgttgatatccaggggtgctgcggtaataagattgtgtccgtcagcaagagcgacggcggttatggccttgtagttgtcctctttagcagctcccaagaggcaattttggccttttgcggcttcgcttactttgggcataacctgattgtccttttcatcattgccacagccccagagcacaagaggaacacctgcggctttgaggacctcttcggtaaccttaacggcactggcagaatccttgtcagctttgtcgggatgaattccgtcaaacttgatacagattaagtccgccccgaattctgcaacggcctttttggcccagtcgccgggactgtcaaggacatttttatatggttcggtgaggatatccggccaatcctgcggcctgatgtctatgacatcaatagcaatgaccggtctttcgccggcatcttccggcgagccgccatagatgacattacgcgctccgcctacagttatcgttgaggtgcgagtgccgcccttatcttttgttgcgccgagtgtaactcgggaaacttcgccggtaaaacttcctacaacttcagggactggcatttataattctccaaaatagttcatagttcattgttcatagttcgtggcgaaccggggactaaaatatgttcgagtattttttgcaccgccgaaaatgcggggctattttcttcaaggtcgaagatagtcttaccttgcatagaagcattaaacacagattcgtcgaaggggatgcagccgaaggtttcaagttcgatactcgatgcttgatgctcgatgctcgtggctggaaacgagccacgattctcgttccatacaacgccgattcgttttacagatattggtaattgttcagcaaggtcaaaaattctttttgcggtaacggctccgagcggagtagattcggccacgatgcagagaaagtcaacattattagtggttcgtcgagagaggtgctccattccggcttcgttgtctatcaccacaaagtcgtaggcagagcttaacttatcgagaaactgccgcagcaagttattcgctgcacagtagcaatcgggcccttccggccgacccatagtaagcaaatcaaaaccatcagcttcggtaattgcctgctggatgccgtattcgaatgactgcacgcgactcataccggggctggttggtgatttcgagcgggcctgttcgcgaatttcggcaatagtgccgagcggccggacccccattgtcaggccaaggcaagaattagggtcggcatccacggcaagaaccgctttgttctgccggtgcagcagaagcctgataatcatagcagcgagggtggttttacctgagccgccttttccacttatagcgatggctattgtcacgttgctttccttattttattttttattaaattttttctgccagaagttttaccgaagggaagagggacaaatccgtatgaggcaggaaacctgccttaatgaattcatccatataccccagatggctcatcaaatcgaaatacgtcatactcttggcgattttttcagcggtatcgagggcctttcggctcagcaaaaccgtttttgcacctgcgattgacgtgtttccgacgaactgaatcttctcgatgggtacatcgggcagcattccgatagtaacggcctgtcgaacattgaggaagtttccgaacccgccagccaaataaattgcatccaggtccttcaacttcgtttgggttgcttccataaggactcgaatagcggcaaagactccggccttggaacgcacgagattgttaatgtcaggctgtgttatcacgatttccggatgttcgttagtggagggaactaagcggaactgtaaaccctcgtcgccttctgtaagccttttgtcgccggcgggctgaaaacgtccggttcggtctatgatgccgtttataaataattcggcgagggtgtccaaaaggcctgagccgcataagccggagggatgggtattgccgattgttttaaactcgatagaaccatcgtgaaggaagctgagtttttcgatagcgccggccccggccctcataccgtgcctgaccccacttccttcaaaagcagggccggctgaacttgaggcgcagaccagccagtcccgattgccaagagcaacctcgccgtttgttccgatatcaacaaaaagcgagatggcttttttggtataaattctcgtagtcagcacgcctgccactatgtcacttccgacataagcggccacgctcggcaggcaatataataagccacgcttgtttatctggatgccggcctccgcggcccggattggcgggacaaagccgaccgaggcaacataaggctctctgcgtattcgcgtcgggtcgagattgagcaggaaatggaccattacagtgtttccggcacagacaagcgcagttatatcctgcagatcgattctctgccttgccgccagcgttgcgatgaggtcatttacatcgtggacgatacgattttgcatttcgtcaaaggcattattttcttcggcgtagatgattctgcgaatatagtcttcgccgaaatttatctggctgttatatgtggcttcggtatctattgtagttgcagttgtcaagtcgattagatgagcgacgacggtggtggtgccgaggtcaacggccactgcaaaatttatcttacagcgttttcccggctcgacctcgataacctcggtggttccgccacgccgacctattgttaccgcaaccttgtaatttgcctcaacaagcgactttgaaagggtctggagaatgcgaaatccggtctgcattataggggcgtcaatctgctctcgtatcgccacatagagtcgctcgtggtcggcg

SEQ ID NO: 4530 - DNA, 17657 bp, synthetic construct
  misc_feature 1..17657: note = Synthetic
  source 1..17657: mol_type = other DNA
tagctcgaatcgaaaatacggactttcatgcttgccataactggccccatgccctacaatgacaggatgcatacttctgttcttgggcgttcactgttgtctcgtagtatgctaagggacttttacggtgagaaatgccgatgaacgaaacaggcgagaaagacgagaatcggccggatgagggagaatctgttcccacatcgagctctggccctgggatggtgggccttggggagcagattggccgctataagctgctgagagtcctgggtgaggggggttttgggatcgtctatctggcggagcagcaaaggccgatgaaacgccaggtggcgctgaagatcattaagcccggcatggattctgcacaggtcatccggcgcttcgaggccgaacgtcaggccctggcccttttagatcatcctaatgtcgcccatgtttatgatgctggagcgactgacgcgggccgaccctattttgtcatggaatacgtcaagggcgtacccatcacagagcactgcgaccgccagaggctcaccatcgaggagcgtctcaagctgtttgtgaaggtctgtgaggccatccagcatgcccaccaaaagggcatcatccaccgcgatattaagccttcgaacatacaggtatgtattcagggcgaacaggttgttcccaaggttattgattttggggtcgccaaggcccttagtcagccgctgaccgagcggacgctggtgaccgagcagggtcagttgatcggcacgccggagtacatcagtcctgagcaggcggagatgacgaaccaggacatagacacccgctcggacatctattcgctgggggtgctcttgtatgagctgttgacgggaacattgcctttcgagtctcagacgttaaggaaaggcagtcttgagcagatgcgtgaggtcatccgcaaagaggagcccaggactccgagtactcgggtcagtagtctcaatgcggaggcgtcaacaaggttggccgagagttgtcacagcgatgcggacagccttcggcgcaaactccgtggcgacctggactggatcacactcaaggcgatggagaaggaccggatgcggcgttatcaaacggcgcatgccctggccgaggacatcgagcgccacctgaacaacgagccggtccaggcccgccccccgagcacactttaccgcttccagaagctggtgcgacggaacaaggcagtcttggaaggagtcggagcggttgcggtgacgctcggcgtggtcggcctggttgccgcgtggtacttccatcgccaagctgggatccgctgggccagggacgagctggtcccgaagatggagcgcctcatcgccgagggtggccgggacaactacgtcgaagcgtacaaggtcgccacagaggcaaggaaatatataccgcgtgatgccaagcttgcggagttgctctcgaaggtcacggtcaacatctccatccggacagagcccccaggcgccacggtctacctgaaggaataccaggctcccggggacgaatgggagtatttgggcgtttcaccgatcgagaacacccaactgccggtcgggttcttcagatggaagatggaaaaggaaggatatgaaacggtctttgcagccgccgctacttttgattttgatatgaaagtacggagctggattactggaaatgatattatcagagtgcttgataagaaaggaaccgtaccgctggggatggtgagggtcaaaggggagtacggggtcggcgacttctttatagacaagtatgaagtcaccaacgggcaattcaaggaatttgtgagcaagggcgggtaccagaggagagagtactggaagcacgcgttcatcgaagatgggaaagagataacgtgggaagaagcggtcaggaggttcgtggatgccacgggaagacccggtccggccacctggaaagctggcgccattcccgcggggcaggagaatcacccggtctccggggtcagttggtatgaagccgcggcctatgcagagttcgcagggaaaagtctccccactgccattcatttgggcgttgctgctagaggtgggatgtcggacggcctattgagatgcggattctaccggcgcttgatgccgatgagcaatttcggtggcgaggggccggctccggttgggaaccatcccgggatgacggcctacggaacttatgatatggcggggaacgtaagagaatggtgctggaatgaggcgccgaaaggcagggtgatccggggcggcgcctggaatgatgaatattacatgttcgcgccccggagtcaggctgctccttttgaccgttcgcccaaaaatggttttcgatgcgttctctacatcgatcccgacaagatccccaagggggcgtttgaggcgatcaaagttggagaatacccagatccctatcaacaaaagccggtgcctgattcggactttcagatatacaaaaagcgattttcctatgacaagactgaccttgacgccaaggttgaattgaggaacgagacccggcaagactgtgtcccggagagaatcaccttcaatgcggcctacggtaacgagcggatgatcgcctatcttttcctccctcgaagaggctccccaccctaccaaacggtcatctatttccctggtgctctcgccttctatgaagggcccaccaaagacctggatacgtactacgaatttgaagacaaacttttgcccattataaggagcggccgagccgttctcttacctgtctacaaagggacgttcgaacgcgaggctgatgacctggtgtctgcccctgcggattcctataagcataccgaatggataatcaagatggttcaggatttcaagaggagcatagattatctggagacccgtccggatatcgacagcaaacgactggcctacttcgggtggagtttgggaggaactatgggagccctgctccccgccgtggaggaccgcattgtggccagtgtcctgggcgttggaggtttcgatgtgctcgagcttcctgaagtaagtgctgtcacttatgtatcgcgagtgagaattccaacgctgatgctcaacgggaagtacgacttgggcaccccgtacgagacgacggtcaagccgatgttcgatctcttggggacaccggccgacaagaaagaactgaagctctacgagacggatcactggctgccgcggaatgagttgatcaaagagaccctggcctggctggaccgctatctgggcccggtcaagtgactcagctttcggtcattggaatatcccaattgaccagtcaccctggagagcagacaatcgcctgacaggggcgttacatacccggcatcgagaatcgagaatcgagaatggtttggagagtcatacaggttgctccaacggtgatggggccgcttcttggcctacggcgagccgccgcgcgcatcaaaaaagccccttgcttttggcaaggggcttggaaagtgttgtatctcggccgggggcctgtcacttgggttctatcagccggcaggcgaatccccaggggccgccatagttcaggattttgagcacaagctgattgctgcctttcttgaaggtcacgggcacgcggtcgctgtccggcacgacgccccggcctgcccgcttttcgtgaacgagcttgccgttgagccagaccttaatgcagtcgtcggaaccgatgcccaggacggcatgggtttcctcgggcatctcgacccaggcccgggcgtaggcgaccacgaaccatttgtcaaacgccgctgtcaggtctatcacgccgtactctgaatatagagtggtccattcgtaatccgtttcgccgattttgattttgggttcgaactgcgccggattgagtgactcggtatcgaagaacttatttgacgcctcctcgtccgggaaatagctttttcctttccaggggacatggacaggcccaagaaacagccatcttcgcatgaactggcccggcttgaggccctgatacgtcgccgcagccagatcgggtatgccctttgatatggtgacgccgcccgagacctggcggactgcgctgtcatcgctctgcgttttcttgcggccggcctccacgtttttcaggtaccatttgccgtcctgacaggccatggcgacggtcgcttcgcagagcagcgaaccttcccggcacagatagaccgggtgctcatagccgtctgccggtttgtcgggccacgccggtgtgccgagaaattggaaattgaccacaagacctgccgcccccatcatctggtccatctgcccggctacgatttgccgcacgtcgggggtaataagctccaggaattgcgtggtgtccttattcacgacagcgctgtagaggctcagcaaggtttccagcggcgtcttctgacccatgaacgttccgccggctaatatctctgcggtccggcggcggccttcctggacgacttgttcttccaacggatcgcgcaggccgcggtattgcgggggaaggtcggccagggtggtcccgtccttgtccggccacaagaaggcaatatgatatgtgccgtctccggatgggcccgtgtaactcctgatggtaacggcgacacggccatcgacgttgtccgtggtcgccaccggccggctcgaatcgacaaagatcgccgaggcgggcaggatgaagcgaaagtaattcagacagtttggcgcgttccagccggcctggaaatatcttagcgatccgtccttggggattccctggcttaacggaatcttgcttgtacagatgtatttgaagttctcgcccggctcgacagtataggggtaggatagtgtgtatgtacccagaccgggactcgtcttctctacgccgaattgcagcaggatgccccgaaggtcgtaatactttggctcgtcgagaatactgacgccttctatcaggcacgtgtcacttggccgggactttgaattctgtatctcggcgaagtaagccatcgtacccagatgctcattttcgattttgatcacctggatactggaagtgtctattttctcccgctgggcttgcttctccgcctcgacccatttgtagatttccatcacgtcgtccaccagcgggtcatcgacgctgacgctcggattcttgtccggcgagagaacagccttgcggcccgcctcgacggcgacacttgtggtgggcgtttcggcgatgacctttccctttttcacgctgacttctgtcttttgtgcgagcagaagcgtctgggccgccagcaggatcgcggcgcagaaaatcacggttttcgtcttcattgtatgtctccttgtgccccctcgactgagcaggggggcgattgttccagtctattctacagttacagtgaactcggttcccagcgcctccacccggccatgcggagtgctgatgaaaaacggcggatgcggactctccagtgcggcggtcaattcgccgtgctcgagataaaactgcgtttcgccgttatacgatttcaaaaccagcatgctgttctgattcaattcaagcgtggactcgtcggcccatctcaggatgcagcccgaattggccgcggcgtgaaatgcgtcacccagatagatgtgtgaatccgccttcagggcttgccacaagcctgagccttcgtgtctgaccaggaccattccctgaacatcgcccacaccgatgggcacttcggctgtcaccgccggcgcggtttgtccggggccgctaaatcttcccagcgcgaagccggccaacaccccggcggctaatacgacagcagccgcgacggcggctcgtcttcccgcgagccaggccgtgcccacgaaacggctggattcgacgggaagcttctcaagtagtgacgccctgacttgctcagcagccgtcgaagaggaaaaagcttgtttgacggcgctctgcatgagaacgcagcggtcgaattcctcgcggcagcgggggcacgcctctgcgtgaaccctcagttcggcaagctcgctgtcggcgatgagtccgtcgagatacttttcgataaggtttttgtatttcgtacagtcggtcatagttcgacctcctctaaaaggggagcaaggtccctgcgtaatatcttgtaggctcggtgcagccggacgcggatcgcgccgggccgtttgcccagttgctcagctatctgcacggccgaaaggcccgccacaaaccgcattacgatcaggctctgaaacttctgcggcagccgccggaccgcctctcgcacgaaatgaatctgacgctgcgtcaacccgggattcgccggctccgccggcttcgcatcgagctcattcagcggcgtcgccttgcagcccaaggcgctcttgcaacgaacggcccttcgcatgctgtccgagcactgctgcagcgtgattttgctcagccacccggcaaaccgcgatgggtcccgaagactgtgcaactggcagtacgcccttatgaaactctcctgagcgacgtcttcggcttcggcggggtcggcgatccgggtcagcgccatcgcgacgaccatcttccagtaccgctcgacaatcaccccgaacgccgaagtctgcccgctcaaggctaaacttatgagctgctcgtctcgggccatcagttgtcttgattcatctgccattgaatccttccagagcgcaatccggcgtaattctacaggatagaacgcggcaatggcagaagcgttacacctgaaaattcgttaccttcacccccgtggccgccttataggggtagagagacagtgaaaaccggcaagtgaataaagataaggagtgctaaccatgaaacggctcatagaaattctcgcccttgtgatactgaccatgtccctggccggctgcgtcgtggttgacggacaccaccatcaatggcaggggccccaggccgtcatcgtcccgccgccgcgatacgcgcgcgttccgccgccgccgccgcactatccctacgaccaccaccatagagactggcccggccctcgcgggtactaaggcttggcacaagtagatttacgaattgctccggcagaattgccggaccgatttcaaatcgaaaatcgcaaatcgacaatctcccgcaagggacgccttaggcggaaaatctttcgtcctccgtcgtctgtcttcctacatccccagtacagtgagctgattgagcaggcgttcgtaggagtagatcatcaggtacagggccaggaccgtaacggcgatgatgataagcgtgatgacgactttggccagcggtttgtagcggggattcatccagacaagcggcagggcaagcggcccgaggcacagcacggccagaacgatgctgccggtcgcaaagtaccatttcttcgagaccggcggcggggcggtccggctgcggccgtccagaaactcgccgcagtaccggcacttgatcgcctcggcctggatcgcctcggcgcagaacggacatttcttcatgtcgccctgcggcatctcgtgctcctgcattgcctgttccgtactttcatacgtgactgtttcggtcgccatactaacagttatcggctctttcgccaagcgccttgatcgaaaagacagaacgcaggacacagaatacaggacacagaatacaggacacagaatacaggacacaggatacaggacacaggatacagccgggtgcgatgtttcgcaccattcatttagtaaatcgtaaatagccaattgcaagggcctcggcaaaaaaactgaacctgcccaacaagaccagaaaatgtactgtattctaatttcccccggtccaatttttgtgaatcgaatgcgcaaaatacccgataaagacagggaacttgcgggcgtagcataacggtaatgcgctggttttccaagccagttagaaaggttcaattcctttcgcccgctttatccaggctgcatttgaattgcacagagtatcgagaaggccgtctctacgctcatagggttgttggatcccaaatcttagctctcaaatcgcaaatgacttgggccacagaggccacagagagcacagagctaaatcagcgaattagagaattggtgattggtcatcttgttatcctgtcgaaaatttagccacagagggcacagaggacacagagaaacagtccatttatgactcagccatagtcaatcgaaaatcgtcaatcgcaaatcgtaaatgacaagctatcccgttatcctgtcaaaaacttaaccgcagatggacgcggattcacgcagattcttcaacttcattattcgacattcgatgttcgatattcgccgagcacgcggtccgtgtcgttcgggcctgcgcgcgcaggcgtcccgagtgccagcgagggacctgcccttgccctcctgtattctgtgtcctgtattctgtcttttcccttgcttttcctgctccggcgtgctaaattcgcaccttgagcggcgtacagcacgaagagataatttgggaaacggcgaaatggcggggaaattgccggtttgagcgaaagagtaagcgatggctgatgtggtgcatattttcggcaacgatacgatgaaaattattgaggtcggagtgtagaagatgcacttgctttttattgacgaatccggttcgctgtctccaaagggaaaacataggcccgatgacaaatttgtcttgggcgggattatcatatctgaagatacatggtttaagatcgacgctgacttgaaagctttgaagaaaagatacgccgttgagaaggaaatcaagtggcgatatttctatcagaataaagacaagctaacaccaatctcccatcttgacgcagaccaaaaagaacaactcaggacggaaatctttggaatcatcgcccgctacaagtccatcaagatcatttccgtcgtagcggatgtgtcacagtgctatctgaaaccatacatccgaagcgacgacgaactttactggtatgcgtacaaacagctcatcgaaagattccagtattaccttcaggatttgaccaaagaagccggcggcaagatgaatgggattgttatctgcgaccacagggagcacaggcaggataaacgcctgcaggacatgcattacaaaatgttgtacggccaacagagatatgcgtcccatttcgacaatatccttgaaggagttttcattgttccgtcgcatttcagtaccggaatccagtttgctgacatggtggcaggcagcatgtaccgatggtatgccaagaacgatgatcgattctatgggcagatacgcggaagaataagaacaggacccgatgggagaatagatggatatgggattgtaaaattacactaaaaaaaaagacgccgtgtcaggattgctcctaaccctgcatttcgacgcagtcacggcgcatttaatattttaccgaaagcaacaaataaacgtcaattgaaatttgaaaaattctgtaaagaattataaaaggctacgtaaatggccatccgccaagatttttcaacctctccctttgagcagccggacccttattggtgctatgaacggaaaacacgcagcttcccaaaaaggcaggcccccggcgtgaacagatgtttgaggaacgaccaaatggcggaaaaagagacacagtttgggtttaaccacgaagacacgaagaatctaattgattttggccattccgattgctaaattcgcaccttgagcggcgtacatcacgaacagatatatttgaggaaataccaaattcttgtgtgtctgaagacccttggtgagccaaaaaggtttgccccattgggcatttttacaaatgcccaatggggcagtgcctgcgtaagatttcttgcgaaatcttacttgttatgacaagcacgcagacacggatcagttacaatactatgaaattaccatttaatagagtattttgtcaagcataaaccaaaatttttctggagaggaaatcatgggatcatacacactcggattggatattggttccaacagtattggttgggcattgctcgaaacgcatgaaacaccaagcatcgttgatattggcgtgcgagtcttcccggagggggtggatcgggatacgaaaggattagagaagtcgaaaaatgctacaagaagagaggcgagaggtgccagacgaacacaccagaggcgtaaccaacgaaaagaacaattgaaaaggactctgcaaagcgtatcgcttttaccgaacggtgagtcggcattgaggacgctctttcacaccagcccctaccaatcacgaaaaaaaggtttagatgagatacttgaaccttacgaatttgggagagtcctttatcatctgagccaacgtagaggcttcaagagcaacaggaaaagcggaaaagcaaaagaagatggtgttgtcataaaaggtgcaaacgcgctgcagacggaaatggccaacaagcagtgccggacgataggcgagtattttgcagggctgaatccagaggaacaacggataaggggaaagtacacattccggtcgatgtacgagcaggaattcgatcttttatgggccaagcagaaagaaatttatccggatgtactgacagaagatttacgaaaacagattcgtgatgagattatattcttccaaagaccgctgaagccgacggatgaattgattggcgaatgcgaattagagctgggccacaaacgctgtccgagaggcgattggtatgcgcggcgattccgcttgttgcaggacgtcaataacctgaaaatccaaaacccggacggcacgcaacaagaactctccggcgaccagcgaaagataatccttgatgagttgggccaaaaggaaaagctcactttcgacaaaattcgcgaaaagctggaactactggagactcagaagttcaacgcggaatacaaggtaaacaagagcggcaaaactgtcgaatcaatgaaaggagatgtctttgtcaccaagatgaggggccagagtatcttcgggtctaaaaagtgggatgcactggatgagcaagaaaagataaggttgaatgagtggctcgtggaacttgaggatgaccagctcgaagaaaaactgcgaagtgaatacggcttagataataagcagatagaaactgtcctgaaaataccgttgccgccggggtatatgagtttttcacgtaaggcgattataaagctccttgagttcatggagcagggcgctatcacgagcgaagcgatagctgttgcgtatcctgatagggaagcaaccattcagaagaacgagagtctcaatcaactgccgctgccggaggatttgcgtaacccgattgtgaataaggcattatttgaggtccgcaaggtggtgaatgctattattcgcaagtacggcaaggctgcgaagataaagatagagatggcaagggatgtgcagggcagcaggcaacagagagaggaactgcactggaagcaacgggaaaatgaggagaggaacaaggaggcacgcaagcggctgagagaagatattggaatcaccagtcctacacgcgatgacgttattaaatacaacctctgggacgaatgcgggaaggtttgcccatatacgggcaaacatatttcacaacaagctctttttggaccgaatcctgagtttcaggtggagcatattctgccgtacgaccgcagcttagacgacagttacatgaacaagacgctttgcgaggtccacgaaaatatacacgttaagaaaaatcagacgccctttgaggcgtatagtcacaaccccgagagatatgaacagataaagcagaacataaaaatcttgccctggccaaaacgaaaaaagttcctgcagaaagaaatagagctcgacgaacatatcagcagagagctcaacgacaccagatatatctgtaaagaagttgtaaggtacatgaaaaaactgggcggacatgtgacagggacaaggggcaagatgacagcagaacttcgacatcaatgggggcttgacggcatttttgatgaaattgggtcgaggcgtgatgatgaccaccgccgacacgccgttgatgccatcgtggtaggagttactgagaatgagcatttacggaggttagcaaaaagcaagtattcggttacgggtgaatcattcgaagcgccctgggttaatttcagaaatgatgtcagggaacaagttaagcgtataaatgtttcgcatagagtatgccggaaggtatcagggaagttgcacgaagagacgaattacgggcccacaggcaagaaggatgataagggtcaagatgtctttgtgtatcgcaaaaaacttgaggacttgactgggcccatggtttcagaaattgttgacaaagttgtacgccaaactgtcgaggataggttacttgaacacaatattgaccctcagaaggttaacaagatacctaaagaagtctggaacgtaccgctgtgcatgaaaacgacaagcggtggcaagagttccgtgataaagaaagtaagaatccaagccgtcttcaacaacctgattttgttacgggacacacagggaaaaccataccgaggtgtaaaaccaggcgacaaccatcacattgaaattctacagtacacagaccaaaagggcaaaacgaaaagggagggtaaagcagtaagcttgtttgaggccgcttcccgctcaagagcgcacgtgccagttgtgaaaaaattccacggagccaataaagaatttgtctgttcgctttgtaagggcgacatgtttatgttagagctaaagccgggagacaggattctaactcgtgttcaagagatatgggaaagtacaaacatagtgctgcgtccacatgtgaacgctgttgaagctggcgacatcaacaaaacggcaagtaaaataagaggttacaaagttacggtggatccgcttggtcggatttggccagcaaacgattgatttgggaggctgatattcaaacaagtgctccctcggttttgccgataatagagtatagacagccaacacgggacaaaaccgagagggcagaggatgatcaagcggattatcgagatatcatcggcacggacgcggctatcagtcaagtacggccagttgatcatcaaggacgacagcgaccaggtctcaagcattccctgtgaagacatcggcgtcttgttaatcgaccatcaagggacctgctatacccattgcgtctttaccgagcttttacggtgtggcacggctattgtgctgtgcgcgggtaatcatcacccggcggggatgctccttcctatcgtgagcaacagcgttcagacggaacgctttcgcgagcaaatcgaggccaaggagcccgttaagaaaaggctctggaagcagatcgttcaagccaagatcaaacatcaggcaaagctggtcggcaaagatagcgacatatacaaaacgctcatggtactaagagaccgcgtccgctccggcgaccccgaaaacatcgaggcgcaggccagcaagaagttctggccggtatatctgccgcaggtcgcgtttcgcagagacgctaacggcacgccgccgaacaacatgctcaattacggctacatggtcatgcgcgcggccgtagctcgcgcgctatgctctgccggtcttttgcctgcattaggcatccatcaccgcaaccggtataacgcattctgcttagcggacgatttaatcgagccattcaggggctttgtcgaatcaaaggtcagagacgtcttcttcggcagcgagccgacggacgatctcgaccagcccaccaaagccaagttgctgcaagtcttgtacgagccggtaacgatagctggattcgaaggcccgctgatggtcggcctgcaccgaacggctgcgtcgctgcagcggtgcttcgcaggagagcaagagtttctggatttgcctgagatatgattttaagcggatatagagctgtgtggatttttgccatgttcgacctgccgaccgatacaaaaaaagcaaggaaggactacacggattttcgcaaaaatctcttgaaagacggcttcagcatgttacaatattcggtatatgttaggcattgtgccagcgaggaaaacgccgatgttcactatggccggatcaagaattttttgcctcccgacggggaagtgcggcttattaccaccaccgataagcagtttggccggatgcacactttttggggaaaaatgcgaaaacccgcccctccagctccccgacagctcgaattattttagcaaattgagcccgcaagcccttgaaaatcaagggcttgcgggctttagattgtaactgatccgtgcctgagtgcaagccacaacccaataacgcttcggggttgttcaaggccaattgtaactgatccgtgcctgagtgcaagccacaacagtctgggcgagagacaggttgatgtccagattgtaactgatccgtgcctgagtgcaagccacaacaccggcaaggggatggctgggccaaatgttattgtaactgatccgtgcctgagtgcaagccacaacttatcgttatcgatttctttttcttggcaaattgtaactgatccgtgcctgagtgcaagccacaactgtttcaagcctgtaccctattcacttgtaattgtaactgatccgtgcctgagtgcaagccacaactccgaggccaaacggatcattgcagagtccattgtaactgatccgtgcctgagtgcaagccacaacatccacagttacgccctcaaagctgggtaattgtaactgatccgtgcctgagtgcaagccacaacccataacagtgaccaacaaggtcgatactattgtaactgatccgtgcctgagtgcaagccacaactcaatccagtaaccaagactttcttcaataattgtaactgatccgtgcctgagtgcaagccacaacaggggagcccatgtgcccttgagcgcttgaattgtaactgatccgtgcctgagtgcaagccacaacataaaagttaacctccattgcttataagcgattgtaactgatccgtgcctgagtgcaagccacaactgcttaccgacgattctcagccacacgtcgattgtaactgatccgtgcctgagtgcaagccacaaccagtaagatgatggcgtcacgctcctgtttattgtaactgatccgtgcctgagtgcaagccacaacgcgaggtccgagaccccgccggctgcagcgattgtaactgatccgtgcctgagtgcaagccacaacaatactgcgctggtctgccggcgagtagtattgtaactgatccgtgcctgagtgcaagccacaaccgactttaaccagggccaaggcgccgaatcattgtaactgatccgtgcctgagtgcaagccacaacttactttccgaggataatagtatattgggataattcgggggacagcctaatgtcatttacgatttctgtgcgttctccgcgttcatccttcggctacgctcaggacggcgtctgcggttattgaggatttattatttccggtgtgcattggtgttcattcgtggttagacttattaagactggccgataaggtaaagacagaagacaggatacagaatagaggagacaggagccaggaacaggtccctcgctggcgctcgggacgcctgtgtgcgcaggcccgaacgacgcggaccgcgtgctcggcgaatatccaagatcgaacaccgaatgccgaatatcgaaggctatgaaactgcgtctatcggcgttaatcagcggttaagaagagaatttagcatttagcatcgacataagaaagttgagtgcgtatgagatatgcaggacttaccgatgagccggaacgaagaaaacgggaacagggaagtcctcgcgacttccgagtgatgcagcaattcacatccgagacggccgcccggcaatgggaacggagaatgcaggcccagggctatgagggcaataccagcggccagggctggaaatacggctataccttttccagccgcagttagctcgcagaatccgcatgggcagcgaagctgcaccatcctaccaggcaggaagggcaagtatccagtatcgagaatccaaaaccagaattcgcgttcattagtgttaattcgtggttaaacttctgatgtccaatgtcgaaaaccaagaaaccgtgtcaatccgtgaaaatcccgtctaaatatttcagatcccggtataatgcgaacaaagtggggctgggctgcgtaaataggcttaaatccgttacagtgaaggtcatccggcgggtcgaaaaaaaatttcaaaaaatttcaatttttttctttttgccccttgacgatagtaatattcgggatagaataggcgaagcgcttgaggggtcagagaatgtattatctttctccggccggaccggcgcacgaaacaagtagctctttgacaagttaacagttaagccaaaatagcagcgaaagtgcagcagcttcggcgggatacgccttgccggagcgagcttaaaattagccgcactggacgctgaattcgcaagagtaacgacaccatgtttttcaatcgcgaattcgcgttctcggcggcgcaacacaatcagcactttcggtgcgtatgctaaagtgttgagcctttacgacgaaacctgccgacgcagaggtaatggtggacttgtccaccgaagccttggcgaaggcggattcgacgataaaaattgaagggtttgatcctggctcagaacgaacgctggcggcgtggctaagacatgcaagtcgaacggaccattaatttattagtggttagtggcgaaagggtgagtaacgggtgggtaacgtaccctgtgcatcgggatagcgtcagtagcttcggctactttccgaaaggggcggtaataccggatgatatcagaggccgatgggtctctgatcaaagatttatcagcacgggagcggcctgcctcctatcagcttgttggtgaggtaatggctcaccaaggcgatgacgggtagagggactgagaggttgttcctccacatcgggactgagacactgcccggacctccacggagggctgcagtaacgaatattgggcaatgggcgaaagcctgacccagcgacgccgcgtgcgggaggaagtccttcgggatgtaaaccgctgtcaggggtaagaaagtgcgcttcggtgcattgatcccccccagaggaagtcacggctaacttcgtgccagcagccgcggtaagacgaaggtggcaagcgttgttcggtatcactgggcttaaagcgtgtgtaggcggaaaagtaagcgttttgtgaaatcccccggcttaaccggggaactgcgtgacgaactgcttttcttgaggcaagtaggggtgcatggaactcttggtggagcggtggaatgcgtagatatcaagaggaacgccagtggtgaaaacggtgcactgggcttgttctgacgctgagacacgaaagcgtggggagcgaacgggattagataccccggtagtccacgccgtaaacgatgcctactaggttgtggaagttctgacacttgcacagccgaagcaaaagtgttaagtaggccgcctggggagtacggtcgcaa

SEQ ID NO: 4531 - DNA, 16716 bp, synthetic construct
  source 1..16716: mol_type = other DNA
  misc_feature 1..16716: note = Synthetic
cttgagcgtcagtgaattgttaatcgtaaccgtcccgccgctggcgatggtcgtgccgtaatccttcggctcacgcccgtcggttgtgtagtaaatcgttccgccgcctgttattgttacagttgagcccgcggcaatttcgccgccgaactgactaaacaccggtgccgctaccgtcggataaaatcctcgcgacggataaccattactaatcagccaattggtgcggttggggaaatatggaccaatccagccctcttcaatcgggtgactgggatttgtcagccggtcccgctcgttgtcccagtaagccggcgtatagagcggggcattgacatccttgaaatcatggacgaaatctccccatcgcaccgattcgccaagtatggctttctcaatttgacttgcccgaacctggtaacggtcgatgtttttctgggcggtcagggcaccgttgttgaacaagtgcttatgaactcggtcgccaagcagacgattatactcaggattattgtggagagcattgtgcatattcccgggacccttgtcgtagtaatcatagaaagggaagtcgtgaaactgggtatgctcccatatcgcaatttccgcgtcccaggtataaaatttccacttgtcgagaggcggaccgtttacatccaacggattgcgggtgcttcccgcgtaccagtttttggaaccccagtcccagtttgtaacgaatgtagtgtaaataatataatcgcacatctgtgcggcatcaacgtgctgggcaaactcggcgtaaacactcgcagtcaccggattgctatagctgaacggcgacagcaagcttcgcatataatcccaactgtcacgctgaccttccttgacttcaacgccccccacaccttcgatagttccctctattgcgtcgtaatcctcgcgctgacctccgagatgctcggcaaggaagggaccatccggccgttcgctggcctgatacagaccccagtaaagcccatcgaggtacacgtgaacaaaccgtgcatcgggcgacagataacccatatcccgcagcgaatcctgtgcaaaggtgtctttgaggtattgtgcccttttgctgctccatacaccgtcaagccagccccagtgataattcgccctcagcgaaaggttatctaagcgttttgcgccggtatttgggaaaagaggaaactcgagcttcgacggcccaaattcgctcttgaagaatatccgcatagaatgtttggaggtgtatgtcggccctttgctttgattgcccacgaggcgcaatcccgcgtttacctggaaatcggcgctgctgcaggggtcaaaatactctaccgaaacggggttttctatcgattcccaggggttaacgtatatgccaaccacggggtcgaagatatatttcatatcggtgacaatcgagagcgtcggtatcgccttcatcgcggtctcgaacctgctgctgtaacaggggtcgttaagaacacaggggtccatttcataatcggtaaaccctatgtcccattggacagggaagcccttcgaataggcatagctattgttctggttccttacgttattgaggaaaatgtaggtcgcggtatcgaccgtgctggccttgtagccgggcttaaatgccgcggcgcgaagacacgttgtgcccgtaatctgaattcgggcgtctggattgtaaattagcccgaccgtgtcggtgggggtgttgccgtcgagtgtgtattttatggtcgcatcgttatccttgcagaatagctccaccgtaaaattgctgtcgtagatgccgtgaggatggcttatatcaaccccatcgacaagccctaagtaaccctggctgttctgcgcccccggcgtagggaaacccatatatcgccagttgtagctcccgtccgggtaaggcccgaaagagatgtcgctgtcttgttcgccgaactcgatactgtcggccaaactcaggtcactaaaataaagcccgaccgcctcgcctcctttatccaacttgaacccgacgtggttggggccttcagttgtctcatcgtctgcccaaagcactaaatacccgtgcgccgggatagtggtttgagtcggggcgttactcggtatccgccatttatcgggggtattcaggtcgtcggtaatatacattccgccgatattgatggcttctgaaccggggttgtatatctctatccagtcctcgtactcgcccttgttgtcctttatcgtcgagtcgttagcggccataagctcgttgataagcggctgttcttcgaggaggttgatttgccagttttccgccaggagtgcaaaatcattaaaatcaacatcaccgtcgccgctgaaatccgcacagccagtccccggacatccggcgggcgccagccactggtcaacaaacttattcacgtcctgccggtcaaccttccagtcgagattcaaatcgcctgatatgtatggcggcacttcagccgctccaaacgctgccactgaatgtgccagacgattaccagtggctccggtgttatgctgccaacttatggttacttgtcccgccgtagcaacaggccttgtgcttcccgccgcagatgaactgttggctgatacgtcccaccgttccaccattccgcttccggtaggattaaatgagccactgttgcctgaaaccacagcatcaactacccaggcgccgttcgttaatgttgtgatattggtcgaaatggtgttttgttcggtattcgaattagttgccaccgcctctcttgccgtctgggcaacacccgtaagcgaaatagcgcctgcgtttttgttgtcgatgtttccggcgtaagtaacgaggacggtatatgtcccggcggcaggcaaactggaatcaagcatatagtagagttcagtttttcgctttgttgagccgacgatagcggtcgaaccggccaccagtgtcatatttacgccgttgtatttgacgctgcttatgaccaggtcggattcggtaccatcttcagcgccgactccgactatcagcatacggtcgctgcctgagccgatagtatgtgaccagcttattgtggtatcggcggtcgagctgaacgtgcaactggcattgtcaaatctgatggcccccctgacaagcggggaacagacggctataaaaagaaaaacgaaaaaagaccctaagtttttacccgttgtcggtagcattcacactcttctcaattttaaggccccggttatgccgcctgagccaataaaaaacaaccttatcttacgccgttagcttctgatttactcctccagtttggttagacgctatttgcaggcgtgtgattgctgcaacccgtgatttaacaaggaattgcgcacccattgataattatcatagcacattcggtcgaattagtcaatgaatttggccgaaaaacgccaaaaacgcccccgtgtccgtaaaacgtgtttttttcaggaccttagttttgcacccagttatcagacattgctgccaggtcttccaaatcaaaccagccattgacagggggaaagggctaagttattctaagggcgatataaaaggaacagccggcttttggccggctggtgtccgcgtgctttcgcacttgttgtgacaagcgctaaagcacaggtcagttacaattgatataaagaatagctgggaggaaaaaatagtcaagagggaaaactgaaattttttggagggctttatggattctcacacacttggtttagatatcggttcaaacagtatcggctgggcactactggaaacagaggggaaaccatcaatcgttgatatgggagtgcgggtttttccggagggggtggacagagacaccaaggggttggagaagtcgaaaaacgccacacgacgagaggcgaggggagcaagaacaacgcatcaaaggcgttctcaaagaaaagagcaattactaaaaacgctacaaggaataggatttctgccgacaaccgatacggaattaagaacgctgtttcatacaaatccatacggactacgaaaaaaggggcttgatgaaaaacttgaacgatatgagtttggtcgtgcgctttatcacataaatcaacggcggggtttcaaaagtaaccgaaaaagcgggaaagccaatgaagacggggttgtaataaaaggggcaaactcgctgcaaacagaaataaacgcaaaaggatttcggacgattggcgaatacttcgccggattgaaccctgaagaacaacggataagaggaaaatataccttcagaacaatgtacgcagacgaattcgacctgttgtgggcaaagcaaaaagagttttatcctgatgcgttaacggaagagttgcgtaagaaaatacgagacgagattgtatttttccaaagaccgctgaaacctcaagatgaaaaaatcgggaattgcgaacttgagccggaggagaaacgatgcccgcgcggggactggtatgcgagacgattcagattattgcaggacgtgaacaacctgaaaattcaaaaccctgacggctcagaaggtgttttgaataacgaacagcacgaggcacttctcgacaatctagggcgcaaggaaaaactgcgttttgatgagattcgcaagcaattcggttttattgaaacgcagaagttcaatgctgaatacagaatcggactcaaaggcaaaaaggtcgaatccattaagggcgatgcgtttgccacaacaatgggaagtaaaaaagtcttagggtctaaagtttgggacgcgatgaatgagtcgcagaaaatagaactaaatatggcatttgttgaactggaggatgatgcactggcggaaaaactcaagtcgcaatacggattaaacgacaagcaagttgagcaagcgatgaaaatatcgctaccacagggatatatgagtttttcgcgcaaggcgataatgaaacttttaccatttatggaagccggtgcaataacgagtgaggcgattgagaaatcgggatacaaccacaacaagacaacggacggtaaaaccgtcgaggagttgccattaccgccggatttaagaaatccaatagttcaaaaggcattgtttgaggttcgcaaggttatcaacgcgattgtccacgaatacggcaagccgggaaagatcaaaattgaaatggcaagggacgtgcagggaagcagtaagcaacgtgaagagttacattggaagcaacatgaaaataaagaaaggaacgaggaagcacgtaagcgattaaaagaagacatcaaaataaataatccaactcgcgacgatgttataaaatataatctttgggaagaatgcggcaaaagatgtccatacacaggcaagcatatctcgcaggaggcactttttgggtctaaccctggatttcaggtcgaacatatcttgccatacgatcgcagtttagacgatagttttatgaacaagacgctgtgcgaagctcacgagaacattcacgtaaagaaaaatcagacgccatacgaagcatacggccacctgccagaaagatacgaagagataaaacagaatataaaaattttgccttggccgaaacgaaagaagtttctgcaagaaaatattgaccttgaccagcatatagacagagaacttaacgataccagatatatctgcaaagaggtggtttcttatctcaagcaacttggagttaatgtgcgaggaacaaggggcaaaattaccaacgagttaaggcatcagtggggtttggacggggtttttgatgaaattgggacaaaacgagacgacgaccacagacgacatgccgtcgatgcggttgtagtaggtgttaccgaaaatgaacatttgcgccgattagcgaaaagcaaatatgcggtaaaaaacgaagcatttaactcgccttggccggatttcagagaagaggtaagagaaaacgttaagcagataaatgtctcacaccgtgtccagcgaaaagtatcgggcgcacttcacaaagaaaccaactatggggcaacaggcaaagaaggtttgtatgtatttcgcaaaaatctggaagatctgacactaccgatggtggaagatattgttgacccggtggcgcgcaaaattgtgaaaaaacggctggaagaaaaaagcattgacttaaacggtaaggacagaaaactgccaaaagagatttggaaagaacccttgtatatgaagacaaccaagagtaacaagcgtgtaccgataaaaaaggttagggtgtataacgtagccaaaaagatgattccaataaaagatcgctccggacagccatacagatatgttgagccggggagtaaccatcatattgagatatttgaattcacgtgtccggagaaaaaagggcaacgggattcaaagatagtcacaatgtttgacgcagttcaaagaagcataggtggacaacccgtagttcaaaagaatcatggtgaagatacccgctttgtctgctcacttgcgatcaatgatctggttatgatgaaaaacaaaagaaacgaaacagatctttaccgagttcagaaaatggatgcaaacaagatggttcgttttcgtcaccataccgcatcaacacttgaacgcaaggaaacatatatagacaaaacagcgcatctttttgagggttataaggttactgttgacccattaggcagggtttggccggcaaacgactaatatagggtaaattcgccaaaggcggataaagtgtgtttgcgatattgacgaatatattatcacggatttagaggaaggaagccgtgataaagaggataatagagatatcgcaggcgcggaggcacttagctgtccggctgggtcagctaatcatcaaagaaaatggcgatgagatatcatcgattccctgtgaagatattggcatattactcattgaccacccagccgttacatacacccattcggttttcacggagttaatccgcttcggggctgcggtagtattctgcgggggcaaccatcacccggcaggaatgcttttgcccatagaaggtaataccgtccagacagaacgatttcggcagcaaatcgaggcgaaagagccgataaaaaaacagttatggcggcagctcgtccgggcaaaaatcaaacatcaggccaaaattgcggggccggacagcgaggtctataaagaactgatggtcttacgggagcgggttcgcagcggtgacccggaaaatatagaggcacaggcaagcaaaaaattctggcccgcttttataaccactatcgaattcaaaagaaacatcgaaggactaccgccgaataaccttttgaattacggctacacagttatgcgtgcggctgtagcaagggcattgtgttcagcaggtctgcatccatcaatcgggcttcatcactgcaataaatacaacgcgttttgtcttgccgatgacgttttagaaccgttcaggggttttgtcgaagcgaaggtcaagcaaatctgcgaaacccaatcttccgtcgatgaattgacacagacgataaaggcgcaactattagaggtgctgtatcaggaagtaacaattggcaacaacgctggccccctgatggttggattgcatcgaactgcggcgagtttggtaaggtgtttcgcgggtgaacagaaagaaatggatttaccaaaactttagacacggatttacactgattaacactatcccaaaattgtaaaggactggattcccgcttacgcgggaatgacaacggaacatattatgatattaagcgggtatagagccgtgtggatttttgcgatgttcgatttgccgaccgacacaaaaaagtcgaggaaggactacaccgattttcgcaagaatcttttgaaaaacggctttacgatgctacaatattcggtgtatgtcaggcactgtgcaagcgaggaaaatgccgatgttcactataatagggtcaaagtttttcttcccgatgacggcgaagtctgccttgttaccattaccgataagcagttcggccgtatggaatctttctggggaaaaatgcgaaaaccaccccctccgcagcccagacaactcgaattattttaattcgagccgttcgcaaaaccttgctgcgcaaggccttgcgaacggcttattgtaactgacctgtgcctgagtgcaagccacaactgatgatgtaagatattaaatgcatgttatattgtaactgacctgtgcctgagtgcaagccacaacagcggcgaacacggcaagacggtattcttgattgtaactgacctgtgcctgagtgcaagccacaaccagtttttacggtgtatcggcatttgacgattgtaactgacctgtgcctgagtgcaagccacaactcataagcatttgtgtcaacatcaaatccaattgtaactgacctgtgcctgagtgcaagccacaacccaggtctatattgcttaccgccccgttatattgtaactgacctgtgcctgagtgcaagccacaacgcacatacgcattgctacctttcacaaacattgtaactgacctgtgcctgagtgcaagccacaaccgtacttctataagggttgggttgtcgaagattgtaactgacctgtgcctgagtgcaagccacaacacgtttcctgcttgggttcgacccgcaaatattgtaactgacctgtgcctgagtgcaagccacaaccgcaccttccacaatgaaacaaatgttatattgtaactgacctgtgcctgagtgcaagccacaacgctcatcaagtagtatcaaaggttgcttggattgtaactgacctgtgcctgagtgcaagccacaacaggtttaccatcgctgggacgaacagaaatattgtaactgacctgtgcctgagtgcaagccacaactcctgaacccaacttacctccagtccaagattgtaactgacctgtgccttttgtgcattttcgcggctgtatttctctgtggtctcagcgctctccgcggtaaaatctttttgcctgccctgcgtcggagcgaagcgcagacccctgcgccgtattttgccttgcgaagcgcagcggaggggggcaaaatgatgcaggggtagccccctcgtctacttatcgaagagaagtgcgggggtggttaaagttttaagtccggccggactgtgtaatctgcccggccaactgctctaaggtggcgtgcattcgcgggtcttttttctgcaggtcctcgattttaccgcaggcgtgcatcacggtcgtatggtcccggcctcccaaatgcccgccgatttcctcaaagctgtgctttgttagctgcctggccagatacatacaaatctgtctcggctcggctacgctctgggcgcgtttcttgctttgcaggtccgctaagcggacattgaagtggcgagccacaacgtcggtaatatcgctgattctgatgtgcctggtgctggcgtcaaactggccatcgagggcggtctgggccatttgaagggtgatttctttgccggtcgtcatcgagaccgcgtatatagtcgtcagcgccccttcaagctcccttatatttgcgtggaactttcgggcaatgtggccggcaacctcgtcgcttacctccagcccccgaagatgggcctttttctgcacaatggcgatgcgtgtttcatagctcggcgggtcgattcgagcgaccaatccccagttgaacctgctgataagccgctcttccagcgatggtatctcgcctggcgggctatcggcgctcaagatgatttgtttgccgttgctgtacagcgcgttgtatgtgtgaaaaaattcctcctggctttgttcgcgttcgcggaggaattgcacgtcgtcgatgatgagggtatcaaccgagcgaaatcggctctgaaatcccggcatattaccctgctcgattgcctgaatgaagcgattcacaaattcctcacagcttaaaagctggataacggcggagtgggatttgcgtttcatttcgtggcagacggcgtgaagaagatgggtcttgcccagtccggaatggccgtaaacgaacaggggattataggtgttgccgggcgactggcttacggcgacgcagcttgcatgcgccagccggttgcaggggccgactacgaaattgtcaaaagtataatcgggatgcagagtaggtccgtctttaggtctttgacctgctgaatccgtccggagcaaaccatcggcggaaaactgaacggatataagatggcccgttatctgctgggcggcctttgtgaaggcgctgcggcagttactgtgcaaaaactgggcgcaggcctcgtccgggcagccaacctcaagcgacccgcccgttaatctgacgacgcgaaggttgtcaaaccacttgcgtgtgtttacagggtcgagcgcctttgcacggtcaagtatatcggcgaaaatattttcgacttcaccggctgacaagtcatactcctttactcaaacctgcccaaaacaaacaggggctaaccgcagcaaataacttccttgttatttgaatggcggattcgataagcaggcctcagcaggcaagctcatcgcaagccaaaaacgacatcaccctctgtagtttttgattgccttccctgattttctctcaagaacaagcaaagtgtaacgacactgagcggatttgtcaaaataaatcgggaattgtgagagaaaaaaacataaatttaaaactcccggtataaagttttgggcttatcacttgaatttcctgtgatattctgcgaaactgccgtcgggcaaaaactatgggcatattttcaaaaacaatcggctacttcaaagaacgattaggcaagacccgcgacaggattagctcgtcattgtcggcggtgctgagtatcggcagaaatatcgacgatgatttgttagaccagctcgaagaaacgcttataaaagacgatatcggcgtcgaaacatcagcaaaactaatcaccgatttgcgggacgcctacaaaaaccgccgaatcggcaaaacagaagacatcattccttttctcaaagagcacatcaagggctattggcctcaccaggacaggcaattgcttatggcggccaaagggccgacggtgattttagtcgcaggcgttaatggctcaggcaaaactaccagtattgccaagcttgcctatattctcagcagaaatgaccgcaaggttatcgtcgcggcctgcgatacgtttagggcggcggcggttgagcaattatcgatttgggcaaaacgtatcggcgttgagattgtcaaacaccagatgggaagcgaccctgccgccgttgcatacgacgcctgcgaggcggcgacggcgagaggcgttgatttcctcattttagacaccgccggcagattgcacacacaaaaggacctgatgaagcaactgaccaaaatccgcgacgttgtcagccggaaaattgagggcgctccgaatgaggttttgcttgtgctcgacgccacaacgggccaaaacgcaatcgcccaggccaaaatgttcaccgaggccataaatgtttcgggaatcttcctggccaaattagacggcaccgcacgcggcggaattgtcatcgcgattaaagaccagctcaatatccccgtcaaattcgtcggcttaggcgaaaaacccgaagatatagccgaatttgacccggataccttcaccgaagcccttttcgcatagtttcaccgctgaggccccttcgactacgttcaggacacaggagcttcttcagggaagtttaaccgggcaaactccccgtggtatttcctcgcggccgcatcataagcacgggcagcatcaatttcactgtcgaatctgcctaacaatatcaatttcccctcgtacctgattcgtgcgtcccatttccctgtcgctttgacgaaatgaacaccgatatactttgaagttgtattttttctctttggcctgttttgcatattttgtgatcgtgtcgccagacgtaaattttcccttcgattatcaagggaatcgttgtttttgtggtcaacacaaaggccgggaggcggattcataatctctctgtgcatatacactctctttgttttcccggtctccgttttgacgttccgaacagcataatatctgttcccgcttccattgatggtccaattaaaattgccaagccgataataatcctcctggtccaaaatcgtccattccccttcgcccaaataaatcctgcgaaagtcataaccatatttttgccttcgataaaccatcgccggacacgcgcaaattctgtctaaccaatccggaacttttaattgaatagtaatcataatcctctccctttcttgccacagagcaaatttttttagccactccctaagggacgccttacggcgagaggccacagagttcacagagtttttctgatttaattacaatccgaaatctacaatctgaaatccgaaatggaacttctgttcccgctaccttgccccctccggggctgctcttgcacatctgtgcgactacttgcccattcctgggctgctcctttgctggtctccgcagtgctgcaaagaccagcaagtttgaattatatcaaataatacacttaagtcaaataaaatctaacatttttaagaaaaatatgtttggcgtcataagtccttgtggttgaagtagttaggaccgccaagaaacgagaagatagaagatggaaggcaaaaaggcagattctgactaaggtaaacaagcatcaaagccctgtttgcgtaagatatttgccacagagcactcctgtcctctttttctcttccataacagattaaaagaaattttcttcgacgggattgacgttttgctatattctaatagctaagtcgaacgcaatggcgcttccaaatatatgttacgctgaattcatgagcatgagtttggctgatacataggcgcgtctggacggaaattcttctatgaacttcatagtcattcttctgttggtggtcgcagctttttttgtgtttcgatatttcaacagacgatcaggagtagatttaagcgtactacccgaggtttttattgttgctgacattgaaacttcagggctgaatccagaaaaggacgaaattatagagatcgctgccattaaagtaaatcgaaactcagacttgcatcagtcttttgtggctatagtgaaaccaacaaaacctatatcaaagaaaattacgcaaattactgggatttctcaaaagatgctcgattcggaaggccagtccatagagtcggcgatgcatgaatttctagattttattggagatttgcgccttgttttctacaatgcgccttttgatgttgccttcctgcagaaagcagcatcgagaatcaaccgcaccttgcctaacccaatatccgatgcccttaagatggcaagaaaagcatttccaaaccaaaggagctacaatcttagcactttggcaaaaactggacatttggatgcgagtggtgcccatcgggcgctaaaggattgtaggatgacgatgacaatttatgccgcttcggcaaggcgtcttggaaggattagttagtttggtcgaattatgaacggacaaaaatttctcgaactcttagcggagcagattgtcgttgagttacagcccaacaaggcaataagtaaattcactacaaatcctgacatcattggtgcgtacgctgaggcaagtttgcgccaaatggtgtctcgtattgttcatcctttacgagtttcaactggggcagtgattagcgaacaactctgttcaattccgaataaagtcccccaaatagacacgataatctggataccttctcctgctccggccattttttgcgcgggcgaattcggccttgttccaagaggcagttgtatgggaatcatggaaatcaaacggtccgcttatccaaaagtcggaagaaaacttgaagaggctttggatgaaaaacgcgttttgagtttggtggcagaccagttgtttaaaacagacaacccagactttccagcgtatccggcacttggagtggtttgtatcagagaaaaagggaaatctgaccgccatcttgacaatcttattaagaagggccacgcgattattttgtttgagctatcaggagaggacttaacgccttgccctaaagacattcaccggcttctaaatttcctcatcttcactcggaaacgtgcgaaactctgggatggcgaagcactcgcaaacgtcccgcttttgaggagccagagcaaacagaatgtttcagacaaaacaggagagagggaggtaagtccgccataataagcgatttaaggaacgctttttcctcggaggtttctcgtccaggtaatcaggccgttgatggccagggccaagaagaagatatatagaacagcgacgaatttcacgtttcgggcgtaatacagccagatgcaaatcaaattaacgcaaatccagagcatccacgcctcgattttcttgtgggtcataaggccggctgcgacaaaacccattaccgtcgccgtcgcgtcgatgtatggatacgccgccggctgaggaaacaacaccggcagccagttatgaatcctgctcatcgtaaatcccaaactgactcccccggccgcaattatcacgcccgcaatcagccggcctttggctgtggtacgtgaaacatccggctcactttccccaccttcggctttttttctcgcggccagccagaccgaccagccgtagaagcagttgccgatgtagtagaactgctcgaaaaaatccgaataaaggcggacctggtagaacaaaccagcgaaaagcgaaaacgcgaatatccccaatggccacgcataaacaatctttctggttatcagcaggacatagacgacgattaacagcgtggccgacagctcgatatagctcatcgggtaaccgagaaccgtgaaaaacacattatccacatccaggaatttcatcagaacaccggcgaaggtttaaccgaaaataccggtatttacaattccgaactaaaaaaaagagggcacaagcaaaatgcttccgcccttttttcacaagtccgtcgtttctgtccctcgcgtcatctcataaagggacctacaaacggcgaggtttctcccctgcgcaggaaatgcccggatgggccttcacccagaaactccgaaaaccaggattcgtgctcgatttcctcgttgagaatcgcctgtgccagggcataagtcctgtggtctttgcccgcggtgatattgcagatatgggtgtagccctttactgcacatcgctccgccgcaaccagcactttcaaaattgccccaacgtcctttgggtcttttggcagcgatgccggggggcaggcggacatatcgtggaacacccgcatatcctttggcagttcgccgcctaattcatagattcgcggaaccagcgcctcgaagtgattgcggtcttctatgcgggccgtttcggcaatctcctttataccctcaccttccaggcctatcagattcgcccgaagaatcgtgtagtagtaaaacgttgtcagctcggccgcggcattcttcaccagcaactccaccagctctttgacgttcactcctgccttttcaaccatttctatcgctactcttgccattttcagctcctttcccaaaaaaaacttgaaattaaacgtttataagccaaaaaatattcacgtttatcagcatatttactacataagaattattcttattgcttggaaaaaatttttctactttcgatgacattcatcacacaaaccctccgccacgaccttgacgttgaatacgctgtatttttctctgattactgccggcaaacgcaacttgttcaggccctcgtcctgaaaatccacaattttattacatttcttacacctgaaatgatgatgcggcttcaaaaccgggtcatatcgcttggcttcaccgtacccttctacctcgtcaaccagccccatctctgaaaaggtagaaagcgttcgatataccgtatcaattgaaatatcagggaacaaaacccttactttattataaatattttcggcgcttggatggtccttggcgtcgattaaaacagagtaaatcgcaacacgctgcggagtgatgttaatgtcgcgctgcctgcatttttctcgaaataatcccaacaactctttttgtttcttcaatgctttagtctgcataccaaaatccgcccgccggagcttaaacacggcgttttataaaacattatcatattgtaaattgccatatagtattatataagaataattcttatttgttcaagaatttttttctttttccttttaattttacttttcctttgtgtcttcgcgtcttagtggcaaaagttgtaaaaaaaaacaggcctgcctgtccctgcaagtcgtaggcagggattacagtattcatagcagcgaaataaaacaggcctgtcctggtaaagcagaacaggcctttgtcccctccaaggaactcgtgtcataccctggggtaattgccaaggtattcagttttcggcaggccgcctgtcagcggcaacgcatattcgataaatgcgtcggtaacgccgttaccttcggaattgataaattcagcaggcattgattttgtcttttcggctacgctgctcaattcggtgg

SEQ ID NO: 4532 - DNA, 16445 bp, synthetic construct
  source 1..16445: mol_type = other DNA
  misc_feature 1..16445: note = Synthetic
cccgttcagcgaaaaccacccattacctttggacagcgctatgagaaacgattccgggcgacgcgcaaataggggcgatgcttacatcattgtgggaaaatacgtacgcgatggtgaagggatgacgacgcacgccaccggcccgccatttgccgcggcaagaatccggcacattgcctggcccgcggaggtcgtgtatcatgcctgtcgcggcccgaccgccggggcaaaggaccgctccaatgcatctttattcgatgggatcgcaacatgatgaggcaagtgggtcgtctgtggagagtgtcatcagttttagcgatgctcagcctggtctgcctgccggcgggtcgggcgtgccaggccgcggcaaacgccgcggcgcgggcagatggcaacgctgtggagaaagcgtcgctcgttgtctatgcggctgagaagtcgaagtacccggtcccccgctatctcaccggcaaattttgcgagcacctctatttcaacgtcaccaacggcatggaggcgcagattctgaagaacccgacgtttgccgattacccgttctcgaccgggcaaacctcgcccgacggcgtcgcgacgttccggtacgacccggatgacatcgcccgggagatgcgcggcagcgccggccgctggggctggccgccgtccgaggtcgacaatctgatcaaagcccgcaacgaggccctggcctgctggtgggcgaagctgggtcccgtcgagaccagtccggacgccgggccttacggcgggcgcgcccagcgcatcgccgcccgcgaacccggccagggcatcatgcaatggacgtacctgcctctgcaccgaatcagaaaatatgaggtcacgctctgggtgcgctcgcccgatgtcaatgcgctgacgctggcgttctacagtcccgccggcgaggtttgcgcgaaggccgccgtcgcgccggtcacggccgagtggcaaaagcttgatgccaggctggagatacccgccggccggccggacaaccaggcttacaaattcgccctgacggcggacaagccggggcagctcgtaatcgcccgcgcactgctatatcccgccgaccacatccacggggccgaccccgacgtgattcgcttgctcagggactcccacctgccgatcctccgctggcccggcggcaacttcgtcagcggctaccactggcgggacggcgtcggcccgctcgaacagcgccccaccctgccgaactacgcctggggccagcaggagaacaacctcttcggcaccgacgagttcctcgcgttctgccgtgccgtcggctgcgagccgatgatttgcgtgaacgccggcagcggcacgcccgaagaggcggccgcgtgggtcgagtactgcaacggctccgcccagaccccgatgggcaagctccgcgccgcccacggaaacccccaaccccacaatgtgaaacactgggagatcggcaacgagctttggggcggttggcagtatcactggacgaccgccgagggctacgtggaccgctaccggcaattcgtcaaagccatgctcgcagccgatcccgacatccaggtctacgcctgcggcgccccggtcctgtggggcaagcactggaacgacacgctcatcgccggcgcggccggcctgctgcatcgcacgacggaccacccactcatcggcggcaatgtttccgccgacgcggacccgctggacgccttccgcgatttcatggcggttccggaggttctggagcagaaatggtccgctctccgcgcggacatggaacgcggcggagtcgtcgagccccaactggcgatcaccgagctccagatgttcgcccgcgtcggcccgccgtcgtcgcccgaggccccgaagcggctgagccacgagaacctcgtgaacccggctacccacgctgaggggctctatgacgtactgatctaccacgcggccgtccggctggcgcccttcgtcgagatggtgacccattcggcgaccgtcaatcacggcggcggattgcgcaagagccaggagcgggtctgggccaatccctgccactacgcccagacgatgttcgccgcgctcgccgaggcgagccccgtcaagaccgacctgacctgccccacccaagaagcgcctctggtcctggccgacctgcgaaacgccacgaagagctggacctgcaagaccctcgacgtcctcgccgtccaagcccgtgacggcagcctgctgctatccatcgtgcacaaaggaacgcaggctgccgtcgagctggagatcgcgctgaaggacttccaaccggcggagaacgcggaaatccagacgctttcggcgaatgtgccgtgggcgcaaaacacgctggaggccccgaaagccgtcgcgcccgtcaccagcaccagaaagctgagcggccgagaattgtctctcaaactgcccccgttcagttacaccctcgtgcgaatcccgggacagtaattgcggattcaacccatgcagttgtagggtgggctccgcccaccgattctcacgaatacgggcaatagatggtgggcacagcccaccctacgaggctctgtcacccctgcgcaggcaggggggtccagccgacacccgaaccgcgaacgtgcttatgcctggggcacaattccaagcctgtaatatctggattcctgcctgcgcaggaatgacagagtcgtgtcgggcgggtctgcatttgcgagggtggcgagtgcatgccgtgcaaggctcattgtgttagaggctctgagaggataaagacgcacttgtgcgctggcggcgtgtcattcccgcgcaagcgggaatccaatccgcaatccgaaatcggcaatcggccatcggactatccgggtcggcggtcgaggacgcggccggtgccggcggcgaactggcggagggatttcggctcaacgaggatgaccttggcgtccacgtcgagcacggcctgaatgcgtttggccacctgggtccgcagggtctccagcgtcttgacttcatcgacggacgggatttcgtcggagatctccacgcggatttgaatcgtatcgacgccgccttcctggtccaggatgatctgatagtacgggctggtgccgtggaactcggacacgatctcttcgatctgggaggggaagaagcccacgccgccaaagagaatcaaatcgtcggtccggcccatcacgcgtgccatgcggacgaaggtccggccgcacgggcacggctcgggactcagggacgtgacgtcgcccgtccggtagcggatgagcgggaaaccctccttggtgagcgtggtcaggaccagctccccttcctcaccggcggggaccggctcgagggtttccgggttgatgacctcgacgaggaaatggtcctcgttgatgtgcaggccgctgtgcagatggcattcgccggcaacgcccggacccatgacctcggtcgggccgtaggtgtccatcgaggcgatgtgcagccgctcctccaactgccggcgcagcgcgtcgctccagcgctcgccgccgaagagcccgagccgcaggtgcagccgctcgggatggacctgtgcctcgtcgagtcccatcgcgatattcagggcatggctgggcgtggagatcagaacggtcgttttgaaatcccgcatgatgacgacctgcttggccacgctcgtggtcagcgaggcgggaatcacggacgcgccgatctgctcggcgccctggtggaagccgaagccctccgcgaacaggctgtagtgcagtgcgatctggacgacgtcgtgcgcggtcacgccggccgccgtaaggagccgggccacgcattccgtccagctccgcaggtcgttcaccgtgtagccgacgacgatgggcgtggggccccccaacgcggcatgatgcgttggggaccccttgccggtcgtgcccgaggtcgtgtggatgcgcacgatgtcacgaagcgggacggcgaacatgtcgtacggatagctcttttgcaggtcctccttcgtggtgaagggcagctcccgcagggcccgcacgtccttgagccgctccaggttcaccttctgggcgtcgaacgcggtgcggtagaaggcgacgctgcggtacacgcggttcaaggtggcttgcagccgctcgatctggagctgctccagctcttcgcggtccatcgtctcgcacgagtgattgtagagaattgcctggctcataggtccctcactcatccactgttcggtaatcctttccgaggtaggcccgctggacttccggattgtcacacagttggcgggcggtcccctgaaggacgatttgaccggtctcaatgacgtacccgcgatcggccacggccagggcggcccgggcgttttgctcgatcaggagaatcgtcaggccgttgcgcttgaggttggtgatggtcgcatagatatctttgaccacgagcggcgcgacgccgagcgacggctcatccatcatcagcagtcgcggctgggacatcagggcccgcccgatggccagcatctgctgctggccgccggagagcgtgcccgcgagctgatgggcccgctccttcaggatgccgaagaggccgtacacctgctccagactctcgtcgatgctctcgccgttggtcttacgccggcggcaataggcgccgagcaggagattctcccggacggtcagcgtgctgaagacgtgccggccctcggggaccaggcagcagccgcgcgcgacgaccttctccgccggctcgccgtgaatcttccgcttgtcgaacaggatttcgccggaccgcgccttcaggatgcccgcgatggtcttgagaagggtcgtcttgcccgcgccgttggccccgatgacggcgacggcctcgcccggcgagacgtggagcgaaatccccttgaggacccgcagcgggccatatccggcttcgaggttcaggaccttaagcatggccgtcccccaaatagacgcggatgacctcgggatggcgctgaatggccgccgggggtccctccgcgatcttctggccctggtcgaggacgacgacctcatccgagatgttcatgacgagggacatgtcgtgctccacgacgaggcacgtgacgccccggtcgcgaatcttgagaatcagttgggcgagctcctgcgtctcgtagatattgaggccggcggcaggctcatcgaggagcagcagcgccggctccgtcgccagggcccgcgcgaactccacgaggcgctgacggccgaagggcagatttgaggccgtctcgccgctgtgcgccgccaggcccagatcgtcgaggatggcccgcgccttcgcctgggtctcccggtcctcgcgccaagtccacggcagattcaacatgccggccaggaatcccgagcgcgtccgggtgtgccggcccatcatgacgttttcgagcaccgtcatgtggggaaagagtttcgttgtctggaacgtccgcgcgatcccgagggcggcgacggcgtgcggcttccaggccgtgatcggtttgccccggaagaggacctcgccctgctgaggcgtgagcgtgcccgcaatcaggttgaaaagggtcgtcttgcccgccccgttcggaccgatgacggccttgatggcgcccgacgggaccttgacactgacgtccttgaccgcgtgcacgccgccgaaggagcgatgcagattccgcgtttcgaggaggacgctatccatgtgacctcctcgtggacgtcgtgcgtccccgcacgaccctttggaaggcgagcgcggacgctcgccctaccgacgagaccgcgcgcaggttgggcacccgcagcaggccgttgggggcaaagagcatgatgaggatcaggatggccccgaagacggcgtcgtcgtacgtgccgaagacgccgcgcagggacaggaagttcaacaggacgcccatcaccagcgcgccccacaggttcgccatgccgccgaccgcgacaatggcgacgtagcgcacggatttcatgacggtcgcctcggaggggccgatgctcccgttgtaatgggtcagcaggactccgccgacggcggcgaacagggcgctcagaacgaaggtggcaagcttgtagcggtaggtatcgacgcccagcgagtgcgccgcttcttcgctctgatggatggagcgcagggcccggccgacgcgggaatggacgagattgattgccaggaccatggccgccaggaccacgacccaggcgatgtaataattttgcacccggaatagtgccctgccattgacctggaggccgtccacgaggcgaaaggccgggacgttcgagacgccgtcggcccgcccgaaaagctgcgccccgaggacgatgcggtagacgatcaggccaaagcccagggtggccatggccaggtagtgccccttgagccggatgacgggcaggccgatgaccagggcgatcaggcccgccagcagcagtgcggcaccgaaggccagccagggcgagaaggagaggacttccttgccgtagaggtcctgccactgcacgaccaagcctatcgagcgcagagcggcaatcgccggtgcgtcgcgaaaggcactgagattgcacgtggtcagtacggccgaggtgtagccgccgatggcgaagaagcccgcgtggcccagcgacgcctggcccgcgtagcccatgagcaggcacaggccaatcaccaccagggcgtagtaggccgacatcgtgacctgggtcatgtagtaggtcgcgtgggccgccgcgaggaccaggtgcagggcgacaatcagcagggcgctgacaaggacggggtaatacatccgcagccgcatcatgccgtcctcaaggcgctcacgtcacgccgggcgaacaggccgctgggacgaaagaccagaatcaacaggagcacgacaatcgccacgacctctttgtaggcggcggcgaactggctgaccgtgaacgcttcgagcaggccgagaaagaggcccgccaccacggccgccatgctgttgcccaggccgccgagaatggccaccgtgaagcccttgatggccagcggcgcgcccatgtcgtattgcgtctgcgtgaccggcgagatcacgcagcccgccagggcgccgatgccggcgctgagcatgaaggagagcgtgaccatccagcggtcattgataccgcagaggcgcgccgccatacggtcgtcggaacaggcgcgcatggcccggccgacggtcgtgaagcggaagaaaagcgtcagcgccgtgacgatgacggcgctgacgccgagaacccagagaatctgcggcgagatgtgggcgcccaggatggtgatggtcgagaccgtcgtgccggtgaagtacggcagggagcggaccgtctcatcccagatgtggagcatggcctcgcggatcacgatcgacaggccgatcgtgatcacgatcagccgcaggaccgaggcatcgcgcgcccgccggatgaagaccagctcgatgagcccgccgagggccgtcgtgagcaggaccgccagggcaatcgccaccggcagcgggacgacgcgggacaggctgatcgccgtcatcgccccgacgacgaggaactccccctgggcgaaattgatgacccccgtcgtgcagtagacgatattgaagccgatcgcggtgatcgcgtagatgctgccgacggtgatccccgagagactgtactgaacgatctgggggaagttcatcgtgactctgctccggcgggccgcccgcctcgaggttacttcttcttctcgtagatcgcgaacttgccgttcttgaccgtgagcatttcaaaggcgtcctggttcaggccgttgtggtcctggggcgagaaactgaaaattccgccggtcccgacgacacctttgaggttctcgatggcgtcgcgaaccttcgcggggtcggcgctgcccgccttcttgatcgcctcggtcaggatcaacagggcgtcgtaggcgtggccgccgaacgtgctcgcgtcttccttgtaccgcttctcgtagtcctgcttgtagctcatgaggactttcttctgcggattgctgccgggcagcgactccgccaccagcaggcgcccgcaggggaagatggtgccgttcgccgcctcgccgcccgcctgcacgtacttgatgttgccgaagccgtggctctggaacagcggcacgtcgaggccgatctgcttcatgttcttcgccaccaggctctgggccgggacgatcgaccagttcaccaccgccttcacgtcctgccctttgatcttcgtgagcacgtccgtcaggtccgtcgcctgcttgtcgtacacctccgagatcgcaatcgtaatcccatgctctccggcgagcttggccaactgcgcaccgcccgccaccccgaacccgtcattgctcgtgaccacgccgatcttggtaatccccatatccttcatcgtctggtagatacgcctgaccgcatcgctgtccttttgcggagttttgagcacccacgaggcgatcgggttgacgatgtcctcggcggcggcacaggaaagcagaatcgttttgccttcctggcagatgttcttgatggccatggtctcgccgctggtggaggggccgataatcgcgaggaccttctcctcgtcgatgagctgcttggtaagcgagatggcattttcgggcttactgccggaatccttcacgatgagcgtaatcttctggccgttgatgccgcccgcgctattgagcttctccacgaacatcatcgccgtcttctgctccggcgcgccgaggttcgaggccccgccggtgacggcgaaaatcgcaccgaccttaatcggggtcgcggccgcctgcttggccttctgcttgggactcttctcccgcttgccggactgcggggcaccgaggaccagccccacgatcaagatactgagcactactgccaatcgttttcccatggttgccttcctttctgacctccaatggtcacaaattccgaaatcgacaagcggcacgatgggccggccgcctgacctcgatggttcccggtcgtcacgacctgaccggcctggctggagggcccgccggatggcccgccgtcgcgatgccgcgccgccgcccgcggcacctgggctgcgcgagcctgggcagcgcttcgcagagccgtccgggtcgcgaccttcgcggcgccggcgtgtcccgccgcacgcgtcgcggccgggccggattgtcaaatccccttgacacgcacccacgccgctcgggggcctacccgtccggccgcacgccgctccgggacctgcgccgggcctttttcccggctcgccccggccgcgcagacagcccacgggctccaaacctgcgccctacattatcgcctccgcttgaccccgtcaaggccgcccccgccgattctacccccagccccggggacggaggacagaagacggaagacagtggaccgagaacggaaaactgcccgcctgaccgcagagtggaaaaagggtagggtgggctgtgcccaccgattccatctcagaaaccacaagaatacgaagaacgcgaagagtgatccagcctcagaggaataatccatcatcaatgcccaccgcctgccgcctccgcctgaccccgtcaaggccgcccccgccgattctacccccgtcccccgccactgttttgtcattcctgcgaaggcaggaatccaggtcttttccaccacagaggacacaccgaggaaataatcaattatcgatcatcaataatcaatccaaacggtcctttgggcgcctttctgagcaaaaactcgctcgctttgagcacttttgagcgccttttgatgccttttcggcacttttcgagccaccagcactccacgtgcagcttgaggcgggatttcctttgaacgggccaatcctcttggataaaatcatttcggatccacaggccgcctggagaagcacaaagatgcgtgtggcggagcagaagggagagtcctttgagggcccgattacaactcgaaccgcccgctctaaaaggtttaccccattgggcgttttgtgcaaacgcccaatggggcagagcctgcggaatctctcgccgaaaggcgagagtccttgttgtgacaagtccgcaggcgcggatcagttacaatatccgaatcctaacgccgggactgtcccggtgtcaagcacaaaagagtagttctttgtccggagaggaaaccatgagcggttacacactgggactagacatcggatcgaagagcattggatgggccttgatagataccgatggcaaacccagggtcatagatatgggagtaagggtctttccggagggtgtggaccgtgacaccaagggattggagaagtcgaagaacgcgacgcggagagaggcgcgcggcgcaagacgcacgcatcagaggcgcacacagagaaagcatcgtctcgtgagagtcctccgaggcgcaggcctactgcctgaagggcacgcggaactgaagtcgttgcttgcggccaatccctatccctaccgaaaaaagggattggacgagaggcttgaactgtggcaatttgggcgcgtgctctaccacctgagccagcgtcgaggcttcaagagcaatcgcaagggcggcgattcaaaggaagacggcgtcgttaagaaacaagccggcgaattgcagaagaagatcgacgcatccggctgccggaccatcggagagtatcttgctggcctgaaccctgatgagcagtgtatccgcggacaatacaccttccgcagcatgtacctgcgagagtttgacctgttgtgggcgaaacaagccgagcaccatccggacatcctgactgacgaattcagcaggaaggtgcgcgacgaaatcatatttttccaacgcccgctgaagccgacagatgacctgattggcccatgcgagttggagcccgaccagaaacgttgtccacgtgcggactggtatgcacgccggttcagattgctccaggatgtcaacaatctgatcatccagaacccggacggaacggaacagaagctgtcatccgatcagcgtaaggctctcctcattgagcttcgccagagggagaaactgccgttcgacaagattcgccagaagctggccctgctcgagacgcagaagttcaacgccgaatacagaatcgggccgagcggcaaaagagtcgaggcaatgaagggcgatagcttcgcagcggcaatgcggggtaagagcatcttcggagcggatagatgggacgtcatgggtgaacagcagaagatcaggcttaaccgcatgttcatcgagcttgaggacgatgatcttgcgcggagcctcgcgacggagtatggcctgaacgatgcacaggtccagagcgctatgaaagtgtcgttgcctcagggatatatgagtttctcgcaggaggccattgaaaagcttttgcccttcatggaatccggcgccctgacgcacgaggctatagagcaggctggttaccacgcgagagaggcagatggcgccgaggcggtgacgcacttgccgttgccgccagaattgcgaaatccaattgtgcagagggctttattcgaagtccgcaaggtagtcaacgcccttgtgcacacatacgataagccgccccgcataaaggtggaaatggcgagggatgttcagggcagtaggcgccagcgagaggaggtccattggaggatgttggagaacgaaaagaggaacgaggaggtacgcaagcgtttgagagaggacatagggatcagcaatcctacgagagacgatcttatcaagtacaagctttgggaagagtgcgggcggacatgcccgtacaccggacgccaaatctcccaggaagcactcttcgggccgaacccggagtgtcagattgagcatatccttccctatgaccggagtctcgacgacagcttcatgaatctgacgctgtgcgaagtgcacgagaacatacacgtcaagagaaaccaaacaccctttgaagcctaccacgaggacgcggaaaaatacgagcagattaagcagaacacaaaagtcttgccctgggcgaagcgtcagagattcctccaggagcagatcaacctcgacacgcagattgccagagagttgaacgatacgcgatacatctgtcgcgaaacggtcgcctacctgaagcagctcggtattcatgtacgcgggacaagaggcaaagtcacggcggagttgcgccaccagtgggggctggatagtatcttcacggaactgggcgtgcgccgggacgaggaccatcgacgccacgctgttgatgcgcttgtagtggcggtcacggataccgagcacctgcgcgggttggccgccagcaagtatgcagtcgtgggggcaagattcgagaccccatgggccacgttcagggacgaggctagagagaaggtaaaacaaatcaacgtatcgcaccgcgtctgtcggaaggtgtccggtgccctccatgaagaaacgaactatggagcgacgggcctcaaggacgaaaatgggcaggatttctacgtgtatcgcaagaggctcgaagacctgactacggcgatggtcgataagatcgtcgatcccgtcgtccgcgacattgtcagacagcgactccttcagaaaggcatcgatcctgctgcagccaacagaaaagtgccaaaggaggtatggaaagagcgcctctacatgaggcgtacgaaaagcagtcgccaggtggaaataaagagcgtgagaatttgggatgtgaaaaccaacgcgatctcgtttagggacgacgcgggtcatgcatatcgcgcggtcgattccggcaacaaccatcacatcgagatattcgaatatgtggatgacaaaggaaagacacgccgggatggacgagtggtcacactgtttgaggcggtccagaggagcctgcgcggcgaccctgtcgtgcaaaaaggctccagcgacggcagaagatttgtttgctcggctgcgataaacgagatgttcctgctccagttcgatgacgggcatgaggaattattcagagtccagaaaatcagcagtaatcagcagatattcctccggcagcacaccttcggtggcgacattcagaaatgcaaggctataagcaagtatcccaacaccctaaaagggcggaaggtttccgttgatccgattggtaggatctggcccgcgaacgactgaagctggacttcgacaacgaccaaagcgaatcgtcggagctgccgataatcgaacagtgggacagaccgggaaacggtgaagggcggcgcggtgatcaagcgcattgtcgagatttcgtcggcacggacgttcttatcggtccgctacgggcagttggtcatcaaggagaatggcaacgagctatcacagattccctgtgaggatatcggcatcctgctcgtcgaccacccggggacgagttatacgcacagcgtcttcaccgagttattggacaaaggggcggcaattgtcctgtgcggcggaaatcaccacccggcggcaatgcttctgccgctcgaaagcaatagcgagcagggcgagcgattccgaaaacagattgaggccaaagaacctgtcaagaagcgtctctggaagcaactcgtccaggcgaagattcagcatcaggccaaagtggccggcagggatacagaaacctatgcggccctgatgatcctgcgtcagcgagtccgctcgggcgacccctcgaacgtcgaggcccaggccagccggaagttctgggcgtcctatttgcagggcatcgagttccaccgggatgtggccggtgccccgccgaacaacctgctcaattacggctacaccgtcatgcgtgccgccgtggcacgagccctgtgctctgccgggctgctcccctgtctcggtatccatcactgcaaccgctacaatgcgtttgctctggccgatgacgtgatggagccgttccgtggctttgtcgaggccagggtaaaacagatatgcgaggcggacggagcgcccgatgaactcacacaacctctgaaagcccgattgctggaggtactctatgatcctgtgacgatcagcggctttcagggcccgctcatggtcgccttgcatcgaacggccgcgtccctccaacgctgcttcgccggggagcaggagcaactggagttgccagaaccatgattctcagcgggtatcgggccatgtggattctcgccatgtttgatctgccgacggacaccaaaaaagcacgcaaagactacacccattttcgcaaacacctcttgaaagacggcttcactatgctacaatattcggtgtatgttcggcattgtgcgagcgaggaaaacgccgatgtccattacaagcgcgtcaagagttttctgcccgacgatggggaagtgcgcctcatcacgatcaccgataaacagttcgggcgcatggaaactcattggggaaaaatgcgaaaaccagcccgaccgatgccccgacaactcgaattattctagaaattctgctcgcaaacccttggaagccaaaggtttacgatccgactattgtaactgatccgcgtctgagggcaagtcacaacggtggtgacgcgcgtgcgctgctcaccatgattgtaactgatccgcgtctgagggcaagtcacaacctagaactaaaccttagtagaagagcaggaattgtaactgatccgcgtctgagggcaagtcacaacaccgccggcccgcagcgctgaactcgaaaaattgtaactgatccgcgtctgagggcaagtcacaacacagagctgattgctcagctcgtgtagaacattgtaactgatccgcgtctgagggcaagtcacaacacaagccatctttccctcgtttctctagcaattgtaactgatccgcgtctgagggcaagtcacaacacaacccgatcaccaaagtcgtctttctcaattgtaactgatccgcgtctgagggcaagtcacaactcagccgtctgcgcataccattgagctgaaattgtaactgatccgcgtctgagggcaagtcacaactctgcccacacgggcacgatagtctgtaaattgtaactgatccgcgtctgagggcaagtcacaacacaagcagcagcggaacgactactggcagaattgtaactgatccgcgtctgagggcaagtcacaactcgctcacccgcatgtaactctgatgatagattgtaactgatccgcgtctgagggcaagtcacaaccttcatggtcaatctgccatatcctgccgaattgtaactgatccgcgtctgagggcaagtcacaaccatccgggaagccgataagctcgggatctattgtaactgatccgcgtctgagggcaagtcacaactgccggacggtccgaccctgacggacgaagattgtaactgatccgcgtctgagggcaagtcacaactcgaacgtctgcttgtgcagcgggtgctgaattgtaactgatccgcgtctgagggcaagtcacaacttgatgagtggcttgtctattgtcgtcgaaattgtaactgatccgcgtctgagggcaagtcacaacttctcgtgcgccgggccaataagcaaatcaattgtaactgatccgcgtctgagggcaagtcacaaccaccctccctatcggccggccggcccgcccattgtaactgatccgcgtctgagggcaagtcacaacacgtaacgcgcagtgacctgcgaccggcctattgtaactgatccgcgtctgagggcaagtcacaactccttccggtaggcgtcgagagcggctctattgtaactggtccgcgtctgagggcaagccacaacactgtccttggtggtttcccactatctgcgttcatcggcgttcatctgcggcttcatcgtctctgtgcactcggtgctctctgtggcaaaaaaggaatcggtgggcatagcccaccctaccttgtttttctctgcggtcctttgcgtcctttgcggttgcgctttctctttcgtggttgggtgggtcgggttttctgctggtcgtagacggcctggcggcgttcggggggccattcgtcggggaagttgaggaaggcgtacacaccgtgcagctcgaccgccttgcggtcgcgggcgcgggcggcctcgacctcgtccgcgaacgtgccgatgtgggtcttgtgcttgttaaagatgatttccgcaatccactttcgcttccgccggcagtagtacaggcccttgaatcgcgaagtgcggcggcgggacggggcccgattgtagccgttctgggcctgtgtgcagacgcgcagattgctctggcggttgaacaggccgttaccgtcgatgtggtcgacgaccatgcctttgggcgggtgcatgatctcgcgatgcatcaggatggtgcgacggttctcgctccgg

SEQ ID NO: 4533 - DNA, 15762 bp, synthetic construct
  source 1..15762: mol_type = other DNA
  misc_feature 1..15762: note = Synthetic
cttatttcgtcaggcagattattttctatcttcagtgctgctgccagtgtcgaacccttgaatggaaaatgaatatgatttcccgccttatagaccagtaaaagcaagcctaacgcctgttgagcatccagatttatcgcaggcagaaaaaactccggatctattacataacagcgggccttattgtcaaaactacagggcacacccactttccgcagttcattcaaatctctgaaaaccattcgtttgcttaccttcaatatttcagctaaatccttaaccccataaggctggcctgattgcaatgccgtcaggaggtgaattaccctgctgactctgctggttttcataatgtatcctctattacattacagattataattacccagattataattacatagattataattacccagattataattacatagattataattatatagattataagcattagaccagtttatatcaagagttttggggatgcttttgacaggtttcggatggcctatttaaggcttgaaaagtgccaaatgagatatttgaagcttgatgcctcgtatttgaagtttacccaccttgtcggcaggtttcatataaggtttatcaagcttgcttcataacatttcatgcttgatatgaggcatttcaagcttgaaaaatggtttttcatgtttgatttgtcgtgtttcaagcttgcttcttcgtgtttcatatttgattctttgattttcaagtttgctttttcgtatttcatgcttgatattcgacgtttcaagcttgatttaaggcatttcaaactgattattcagcccttaaaaatagaaatccgtgtttttggcatcaaaaatggggtttactgtcgagctgcctatctttcatatttcaaagaaaatttttaattttttatgaatatttgttctgtaagaaacgccatatacccagagacacaggagggacgaggagagtgtgtctctggagtttataactatggaaaaagatgaaggtatagaaaaagataaggatatggaaaacaaggatattaagaatcttgctgaacatttggtagggaaggttcgtgatgcccgcataaaaggcaagaaaaaactatctgataaccagcctgaagtggaaccagtaaaggaatagagacaatagtcaggatgaccttatttaatctccttctggcagccaggccacctataaaaaaggggtggcctgattgattttcaggttctagaaaatttattaattaatttaaatgatgcagctttaattctgaataatttattatgaaaaaccaattgcactgcctgttgttcaaatatttaaacataaaatcccttatagtgtcagaatatgacactgcaaaacgattaaagcattttatcctctatctattcttgcccagtttaacacaaaggctttatattggattttaaagcgtttaaatgcgatttttatttgacgttttaggtattttccctgataatatagtagtgtagaggcaatttctaaagattcatttcttctgctgatggctgtccgactgcggcagtggccttcgccgcgacgagcccatttttagaggttgcctttttaaaaatccggattgtaaatgcaacttggctttgcagtcctcaaggtcgttgtgggctcaaatctgatttgcactttgaaattaattaatgaaggattttattttaaattcaggaggaatcaaacatgaaaattaatgacctcgttgttaaaattcaaaagaatggtaaagaatcaaaatattctttggtcgatttcctaaaacataaaacaagacttgatttaaaaaccaaacctgataatcaaaaacaagaacaaattaaaattgaaatttctaacagaaataatgaagaaactttagaaactatccctgatgtagttgaatacaccgatttcgaaatttccaatttaaataacattaaaaatgagcaactaaaggagctaataagtgatttagcattagaaccacttgtaggtgatgaaacaaatatagagaaacttaattttgccaaaatggactatgaccaagttcatcgagaaactatagatattaaatcctgtcgtactaatatttttgtggccgtgctctccgtcctcggtgcaattggtgtagccataatcggattaaaaacaaatccgtcatttaaccgatggttgtttttagcatcattgttaccactattattattaacagcggcaattttatcgacttttcataaagctcgcggacttaaccgccgtcttagctatctcgaagcattgagtgaatatctgtcaaggggcaaaacgcctcaatattggcgtagttggccaaaggctcaacgcgtttctgaaaaatgtttgtgtggtttcaaaaaggataaggacaataaacaattctgttcgaaacaagaacaatgcaaagaaacggctaaaaaaaatgcaatccctttggacaaatatttaccctcatttccacacttattaaagaacttcacatctctgactgggcattgctatttcactgcatatttaattactgttatctgttcgatatatgctctgattacaacattaaatgttcgttatggtatatcttttcaagatttttataagccatgtttagctggtcttcttggcggcttggcggtctctatcttaaatcgttttgataaatcaaaagcaaaaaatgtattctatggcatagttattttcctattaatagcagtcccaatcattttttctctactcgctgcttctgaaagtcaacataaatgggcaatttatagctcgtatatttttggaaccatcttttttgtctttattatttacgtcggtaatgttctcgttgaacaaagtaaaaatattaacataggccgttattctattgaacgtttttatcagatttggaaataccggatgcaccattgtatttatatgaacaaataaattaaaggaaaataaataaaatgaatgacctgtgcctcaccagataagctgagggcgagagagttaaaatcttgcttgatttcccggaatttgctatagaaaagatgggtttgaattatggttattaattaaaaggaatatgctatgagtaaaacatggtctaatgctggaaactatggttcaatacactatacgtgtagtttctgtggtaactctattgcttcgaatgttggtttccaaacacaagatggaacttcaaagattcgtatttgtcattactgtgattgcccaacattttttccctctccgagtcaagcaattcccggctcgcccatgggcaatcctgttaaaaacatcaatgatgctaatcttgctgctctttacgaggaagccagacgatgtgccacggtaaatgcttatacggccgctgtacttgcctgtcgcaaaatcttaatgcacatcgctgtcgataaaggcgacaaacctgggaaaaactttattcaatacatcgaatacctagcagctaacaattatattccaccggatgctaaaggttgggtgaaccacatccgtgaaaaaggaaacgaagccaaccatgaaatcgttctaatggctgaaaaagatgccgagaacttaataagcttcattgagatgttgctcaaggtcatttatgaattcccggctaaaatcccaattactaaagattcttgaaaattgccacaatacaacagacaaaaaaatacaacacactctacaattgattttaagaagcatacattcaatttaaggagcggaaaggaaccatgaccaataaccctctccaaatctccgccaagaacttaggcgaattggcaatgccggattagactctaactacgtacttaaccttttgaagcggatttttgatttatactttactcaaaagaaacctgatgtatccggagatattcgttattcaatttgccatgtagatgttattatgtatagagatcaaatcaaaactacatgaaagaaatgactcggctatggctacaaaaagaataaccgtaaagcaacttgcccaagaggccggacttgatactgatgatgtcctcatagcattatgggatgctggatataataatatcactggcccaaatgatagatttggaaaacaagagtcgaatcgagccagaagggcccttggacttgccactcgcaaagaacttagaacttttacttattggatgaaattgttgggcatagatgaacgaggatttaaagatttacttgctaaactcgatgttcctcttaaggaaaaatcacataagttaaagcaaaaagctttatcgaaacttaaggccgaggctcgcaaacatggaatcgatcccataaccggtggaattgtgaccccaaaagatgttcggggtaaagcaatcaaaatatctgttttcaaatggagaacacctggacacgtacgtgatataaattggcttgatgaaaagcaagttaaagcaatacactttgaattagtgaatgatttttcatctggtcctgacccaattattccaccaggtgttaaaagcgaatccctgctcggctcggcagtattccgacctagaaccgctttaggaaagactctgaaatatccaactgtcgaaacatctgcggcagcgatgcttcattcacttattcttgaccacccattccacaatggcaacaaacgtactgcgttagtagcaatgttggtattccttgacaagaatggatttaccccagattttaatcaggatgaagcatttaaactggttttgcagattgctcagcattctatcactgattttagtcccgataatctcgcagatcgagaagtgcttacagtagcagaatggctctgtagtcgctgccgaattactgaaataggtaatcatccaattccttttcgtaaactccgccagatattgaaaaaatatgattgcaggttgagttcacctactgggagtaaagtaactatcgagcgcacaatatcagtaaaggcgatatttaaaaaaacacaaatactccgcaatcaaataccataccacgacgaaggtcaagatgttggacaaacaatattaaagaaacttcggaaagaccttcatttagacgattctcacggaatagattctcactccttctatacgaaagaacctacaaaagcaagtgattttatagcgtggtatagtcagacccttaagagattagcaaaacgttaaatatcttaaccataatcaatgaccgcactaaacgatgcaaattaatagttaaattttctgtgttctctgtagcaaaggattcatgaaactacaatttgacgcaaaaattttatgcccgaccaaacaattgaatgcctatgcatttataaaagcaatcactcctaaccatttaacaatacattactaaaaaaaattaaaatttttattttttattaaactcacctttttaatcatccgattagttcagaacgcaactggggccaacatctttgaggatgctcaaaggactaaactcacagcctaatagcttttttaaaaaacacgaattgattcagtttacgtattccttttaccggttgcgctgtccgtaaacgaaaagtttacggtaaacagtaagctgatgatagctatccattaaacgaaaaatactacgaaaattccctgctgaacagaggcacaacagaaaaacaggctaaacaactttttaacaggataaatgccattttacaagactgtgaatttaagttcatgtctgatatttcggccagtaaaattcaaaactggcttgcagaaaagcggaaaccgataaaatccaaagatgacaaaatccgtgaaggagcaagtataaggacaagcaatttttatttacaggcatttaagcagttttgccgctggcttgtagcggataaccgaatgccggaaaacccgattgcttaccttcaagggcaaaatcccaattctgatattcgacaccagcgcagggcattaaattttgaagagattcaaaaactgctttgcgaaactaaaaccgcttctgtttttcaatcaatgaatggctttgaaagatatatgctttatgctttggctctggcaaccggattcagggctgctgaacttgcaagcctgttatggcagggtttagaacttgacagcgatagcccgactataactatcagcgcaggatataccaaaaacagaaaagaagccaccctgccgctgcggaatgatatagcggaactattcaggaaatggcagacagaaaagaacttcaattctaaaaataaggtgtttaacaacttcaacaaaaacaaggctgcaaaaatgctccggtatgatttagacagagctgggattgaataccaagaccaaaccggcagatttgccgattttcacagtctaaggcatagctttataacaaacatcggcaaaaccggcgcaagtatcaaagaacaccagagccttgcccgacacagcaaagctgaccttactttaggggtctatactcatttgagcatatctgatgaacggagagccattgagaaaatgccctctttcatagaacctcaaatacaacacaatcaggcaaaatcagcaaaaaccggaacagataacctgccgctgaataccctgaatcacgtctcaaaagaatcgataccggaattgacacctgatttgacaccttctgcttactttgataataaccgaccaacaatgaaagagactgattggcaaacagatggtgctataagcaagtctctaaacagtgaagaattaggcactgaaaaaacccatttggctacaggtggaaacaacaggcggcggtgggattcgaacccacgaataacggttttgcaaaccgtcgccttgggccgcttggctacgccgccagatggtatttagtatttggtatctggtatttggtatattgaatgccgccagtggcggcactaccaaatactaacgactaaagactgtcgactaacgactctcaaaaaatgggccgggcaggattcgaacctgcgtagacttacgccaacggatttacagtccgtcccctttagccgctcgggcaccgacccgtaaagtcatatcaaaaataaaaaatcaaatatcaaaattgcggaatcccgacaagtcggggtgatattttataatgttaatattatcagataataatgctgtttgcaatccttcgtttagtcgctggtatatggtatttagtagatggtcgatagttacaggagccgctgggggcgggatttttttgaaaaatgaggtgatttttagggaaattttgaaaaaatgagggagtttttgatgaatttttcgagtttttgagggattttaagccacagagaacaccgaaaacacagaggttattgctttaaagcagtcccagtaaatcgggactgtaaatccaaacaaaaccctctttaaagtaaactttaaccgggtttagtatttgccttttccatccctaaaggattatgccttaaagcaaataattcaatagtagttatgaaataagggcttaaaaaggtttaccccacaggcctttttcaaggcctgtggggcagagcctgcgactttcgtcttgttatgaaaagtcacaggtcgagattagttacactgacaattactataactttacttctggacaaatcaagtaatttttgtataattttcactggacaaatattcagagagaaaaatattcttatcttattagcaggaggtaagttatggctcatacactcggattggatattgggtcaaacagcatcggttgggcaatccttgacaaagaaaaacaacgattgattgatatgggagttcgtgtttttcccgaaggagtggacaaagataaggggttggaaaaatcaaaaaacgctacccgaagagaagcaagaggtgcaaggcggacccgtcagagacgaaatcaaagaaaacaagatttggttaaaactctacaaacagcgggattgctgccacaaactgaatctgaaataattaccctatttcagaaaaaacctaatccgtacgaaatccgaaaaaaaggactagatagcaaacttgaactttacgaattcggcagagtgctttatcatttgagccagcgcagaggctttaagagcaatcgcaaaagcggtgaatcaaaagatgacggcaaagtcaaaaaagaagccggcgaactccagaagaaaatagatgctgcaaactgccggacaataggagaatattttgccggcctaaatccggatgaacaacgaattcgcgggcgatatacttttcggtcaatgtacgaaaaagagtttggtttgctctgggcaaagcaatccgaattttatcctcaaattcttactgaaaatctgctaaagaaaatatgtgatgagattatattctttcaaaggccaatgaagcccgcagatgaactaatcggcaattgcgaacttgagccaggcgaaaaacgatgccccaaaagcgactggtttgccagaagattcaggatgctgcaagatgtcaataatcttaaaattcaaaatccagacggcactgaaaacaaattaaatgacgaacagcgacaggaattgcttaaagaattatcacagaagaaagaactgccttttgataaattgcgggaaaagctgggacttttagactcccaaaaattcaaccttgaacaaaggggcaagataaaaaatctaaagggtgatggttttgcaacagcgatgagaagcaaaaatgttttcggtgccaaagcatgggatgcaatgaatgaacaggaaaaaataatactcaacaatgcttttatagaacttgaggacgatgagcttataaaatttctcatcgcagaatataatttgagccaagagcagattgaaaccgcaatgaaagctccattgccgcaaaagtatatgagtttttctcgcaaggcaattctaaaactcttgctgtttatggaacagggctgcttaacttccgaggcgattgagaaggcaggctacagacgcgatgagggtggaagtttggcaatgatagacaagttacctctgccgccggatttgagaaatccgattgtgcaaaaagctatgtttgaagttcgcaaattagttaatgccgttataggtcgatacggcaaacccaaaagcatagtgattgaaatggcaagagatgtgcatggtagtcttagtcaaagggaggaattgcattggcagatattggaaaatgaaaaacggaacgaggacgtgaaagcaaaattgagaaacgatattgatattgtcaagccgagccgggatgatgttataaaatataaattatgggaagagtgtggcagaaagtgcccatatacgggcaaaagtatttcgcaaaatgctcttttcggacaaaatccggaattccaaattgagcatattttgccttatgaccgcagcttagacgatagttatatgaataagacgctttgcgatgttcacgagaatatccaaattaagcaaagccaaacgccttatgaagcatataatcaccagcccgaaaagtatgagcagattttacaaagggtaacaggttctgatatgccatatccgaaaaagaagaaattctggcagaaagaattagacctcgacaagcatatcgaaagagagcttaacgatacaagatatatttgcaaagaaacgataaactatcttaaacagcttggggtttatgtacgcggaacacgaggcaaaattacaagcgaattgcggcatcaatggggtttggatggtattttcgatgaacttggcgtttggcgaaacgatgaccatcgcaggcatgctgttgatgcggctgtggtggctgttactgaaaacgaacatttgcgccgacttgcaaaaagcaaatatgcagtttcaggagttgtttttgagccgccttggccaaatttcagagaagagacaagagagaatgtaaagcaaatcaatgtatcgcatcgtgtccggcggaaagtttcagggcaattgcacgaagaaacagcttatgggccaaccggtaaaaaagatgaaaatgaccaatttgtttttgtttaccgtaaaaaacttgaagatttaacattgccgatgatagaaaaaattgttgaccctgtcgtacgccagattgtcaaagaccgacttgaggaacaaagaaaaaagaatgataaggctgttgtcggcaataaaattttcaaaaatgtctgggcagagcctttgtatatgaaaaacacaaagagcgacaaaaaagtgccgataaagaaagtcagaattgaaaacattgccagtaatgtaatagaaatgaaggataaattcggcaaagtttatcgtgccgtagaaccgggcaaaaatcatcatatcgaaatttttgaatataccgacaagaaaggtgaaaccaatagagacagcagagttattactatgttcgatgcggtacaaagaagccggcaaggaaaacccgtcgtttgtaaagattacggcgatggtagaaaatttatctgttctttagtaattaacgatttagttatgatgaaaaataaaaccggcgaaatggatatttaccgagtccaaaaaatggacatcaataaaatggtcagatttcgtcaccataccgcatcaacaattgataagaaagaaacttacatagataaaacagcacatctttttgaaggccgtaaaataactgtagatttgcttggcaggatatgtccggccaatgattaaaaagataattgagatttcgcggggacggacttctctttcaataaaatacgggcagttgataattcggcaggacggaaaagaaacatcatctatcccatgtgaagacatcggcgtgcttttagttgacaatcaagcgacaaattacactcactcggttttcaccgaactattaaaatgcggcgcggctgtggtgctttgcgacagtaatcatttgccgagcggtatgcttttgccgatagaagccaatacaatccagacggaaagatacgcaaaacaaataaacgcaaaagaacccttaaaaaagaaactctggcagcagatagtccgggcaaaaatcaaacatcaggcaaaacttatcaaggatgatacgcaaacacataaagcattaacggtattgataagtcaagttcgcagcggcgaccctgccaatatcgaggcgcgggcaagtaaactattctggagcgcatatattcagggaatggaatttcggcgggatgcggaaggcaagccgccgaataatcttttaaattacggttatatggtaatgcgggctgcggtagcaagggctatttgcagcgcgggattattgccttcggtcggacttcatcatcgaaatagatataacgcattttgtcttgcggatgatttggtcgagccactgcggggatttgtcgaggcgaaggtaagagaaattgtaaagagcggtgaagattatgaagagcttacacaaacgataaaagcgaaactgcttgaggtgctttacgaagaggtagaaatatctgattataagggacccttaatggtcgggcttcatcgaacggcggcatcgcttgtaagatgcttttgcggagaacagaaggaaattgaattaccgagaatttagccactaagacacgaaggcgcaaagttttgataattaattccttttttcttagtgtcttggtgcctttgtggctacgaaaattatgataataagcgggtatagagcggtgtggatatttgcgatgtttgatttgccgacggatacggacaaggcgaaaaaagattatacgcattttagaaaaaatcttttaaaagacggctttgctatgctacaatactcagtatatgcaaggcactgtgcaagtgaggaaaatgccgatgttcattaccgcaggatacagatttttttgccgccggatggcgaggttcggcttgttacaatcactgacaaacagtttgaaaaaatgcagattttctggggaaaaatgcgaaaaccgacacctccagcacccaaacagcttgaattattttagagtgtttttgctgcaagtccttttcagacaacaggttacggaactccgagtgtaactaatcccgacctgatgtcaatccacaacagtcctttcaacttaccggcgcgggtaaatagtgtaactaatcccgacctgatgtcaatccacaacgctattatgattctgaaacttccggccaagagtgtaactaatcccgacctgatgtcaatccacaactcggaaggacaaatcaatcaagtgtgtggtagtgtaactaatcccgacctgatgtcaatccacaacgactaatctgctccagaagatattcctgccagtgtaactaatcccgacctgatgtcaatccacaaccgatttcctgtgctttgccgtttgccccacagtgtaactaatcccgacctgatgtcaatccacaacgttctgtcgatgaggcgcgtgtttacaatgagtgtaactaatcccgacctgatgtcaatccacaacgccatttaatagcttatgtcccgtttaacaagtgtaactaatcccgacctgatgtcaatccacaacagtttatcgactgtatcgcagaggcagtcaagtgtaactaatcccgacctgatgtcaatccacaacgctttgcatgcaagtgtcttataaagacgcagtgtaactaatcccgacctgatgtcaatccacaacatccacagtatcaactgcaacttttcaatgagtgtaactaatcccgacctgatgtcaatccacaacgataaggtgcagtttgtatgaaatgattatagtgtaactaatcccgacctgatgtcaatccacaactttagtcgtattcttttagggtctattaaagtgtaactaatcccgacctgatgtcaatccacaacgggtgggacttacattcatactacggcgaagtgtaacaaatcccgacctgatgtcaatccacaacgccatatgaacactgggacggggggggcgccgaaagcaaaggcaacaatttgctatgcaccgtgtatagtacactaaaaaattgccatagagaaaataaatccgccggaggcgaataagtttatgaccatttgccggattttttggtctgcggtttgggaaacccggcaagggtcgacaaggattttttgagttcctcttcgggcaattcataatccgtaagtttcccgcttaaatatgcatcgtagccggtcaggtccatcaaaccgtgaccgctgtaattgaagagaatggttttttctttgccctcctgttttgcttttattgccttgtctattacagcagctaccgcatggcttgtttccggcgcgcagataaagccttcggttttcgcccaaagaagagcggactcataacatttgagctgatggtatgcctttggcttaaataaaccttcaacaattccctgacagaccagcggagccatgccgtgatagcgcaggccgccggcatgaatcggggcaggcacaaacgcatgaccgagcgtgtacattgctaaaagaggcgtcatacaggcagtatcgccgtggtcataagcgaactcgccgcgagtcatcgtaggacaggccgtaggctcgacgggaataatctcgatatcggcgccgtttatcttgtcggcgacgaacgggaacgccaatcccgcgaaattgcttccgccgccggcacagccgataacgacgtccggctttttgatgccggccatccttagctgctgcttggcttcgagaccaattatcgtctgatgaagcataacgtgatttaaaacgctgccgagtgaataacgtgttttgccggttttgtcatggacggcatcttcaattgcctcggaaattgcgatgccgagcgagccgggcgtattgggcatttccttaaggatttttcgtccgaattctgtctggctgctggggcttgcgacgcagtttgcaccccagagctgcatcataaactttctgtagggtttctggtcgaagctgatgcgaaccatataaaccttgcattcgagtccaagcagattacaggcaaaggcaagggcacagccccactgccctgcccctgtttctgttgtcattctctttattccgaataccttgttataatacgcctgtgccacggatgtattgggtttatgactgccgggagggctgacactttcgtccttgtaatagatttttgcaggcgtatcgagatatttttcaagaaaaagggccctgcgaagcggcgtcggccgccagcgatataaaatgtccagcacatcctgcggaatgtcaatccatctttgcgtgctgacctcctgctcgataatattcatcgggaaaaccggggccagcatatcaggcgttataggtttgctgttcggtcccagcggcggctggagcggattaggtaaatcagccgcgaggttgtaccactgttttggtatgtccttttcgtgaagaactattttcatgtccatcggctctcttcttctcacaattcgtattcttttaccccatttccatcccgaagtaatctttagcattgttatagcagatatcctcaaccatctggccaagaagttttaaatctttcggaaccagaccggcttcgacatcgctgccgaggatattgcacagaaccctgcggaaatattcatgccgaggataagaaaggaaacttctcgaatctgtaagcataccgataaacctgctcaaaagccccatatttgacaatgcgttgatttgtttggccatcccatctttctggtcgagaaaccaccagcctgagccgaactgcattttgccggggacggagccatcctgaaaattgccgagcattgtcgccagaagctcattatcgcgaggattgagattataaagaatcgttttcggcagcttgctgtgcgaatcgagcctgtcgaggaattttgccagcggttttgcgatttcaaaatcgccgatggaatcaaaacccgtatccggcccaagcgctttaaacatcctcgtgttgttatttcgcagtgcgcccagatgaagctgctgagcccagcctttttcggcatccatcagggcgaactcatacatcatagcagacttgaatttcagcatttcttcaagaacaaggtctttacccttccgtattttggcgaatattttttcaatctcagaggcggtgaaatcggccgcataggcagtttcgattccatggtcgctgagccgacagccggcggcgtggaaataaccatgtctttttctgaacgcttcaatgtaactatcgaaactttttatttccatatcggcggcctgctgcagtttgcatatccattcgttcaatgccttgatattttcaacagccattcccttgtcgggccgccaggccggataaacctttatttcaaaaccgtcggcagcaatttttttatgatgccgcaaatcatcggtcgggtcatcggtagtgcagacgagctttacattcatctgccgcataattccgcgtgcgctgaacttcggcgattttaaaagttcattgcatctgtcataaatttccctcgctgtttcggggcagagcagtttatcgctgatgccgaaaggctttttgagctccatgtgcgtccagtgatacagcgggttgcgaaggcaagacggcacggtcttcgcccatatttggaatttctcccagtcactcgcatcgccggtacagtagcgttcgtcgacgccattagttctcatcgcccgccatttatagtggtcgccgcagagccatatttgtgttatattt

SEQ ID NO: 4534 - DNA, 14781 bp, synthetic construct
  source 1..14781: mol_type = other DNA
  misc_feature 1..14781: note = Synthetic
gtgggcctggctgcaaaactttcgccgacttgttgttcgttatgaatatcgtcttaaaaactttctcgccatgattcagcttggctgtattgttatcctccttcggagggttttgggatgacttctaatcaaaaggactatgacactgcccgccttgcgtcgctttaacgattcttaaagtagccaatgattctcaaagtagtccataagtatatacacatatacttatatactttatgtcacatcagttagcactccctgccctgccgacttgcctgcccctgcaagcagtaggcaggggtccggctatgtgcgggacgaagtcggaagctttagcggagcagggtcctctgtcatcgatagccggtttagacgttgaagcggaagttgatgacgtcgccgtcgcggacgacgtattcttttccttcaaggcggattttgccggcggccttgatggccttttcaccgcccaactgttttatgtcatcgaagccaaaggtctcggcccttatgaagccgcgtttgatgtcagagtggactttgcccgcggcgtcatgggcgattgtgccctgcctgatgggccaggcgcgaacctcgtcggggccgacggtaagaaagctaatcaggcccagcgtcttgtagcaggcgtggacgaatttagcgacggcggactcggtaatgcccatatcggccataaagtcggctctcgattcggggtcaagctgggcgagttcatattcgagttttgcgctgatggttattacgggagtattgggggcggttatgtcggcgaaatcgaagcttttggcgaggtcggattcgccgacgttggcggcaacaaccatcggcttgagcgtaagaaagccgagcgactttatcatttcaagctcggcgtcggtttgaatagcggaacgaatcggcttttcatcctcaatcgtctgctggagttttttctggagggcgagttcggctttatcgtgggactgagttgcagctggtttctttgcctgtttttccagattttcgatgcgggtcgtcacaagcgcaaggtcggcaagcaacagctcggtcagaagctcagcgaggtcctttgcggggtcgacacggccgcggtaaggcgggatggacgggtcatcgaaggcgcgaacaaccgggatgaggaggtcggcgaccctgaccttttcgaggaggtgcttggcggcgtgccgcccgtggtcgtcggtgaagttgaagccgggcaagtcaatgcagtcaatagcagcgtggactatttttttgggtttgtaaatttcggcgagccagtcgagccgagtgtcgggcacggaaacaatcgcctcttcgatagcgggcgagccgatgggggcgagcggccggccgctcatggcggaaaaaagcccgctcttgcccgatcccaacagaccaatcagtgcgaccttcacaatgacatctccgttcaacaacccccggcagaaccgggggctaaatatgggggcaattatatatgagtcgcgggcgcaaaacaagcacttgtagcggataacttggatggattgaacaggagaacaggcaagcagaaggcaaaaggactgaattgacagaaaatggtatcagaggtaaggtgatactggcagaaaaagggttgcccgcagccactcgttagaatgactgcgggcatagcccgcgcgcttacgcgcttgttgtgacaagcacgcaagcacaggtcagttacaattgagataaagaatagccgggaggcaagaaaaagtcaagaggtatttgcgaaaaatttggaggacaatatgaattcttgtacacttggactggatattggctcaaacagcattggctgggcattactggaaacagagggaaaaccatcaatcgttgatatgggggtgcgggtttttcccgaaggagtggacaaagacaccaaaggactggaaaaatcaaaaaacgccacacggagagagtcgcgaggggcgaggcgatctcatcagagacgtaatctgcgaaaagagcaactgttaaggactttgcagatagcggggttactaccaaagggggaatccgcgataacgtcgctgttccaaaagaacgcttacgaactgcgtaaaaaaggactggataagaaactggaactttttgaatttgggcggattctttaccacataaaccagcggaggggttttaagagcaaccgcaagagcggggactcgaaagagaacgggacggttaagaaagaagcaggagagcttcagagaaaaattgaagcggctggccgtcgaacaattggtgagtattttgcgggtataaatccggaggagcagcggattcgtaagcggtacacattccggtcaatgtatgagaatgaatttgatttgctgtgggcaaagcagttggaattttatccacaagtgcttacaggggagcttcgcaagaagattcgtgatgagattatattttttcaaaggccattgaaaccaacagacaaactaatcggggaatgtgagttggaacccggggagaaacgatgtcctcgcggggactggcattcaaggcggttcagattattgcaggatgtaaacaacctgaagattcaaaaccctgatggttctgatgacaagttgagtgatgagcaatgcaaggcacttcttgatgagcttgggtgtgaggagaaactgagttttgacgagattcgccagaaatttggtcttatagaaacgcagaagttcaatgccgaatatagaattggcacaaaaggtaaaagggtcgaatcaatcaagggggacgtttttgcggcaaagatggggagtaagaaggtttttggtgctaaagcgtgggatgggatgaacgagcagcagaagatggaacttaatgcggcatttgtggaactggaggatgacgcactggcggagaaactcaaatcgcaatatggattaaacgacaagcaaatagagcaagcgatgaaggtatcgttgccgcagggatatatgagcttttcgcgtaaggcgattatgaagttgttgccttttatggagcagggtgcaataacgagcgaagcgaaagaaaaggctggatacaaccagaatagggtaacggacgggaaaaccgtcgataagctgtcattgccacccgacttgagaaatccaatagtccaaaaggcattgtttgaggttcgcaaggttgtcaacgcaattgtccacgaatacggcaagccgggaaagattaaaatcgagatggcgagggaagggcagggaagcagtaagcaacgagaagagttacattggaagcaagttgagaacaaagaaagaaacgaggaagtccgaaaccgactaatgcaggatatgaacatcctcaatccgcgtcgggacgacgttatcaagtacaagctgtgggaggaatgcggaaaggtttgtccttatacaggcaaacatatttcgcaggaagcgttgttcggaaagaaccctgaattccaaatcgagcatattctgccatacgaccgtagtttagatgacagttatatgaataagacgctgtgcgaagtccacgagaacatacacatcaagaaaagccaaacaccttatgaggcatacgggcacgagacgcagaaatatgaggagattcttacgcgggtgaataaatcgcaaatgccttatccgaaaaagaggaagttcttgcaaaaggaaatcgacctcgacaagcatattgagagagaacttaacgataccagatatatctgcaaagaggtggtttcttatctcaagcaacttggcgttaatgtgcgaggaacgaggggtaaaattaccagcgagttaaggcatcagtggggtttggacggggtttttgatgaaattggaacaaaacgagacgacgaccacagacgacatgccgtcgatgcggttgtagtaggtgttaccgaaaatgaacatttgcgccgactggcaaaaagcaaatatgcggtaaaggacgagacatttgacccgccctggccggatttcagagaagaggttcgggagaacgtaaagcagataaacgtttcccaccgtgtccggcgaaaggtgtcaggcgcacttcacaaagaaaccaactatggggcaacagataaagaagatttgtatgtatttcgcaaaaatctggaagatctgacactaccgatggtgaaagatattgttgaccctgtggtgcgcgaaattgtgaaaaaccggctggaaaaaaaaggcgttgacttaaatggtaaggacagaaaaccaccaaaagaggtttggaaagaatctttgtatatgagaacaaccaagagcaaaaagcaggtgccgataaggaaagttagggtctatagcgtggctaagaaggtgattccgatgaaagaccgttcgggccagccatacagatacgtcgagccggggagtaaccatcatattgaaatatttgagttcactaacccggagaagaaagaacaaagagattcaaaagtagtcacaatgtttgacgcagttcaaagaagcgtaggtggacaaccagttgtgcaaaagaatcatggtgaagatacccgctttatctgctcgcttgcgattaacgacctggttatgatgaaaaataagaggggcgaaatggatctttatcgagttcagaaaatggatgcgaacaagatggtccgttttcgtcaccatacagcatcaacgattgaacggaaggaaacatacatagacaagacagcgcatcttttcgagggtcataaggttacggttgacccattgggtcgggtgtggccagcaaacgattaggggtttttaactgcgatatatcgctgatagcaaaagtcggtctttgggattgccgataaaaaagaggagtttgggcaagcccaaaggcaggcgagaatgataaagcgcatagttgagatatcgcaggcacggacccggctgtcgattcggcttggccagttgatagtcaaaagcgacgaggtcgaggaacggagcataccctgtgaggatataggtatcctgttagtcgagcatccggggacgacatatacacattcggttttcactgaattactcaaacagggtgcggcggtggtgttctgcgggggcgaccatcagccggcgggaatgcttttacccatcgaaggaaataccgttcaggcagaacggttccggcagcaaatcgaagcgaaagagccgacgaagaagcagttatggcgacaactcgtccgcgcaaaaatcaaacatcaggcaaagattgcgggaccagacagtgaggtttacaaagagttgcttgcgttgcgccatcgggttcggtcaggcgacccggacaatatcgaggcacagacaagcaagaaatactggcccgccttcataagcacaattgatttcaggagggacattgaggggccgccgccgaataatcttttgaattacggatatatggttatgcgtgcggctgttgcaagagcgctttgctcggcgggattgcacccatccatcgggcttcatcactgcaacaaatataacgcgttttgtcttgccgatgacgtattggagccattcaggggatttgtggaatctaaggtaaagcagatttgcgagacgcaaacggctatcgacgatttgacacagccgataaaggcgcaattgctggaggtgctctatcaggagataactataggtgatattgcggggcctctaatggttggactgcatcgaacggcggcaagtttagtgagatgtttcgcaggcgagcagaaagagatggatttaccggtattatgattctgagcgggtatagagccgtgtggatttttgcgatgttcgatttgccgacagacacgaaaaaggcgcggaaggactataccaactttcgcaagaatctcttgaaaaacggctttacgatgttacaatattcggtgtatgtgaggcactgtgccagcgaggaaaacgccgatgttcactacaacagggtcaaagtttttctgcccgatgacggcgaagtccgccttgttaccattacggataagcagttcggacgtatggagtcattctggggaaaaatgcgaaaaccaccccctccgcaaccccggcagctcgaattattttaattcgagctgttcgcaacccctcgctgcgcaagggcttgcgaacggcctattgtaactgacctgtgcctgagtgcaagccacaactaacaactgcaacatatgatacctcacagtattgtaactgacctgtgcctgagtgcaagccacaacgattcgtatatccgaaaaatagcagtgtttattgtaactgacctgtgcctgagtgcaagccacaactttaatgacagcaatgatttaaggataaaaattgtaactgacctgtgcctgagtgcaagccacaacctggagtagcgactatagacatagacaccaattgtaactgacctgtgcctgagtgcaagccacaaccatcaaaagggtatccaaataccgcactacattgtaactgacctgtgcctgagtgcaagccacaacgctgacgtgtagtcagccaatttatgagggattgtaactgacctgtgcctgagtgcaagccacaactaaccggccgctacgtcttcctcgagatagattgtaactgacctgtgcctgagtgcaagccacaacaacagccattgagagcgttttgccgcctcaattgtaactgacctgtgcctgagtgcaagccacaacgcggaaagcaccgggacagaaaaagagcatcgcatcctaaaacctcggggtaatttgcttgacgacttgtccgcctttggcggagataatccgatttcctttccttcatcgtcccttgtccgtcgctcttttaccgaccagccattacaggtccgttcctttaataattgaaaggtcaatggttttgagttggggcaagcaggagaggtattgacggaaggggatgggtcgagttaaatatcgcggcttgtgaattcattactcgtctcgatgaggcccgcttcgcccgataagcgaggcgagcatcgagccgaggtcggaaaggatggcttatatggatatgaaggtaagcaaaagggcacagcaggtgcccccgtcagctacgttagcagtgacggcaagagcgaaagagttgaaggcacagggcgtcaacgtcatcggcttcggcgcaggcgagccggatttcgacacgccggattacatcaaagaagcagccatagcggcgctaaaggccggcaaaaccaaatacacgccggcatcggggacggctgcgcttaaaaaggcgattgctgaaaaattgcaaagggaaaataatctcgaatacaagccggagcagattgtcgtcaatatcggagccaaacactcggtctatggcgcgatgcaggcagtgctggacccgggcgacgtcgtgatactgccgacgccatactgggtgacgtaccctgagacgataaagctggccggcgcgaaggtaaggggcgtaaagaccagcagacagaacaactataagattacgcctgagcagttgaaaaaggccatcggcgaaaggacgcggatgttcgtgctgaattcgccgaacaatccgggcgggtttacctatacgccggatgagcttgccgcacttgccggagtgctcgaaggaaccaacgtggctgtgctgtcggacgagatttacgaacggctgatttacggcgacacaaaattcgtaagctttgcctcgctgagcagggatgcctacgagcggacgctaaccatcaacggcttcagcaagacgtattcgatgaccggctggcggctgggctatacggctgggcctgttgatgtgatacaggcgatgggccgattgcaggaccattcgacatccaacgccgtcaccttcgcacaggatgcagcaattgcggctctgaatgatacggagggaaccgctgagaaaatgcgggtcgagttcgagaaacgcgccaaatatatggttgagcgattaaacgccataaagggcgtaaaatgcacccagccaacaggcgccttttactgcttcccggatgtctcaaaacactacggcaaaaccaaaaacggtattgagttaaaaggcagtatggattttgcaaaggcgctcctcgaacaggccaacgtggccgtcgtgccgggcctgcctttcggctgcgacaaaaacatccgcctcagcttcgccacttcaatgcaaaacatcaaagagggcctcgaccgtatcgaaaactggctgggttcgtaatttgcctgcccctgcaagttgtaggcaggggtcgttcgtatttcgtagttcggatgccgggtccccgctaaagacatgcggggatcttcgctgcgatacgagaggcggggaaagtgcactatgagggttagtagatactatataagtatatgcgtatatacttatggactgcttcaagagacaaggtctttggatgagggatttgtgattgatattgagtgggcagataattatatagtccttttgattaatcaaaaggactatagaccataaaccgcccactcccgctaggtgttattgccacttactggaaaccaacctcaccaactttataatcaattcgcatatccgcaataggtgttattaacacctactgaacactgcctgctgtttaaggtctaatgtctgtggtctttggtctatcgtctgcctatcgaacaggcagcgttcttgacgatatatagattaaggcgtattatgcgtggcagaagatgtaatactcagcgggcttgtttagtcgtaaggtttttagcgacaagacgttgcgaaagagtggtgttggcctaaaaggataaagaggaattatggcggaactgatacaggagaataagcgggcgctggcccccgctgcttcgcttttgcgaagcaaaacggcgatggtcatcggctggatagcgatgctggtctttgccattcacgccagcactcgtatggtgggcgccggtgacacgtgggtggcaatggcgtgcgggaggcacttcatcaatcacggcgtggataccaacgagccgttcagcgcaaactcccacagggcgggaccaacgccggaagagataaagagctggccgcagtgggcgcagcggattacagacaaagtaggtcttgataccgttaaatactggcaccccaccggctgggtcaatcagaactggctgacccacgtgatgttttactggctgacgcacctgtcgccttttgcggacgcggataacttgtccttcaatacgctggtttactggaaatttacgatatatattcttaccgtaatctgcgtttactatacggggctggcgctgggagttaacccggcgttatcggcggcttttgcctgtgcggcgatgttcatcagcaggtcgttcctggatgtaaggcccgcgggattttcaaatctgcttgtggccgtgtttatactgacgcttgtgctggccacctatcgccatcatctttacatctggctgttggtgccggcaaccgttttctggtcgaacgtccacggcgggtacatctacgtctttataatgcttgtgccggtcgtggtgctgcgcttattgacgatactttcgagaaggccgacggtctcgatgcatagtattctgacgtggcttgcgctttatgccgcgatatttaaatatacaaatcatgagccgctttcgccggttgcgccgctgcatgacaagctgttggcatttatggttctgcttatggtgggcagcgttgtgctgctgcggattaagtcggtgcagtcgccgcttttctacggttatcatatcgttgcgtcgcttatagtatttctggcccttttcagccgccttttccccggtgccctgccgggctattcgccggaggcgtccggataccttgaggacagccggctatcgtttttcttggccttcgtcgccgcggtcggtttgggaattatagtgacgcttttgaaagaccggctgattgtgacaacgcctgcggcggtgtggcacacagttggcgccggggcggctgcttttgtagcgtcgattctctttaatccgtttcatttaaccaacctgacacatacgcttgtaatcagcatcagcccgaacgccgagggctggcgaaatgttcatgaatggtggggggcgttcaagtgggataatcccgtagggacgggatttccgttccttgtgatgctgatagtcggcggtgggctgttagtgctgtggttgttcagccgactgttgataccgaaacagcttaaaatgccgaagacacagttcgagagccagcagaggcgtttcaatatcctgacaagaatcctcggatacgcaacggcggtactggtctgctgggccgtgctggtttcgttttctttagttgatgtgactttgccggcatttttgctgtgcggcctgtttgtgggtattttgtggtccagcgtgttcgtaaacgtgcactgtatctatctggttgtgccgtttgcgatttttgcgatatatacggcggatgcggggcagggttacgtcggcaggtatatttttccgtttgtgacgattccgtgctacgttgcgatgtacgctgccggctcgcagctctcgaagaagccgcaattctcgatggttaatatattttatgtactggctggggcggttgcggcgttaatccttgtggcggcgactgccaatccgttcaagttccaacagccggtctggtacatggagcagtttgtcaacctgcgccgcatttggcagccgccttacgaggccaacttagaggtaagctacgccaatctgttcccagtgatttacgttataaacggcctgtgtctgttagcgtggatgctgacgccgtatatgcagaagctatttggaaagggtataggccagcagtcggcggcggtagcagcggaaggtcaggcgtatcatttgccgaggatagacctcgcattgattaccattgcagcactaacggcgtatatggcgtttcggtctcggcggttcataccaatcgcgggatacgtgagctgtccggtaatggcattgcttatcgagcagattatctggacggtggcgtcggctttgaatttttataaacgtggccggctggaggtgccgcgaatgtcggtgggtttgcaaaggttgttgacggccgtggcagtggtgacagttgctgctttgggaacagggtgggggttgaaattcaagagggtatatttggagccctggcccagcgagacaaagctgacgtcgatttttatgagaatgacggcgtccagtgtaaagccgttcagctcctgccagttcataacggccaataatctcaagggcaatatgtttaactactggacggaggggggctttatcgcctggggacagcgacccgacccgaataccgggcgtacaccgttacagctttttatggacggcagggcgcaggcggcctacaactacgacgcttatatgacgtggtcggagattatgttcggaggagcgactgttcggcgggccagaatcagacagcagaaccttaccaccgacgactacgtgcaaatcggcgaatggttagatggtcaactgaagcagcgtaacgtgtgggtggtgcttatgcccgccaatcagtttgatacacccttcgtcataggactggagcacaggtcgaactggcaattggtgtttttgaacgacaaggaaaagctgtacgtggacatttcgaagccgcagggactggagatattcaaaggcattgaggacggcaccacgcaatatcccgatgagagttcccggaaccttatgagagcaaacaatacaattgtgtttggcaaagacccggagaggattgccttcggattagagtgtgcaatcagcgcctatgaggagaatccgatgcacacgccgctgaaattagtgcaggtattctacgagcgctatcctcaactacggccgcggattgaggcgttttggaagaagacacttgatgattttctggccaaccagaagacatatatgagccacgacgggtattatctcaggatagtaggcgcccttctggccacagagtatctggggccgattgcgcgaagggaaaacaacgataagctcgtacagttctacaacagcaaaaaggacgagcttgtaaaaatggtgccaagcgtgcgtgacaagaggtggtgacgacgattgatgatttatgattgatgattgcggattttggattgaaagtgggtcccctgctgcaaaacctaagcagtaactcctcggggacaggcgggcggataaggaagttatggaacaacagattacacagaatacttcgctaagcgtattttttccgtgttataacgaggaggaaaacgtccggcgggtagtgggacgtgcgaaggaagtgctggaagggatgggagcggattatgaaataatcatcgtcaatgacgggagcagtgaccggacgggccaaatagcggatgagctggccgcgagggacagccaaataaaggttattcatcataagcccaatcgcggatacgggggggcgctgcagtcgggtattcgtgcggcgagaaaagagattgttttttttaccgacggcgacgggcagtttgacatcggcgagatgccggcgctattgccgatgatgagggagtgcgacattgtctgcggctatcggctgaatcgcagcgacccgcttatccgtcggctaaacggctggctatggacgaagttagtttgccttttgttcggtatgcgcatccgcgacatcgattgcgcattcaagttgtttaagcgagaggtctttgacgatatccgaatgtcaagctccggggcgctgattagcgcggagattttagcgagggcgacgcgacgcggataccgaattacacaggcgggcgtgcatcattacccgcggactgcgggcagccagacgggagcaagcccgaaggtgattgtgcgagcattcaaggaactgttttcgctgtacaatcggatacgcaaaggggagtaatagttttgagttttgagtgttgacccctgcctacgacttgcaggggcaaggttttaagttgattgcagattaaagatggccggcagtaagaaagtaaatttgttcatatacgggtcgctgcgagacacggagatattcgagtcggtatgtggcctgagctttacgcgcaagagcgccaaggcggatgcgcagacgctgttagcggagccagcgtttctgccgggctataaaaaggtcagtccggacaacgtttatttttacgccgtcgagtcagcgggctcgaaaatagagggattagtgatttatgacgtgccggcaggggcaatggcggagattgacaaatacgagggcaagcgatacgagagggagaccgttcgagtgacaaccgccagcggccacgtctcggcgcaggcgtatttagtgagcgtcgaggcgatgaggaagcatttcggcgaccggttccacgtcaatttgatacacgagctttggctgcggaagagaatagagaggtttttgaagaagcggacaaggcccggcgataaaagcgtcgatgcggagcttgagcggttagccgagcgggagcttctggcgacgacggaacgcgatttggtgataacacattacagaagcgacgccataagcgattatttccttgctcatgagcttaaccgccccaggcccagcatcaggcctctttatgacgacgcacaggcggtaaaattcgtcggcaattatctaacgctggtcgtcaagcaggtgctgctcaatcagttagacgagcggatacaggcgaacttccgttttgagcttgagcatatgcgttccagtgagcggtatttcaagcggtcggttagtttgcttatagcgctacagataatcaacaataacagttccgcagtagagatgatagttaagcagtgcctgcaggcgatgccatacgagaagcacgacctgatagattacgtgaagtatgcggttcgtgcggcgaggagcttgtttgatgcgcgggtggcggatgcgtatctgaacacgattcgctctaattttcagccggggcttgtgcctttagggtgtgaagtggagctgagcaacgtcgggcctgcggtcgtcgagccgaatgccacgcctgctgaaaaagaagaccctgtgtatgactgcttccggtatttttgtgattttcagttagatgttttagcgtggaaattaggcgggtatatcgacgacaacagcggctcaacggaaagatgcaggcgccagggatttttggagcttgcgcctggccggctgaacgtcgcgcttgagctgtcgaggcccgctacggcgtgtccgtggctgttgaatcaactgataaacgaaatgacggagttctacgacgttcgcccacacagcttgcatttgtcattccagctgcgcaagattcaaatcggcaggcagaaggtgctgcctttgggctttgtgaaatgcctgctggtcttaggcggcgggaccgaggtgaacaagaccggtcagctatgggtttcgcggatgggagaggacgagattacccgccaggactacggcgaagagcttgtctttgcgaggaccagcgagcggcggtggtccgttggggccggcgaagtaggcgataaaaccccgttgtcggcgacgacgcacgtgcagcagtacaagttcatacggttagagggccgggccaactacgagccgctgattatgtgcctcaagggtctgcaattagcgtacaaccccgctgattatctcaccgtggagcaattgaaaaaaagcgcaaagctgcggcgcg

SEQ ID NO: 4535 - DNA, 14496 bp, synthetic construct
  variation 7911..7920: note = note, n is a, c, g, or t
  variation 2394..2409: note = note, n is a, c, g, or t
  variation 284..566: note = note, n is a, c, g, or t
  variation 14373..14404: note = note, n is a, c, g, or t
  misc_feature 1..14496: note = Synthetic
  source 1..14496: mol_type = other DNA
  variation 168..250: note = note, n is a, c, g, or t
  variation 13311..13320: note = note, n is a, c, g, or t
  variation 2579..2597: note = note, n is a, c, g, or t
  variation 4520..4609: note = note, n is a, c, g, or t
acggagagaatccagtcgccgacgcgcggaaagaagatgcgcccgccgtggaaatcaacgtccttgatcatgtgaaattgatagaatgtgtttgtggtgaatgtgccccatgtggccccgccgtccgtggattcatagaccaatttgtctatgggccgattcgccgtnnnnnnnnnnnnnnnnnnnnnnnnnnnnnnnnnnnnnnnnnnnnnnnnnnnnnnnnnnnnnnnnnnnnnnnnnnnnnnnnnnnatgaccggcatactcacgggcacgaccgcaagannnnnnnnnnnnnnnnnnnnnnnnnnnnnnnnnnnnnnnnnnnnnnnnnnnnnnnnnnnnnnnnnnnnnnnnnnnnnnnnnnnnnnnnnnnnnnnnnnnnnnnnnnnnnnnnnnnnnnnnnnnnnnnnnnnnnnnnnnnnnnnnnnnnnnnnnnnnnnnnnnnnnnnnnnnnnnnnnnnnnnnnnnnnnnnnnnnnnnnnnnnnnnnnnnnnnnnnnnnnnnnnnnnnnnnnnnnnnnnnnnnnnnnnnnnnnnnnnnnnnnnnnnnnnnnnnnnnnnnnnnncgacagagtggaaaaatcgcagcgtgaccccgcatcttggttccatgctcacagtcctccggaagataagcaatcaaccttcaacagatgaaacgaaattcgacttctgcacgcacgaccaagcataccaccgctgacatgacgattcaagcggaaaaagcgacaacgaccgccacggaagtcactgcgctgttgggtatggtgtgtgcgcagtccccatttgagcccgagcagtgtaagaaactccattcaggcgtgaaatcagggggggctttgggggtcggcccctaagttaagcgttagcgatcgccttctttgctgatgtggattgagggtcagcgctacgcacttcgcagacctctttttaccgttgccgtttcttatttatcgcccggccatcgcagcttcatggcggtcgaatacatttcggccacgccgcatcgctccgacctacggcgggccaatgagattgcggattgggggcacggcgggacgccgggattgcgaattgacgcgcgagcttcttcccttcctgcgttcctcccctcttactctccatgcttcattcttcgcggcctctgtgccctccgtggcggaagatcctggattgccgccttcgcgggaatgacataataggaatcagcgttcatctgtggttgcattttctctgtggtctccgtgcctccgtggtggataatcccttggcagttgtccgctcatgggacaattccggggccggcttacttatttgcgttgtgaattgagtatggcgtgcccaggttggagaatcggcgtgaatctgcggatagagaagaagtttgaagtggcagagcggtacgtcaggggcttggccgggtcttgaagtgtgcaatcatgggtggcgttgtagattgtcatgcgtataacgccggtaagaaaaagggccgcagggttttcgcctgcggccctgaaagggactcacgcccgccgcgtcgtgcacggccgggcgtttgacatctgtggtggtgctcagtacaggtcgtccgtgtcgaggtcgtacgttcccacgatgaacatgccccagttcttgccggtgaagtcggagccggcgccccagccggtttcctcgtggaggatgtcatcgggatcatccagcggcctgtccagggcatcgtccggcactccgacaatctccagccattcgatggcggcatgaacggcgatcacaacggtctgctcgtctaccgtcagagcgcaggggatcgtatagacgtgctctgtcggcgagaccgacgtcgcgtcgtcctggtcgaaggcgaactttcccggcctcggattgccgttcttctgcggaaccgcggcggcatcggcctgcatgtccacgtgcgtctcggcgaacagccagggtccggcggttgtgatggtgacgatgatgttgtcgccgtcatagtcgatatccacctgcccggcgtcgaatcctatctccccgccgtcggcgatcagatcgacggaaatgtccgcccaggccggcgccccaagggccagacaagccaacgctgcaactgccaacaaggtctttctcatctttcttctcctcctacaaatttctgctttctcattcgccgcggaccgccggcaattatggaaacgaaatgtccgtggtccttaccccaaaatggatcctttgacttgctcgcttccggacgtacttccaccttctctttctcctccaccaccaaaccggttgaggacgtcggtatccggccaaaccgctttgtctgccgggcgcagcccacctctgcctcctgcccggacggacaactgcacggccaaacaccgctacacaggnnnnnnnnnnnnnnnncctcctgccggacttcccaccactcctatggagagctatgttacccatcttaacacgcgggtcaagaagaaaatcgtatcaatttggctgacgcagcgaggcacttgcagcggtctgtccaccctgccccggaatttggcaactccgggcatctgccggttagaacgtgnnnnnnnnnnnnnnnnnnncctcggcgaccccgagcttcttgcgcaggcccagggccagggagaattcggccttcaggttcaggtggcccgaggggaagggataggcgagtcggtggtatgcacagtcctgaatgaactggtttcggtcgtaatcgccccacgagcagaagagccagtctccgaacgaatgcatccattgtgtcatcgcttcgagggcctcccggaaggtcggggcgaccgcgacgtcgtgcgaggcgatcccagtcaacccggtgcagaacgccgtgagctccggatgccggacgggccggaccagcgtctggaactccgattcgatctcgaatgtgcgggaactctgcatgacggccccgatctcgatgatctccatctcatccctgggcaccgtcccatcgttggagcatgtcgcctcgagatccacgatcagatagtagtcgttcgcgatccgcattggattgtccgtcccacgctttccggatgacctggcccggctgcacagccggaccacagggtacccttttacagcgcgccacccgtcgcgccaaggggcacgggtagtcaccccaggacaatcgcaaagtcgggtggcagcgtcaagcgcagcttggcgatggcgatcttcccgtacgcaggaccatcgccaaggccttcggccttgacgctgccacccctgttcgtgactttgcgtttgccctggtcgtcacccagcaatttctcgacccttcagaaggacacaggcatggaccgagaatgtgcgccgcgcctggcgggcaagagcacgcacgacagggccgcgcagcgtgccccctggacacgccgtgcaaaaccaagcgactcggtcccgagtttggcggataccgttttttgtacaaagtgggcacagccgtgcgccgataagggattctacgggttcatgtcatcaggatacgccaattgcccgcgcggcccggcacgggatggttacggtatggaggttgagcatggagtccatgacggaggaacggaacacgccggaggcgacggcaaacggccctgacgccgaggcccgcgaactgaagatgagcgatatcatgagccgcgacgtggtcaccgcggcgccgggtgacagcctcttcacgaccatcaagaggatgatggaaagcgccatttcctgcgtggtcgtgctcgagcaggagcgggtcgtcgggattctctgtgagaaggacgtcctgcgggtggtgggcggcgcggacgcgaatttccgccggctcaccgtcgccgaggggatgtcctcgcccgtgcacacggcgtccccggaggcgtcggtcctcgacgccagccggatcatgagggccaggcaaatcaaacgcctgccgatcctgcaggacgaccggctcgtgggaatcgtcacgcagacggacatcacgcgaggcctggtcacgctcagcccgttgaagtcgattgccgacatcatgacacgggatatcaccaccgtgccggtcgatgcgacgatcgccgaggcggcccgcgaaatgacgtcacggggcatctcctgcatcgtggccacgcaccggggcgagccggcgggcatcatcacggagaaggacctgatccggcgcgtggcggccctccagaagaatcccgccgaaacgcgcgtcgccgacgtcatgtcctttcccatcatcgccatccccgccagctactccatcctgagcgccggccgcaaaatggacaccatgcatctgcatcgcctcatcgtcatgcaggacaagaaggtgtgcggcatcgtgacccagaccgacatcatgacggccatccgccgcgagctcgagcggctggagagcgagcattgtgagtggaagacgggcctggccgcgctcgtccagaacaccatcgacgacctgcgcaggttgcagggggttctggaggggctcgatggctccnnnnnnnnnnnnnnnnnnnnnnnnnnnnnnnnnnnnnnnnnnnnnnnnnnnnnnnnnnnnnnnnnnnnnnnnnnnnnnnnnnnnnnnnnnccgcagccgccgcagagcgccagggggccgagatcagggtggagaaagtcctcgacatcaaacgtcagctcatggagggccggtacacgctggccgacaagctcgacgcggtcgtggacaggctcctcgaggatctcctgtagcccaaccgctgcagcggatgaccgtcgccatccttcacgaaggctcgcccaccgcagccgatgagaagggatgacggcgtgcggtttcgttcacggcctgcctgtactcaattcctgacgccgttgtccggagttgccatagtcccgcctgccacaacttctccggcacaggctccatcgcgtgctcccgccttgccgtcagcccaggagtattgggacccaaccgtcggttggcgttcgacctgaacgattcctatgctttacttggcgtctttgtgccgccggtttctcaagacaacctcaacccggtcaaaggaggcgtcccatgaggacatttcaggtttcggaagagttgtacgagcagttgaagagctttgtgatcgacccgtttgacgacacgccggacgtggtgatcggccgcctgattgagatcgtcaagaaggccagaaaccactggtccccgttcgaggcatacgagcctccacaacaggaagtgcctcttgtggaaccgcctcagcggcaggccgcgccggccgtggaagagcaggaagtgatcctctaatcccctgttcgtgagcgcaaaaaagagtggcacgcacttcaggcggcgaaatcgtgcgtgccaccaatccatgtgtccggctgatgccggattcacaactgagtctcattccacgtttggcggtgggagttctctacccaaagtatacgatacgacgtgcccggggcaaacagaggttgcaggaactgcgggccatcagcaaggtatgcctgtgcacggggtcaataagaagccgaacgggatgctgcacgagggtggaatgtagcgttcgataccaattccgcacccgatgtgagcgggtcggtcaccacgcggccgcgtagtcggtcctggcaatcgagtacccggcctcccagcccttcttgtactgatggtcctgctcgaagcgcgggaggtcccggacaaattggcagaacgggtgcccgatcgtatggcacccggcggaatagccatccacatacccgtccacatactgcggggcatatccagcggcaagcagcccctggcgatccatgctggcacaacccgccacaaaggacaggacgaccagcgcagcgaagacctttctcatcttgtattctccctgatccccgaaatgccgtcctccgttacccgacacagagcggtccggcttcaacacacgtgaaccataaattatacccgctctcagcccaaaacgcaaggggaaaacgatgaatattcgtgttgcagagccgagtcggagatttggtgacgccagaccgaggaaatacctggcaatccgtcacggtgagatcgccataggatgtatcggaccgagcgcagaatgcggagcgaggcagtaggcatgtcgccacacaatacgaatgcagccggccgagggaggcagccatggcggaaacgaacatcttgcagcgaacgcagccctgtgatgacgcccagcatcacaatcacctgtgctacctgacggaacgctatttccacatccacgagcctgccctcttccgggacatggtgctcaatccgcgcttcaagtgcgagttctgcggcaggacggccggcgacgcctgtgatctgtgctatcccgtcccgctgtagctcgccacattcatcgggtgcacaccggacccccactatcgatcatcatagcttcacgaagggcgtgcctccgatgccaatcataccgattccactttggaatcgcgtatctctgggtggcagcgtcaaggccgcaggccttggcgatggtttcatccaatccgcagcagaccatcgccaagctgcgcttgacgttgccaccccggtcgtcgtgctacgaagaactgaatcgtaatcggttatgatgccggacataggcggagcgggcaagcaggaaacagggcaagggaccggcaacgggcaacgtgcagagttgagcagaggaaccttgaccgcgaggtgcgcacctccgggcgttccagcgagtgggctcaggggtcctctcacggcgctggacgcagcggcgctgtgtaggcgggaacgtcctgcgggtacaactgcgtgcggaacagatcgaccaacgggtcgctcaggtactgcagcgagaagtacatattgccgtgcgccccctgccggcggcagaactcatgctggctgcggatcaacccgaggtcgcgggtgaccgtctggcctccgcgctgctcatagatcgccaggccgggcacgatgcgctgcaactgccagtccactgtcttccactgatagaccaggttgcccaactcgcccgcgtccttcgtgtaggccatcgggaccacgtaatcgatcgtcctgtcgcggacccagcggggccagtcctggtacaccgagtcggcagactccagcgagctgaagacggcggcggtcacctgcacgtggggcttgcggagctttgcccggcggtagacgtcgcggacgaggtcgctcacgccccgcttgcggaactcggcccagcgctgcatgcggtacttccattggagcaggtccatctggtgctcgcccttgagcacgagcgggctgcgcccggtggattgaatgacgtcgtcgcggtgaatgtacgggccggcatgtgagaagccggtgatgtgctggatggcgccgaggtgcatggatttgaccgggccgtcgatgatgagcaccttgccgcccctggaaacaaacgcctccaggtccgcggcgatttcgcgagggatgatgtagacggcgggcaggacgaggctggcttcgggtggcagagtcttgatctgctcggcggggatggacttgggcgggtagcccagccgggtcagcgacgcccgggccgcctcaaacgaatcgttgccgtactcgctgcgggtctccttcgtcgtcatcatgtacagcggcgcgcggccgagggtccacacgcccagcaccaccttcaccgtctccgcgacggccggcggcatctcgttctccgcgtgccaattcagcagaaacgtcatccctttgcccaacatgttcgccgcgatcgcgggcgtcccgtccgagagaaccgccagaggtaccgccgtcgtcggcttgatcagcgggttggcacagatgccggcgcccgtggggtagctttttcgctgctgctccgtcannnnnnnnnntccgtgctgcagggcgaagtccgactggcagcgtttgcagtagcactggtgcgggccgtagcggatgtaatcgaagtggaggccgtccacgtcgtacttgttcaggcattcgagcatcagatcgctctggaagcggcggacctccggcttgccgaaatcgtaccagatcgttccgcccccgccgtcatcgaccgcccagtccggatgcttgtcgagcacatacttgggctcactggccccgtaggcgccgttgacgaaccaggcgtggacctggatgttgcggctgtggcactgctcgaccatgtacccgagcggatcgaaccccggctggacgccgtcgcccatcggacacagatcgctccggaagaacgcctggccgccccagtaccagaccagaatgaacacggcgttgagattcgcccgatccattttatcaatgaggacgttggcctcaacgggcgtcttgatctgcgttgcgtgcatccagatgccgcgaagctccggcgcccgaaggacctggccgttcggtgcggaggggttcgacgagccggcgtccggctgcgcggccacgccacgctccgagaggaaaaggcaaagcagcaacaacacaacaattctcatccttggctccagagctcattccatcctggttcgttacgcgctgcgcagaggatagcagatggcattggacatttcgactgatttaccggaggatcttcagtccatgtgtgtcagagtattctggcgatcgggtggcagcggcaagcggagagcagcggagcttgccgatggtgttacgagctgacgagccatcggcaagctgacgcttgccgctgccacccggcacagtgcctcaacatttgcccagacacttcagtcggcgtctgttaatgctcgtgcgggcactccccgtcgtaccaccattccggcacgtcgtcgcccgtggtctcctgcagggtggaaacgtgcgcgtcgagccacaggaggttggcccggccctcggtctgaaaggcgtcgctggagcggatgttgtgccggaagatgccgcgatagtatttcgcccggctgccgctctggcggtagtgaaccagattctgcgtgcccggcccgttgttgtggaacatgtcgaggttgccctgctcgactttcggctcgacgtgatcgtgggcgacgatgaattcggcctggtggtggatcgtcatcaccgagccccgcagcttgttgttcgtcaggtcgcggaagagccacgcgttgagactgtacgcggcctcgtgaatcaattgcgggtcgtccgggtagatcagctccgccacggcccggtagctcggacagccgaacaccttcgtctccttgacgtaccgcgcgtacgccacgccccagtaggcgtcccggtccgtcgtggaccgcaacttgttcgcactgtcgtaccagaagaagccgttcgtcgcggtgttgtcggccggcttccactcgttgtcctgcaggaacagcgtcaggcccatgccgatattgcgcaggttcgacttgcacacgacctcgcgcgcgctttccttcgccttcgccaacgccggcatgatgatcgccatcagcagcgcgataatggcgataaccaccagcagctcgatcaacgtgaacgctcgtgaattgcgggccatgatgctactccggtgtcctcactgaagcctcctgcgcgacgcacgcgagacagtcccagacccatcgtccgtcgccaccccccattatacctgctcccccgcccaaccacaagaacggaaacccacgaattgacgccccacatcgttgcacacccggcaccctcgatgtataataccctcgtatccacgagccaggcagagaggcctcaatggtgcgaagaaagggaaatacaacagaaggtttaccccattgggcattcgtgtgaatgcccaatggggcattgcctgcgagaatctctcacgcgaacgtgagagtcccttgttgtgacaagcacgcaggcgcggatcagttacaatccatcctgtttctaccataggaacgggggtcggtcaagagcaaacatgaatttttcaggagaggaatcatgggcaattacacgctcggcctggacatcggctccaacagcatcggttgggcactggtggaggacgccgtggaagcgcctcggatcgttgacatgggggtaagagtattcccggagggcgtggaccgggacacaaagggtctggagaagtcaaagaacgccactcgcagagaggcacggggggcaagacggacacaccaacgccgccgccagagaaagcaacgactggtgagagcgctgcgacaagttgggttgctgccctgcgacaaggcggaagtccggtctttgttccagacagacccgtacgagattcgcaaacgaggattggaccacaggctcgaattgtacgaaattggacgcgccttctatcacttgagccagcgacgaggcttcaagagcaaccgcaagagtggcgcactcaaagaggacgggacggtcaagaaagaggctggtgagctacagagaaagatcgacgaggcgggttgccggacaattggcgaatactttgcgggtctcgaccccgaacagcaacgcatacgcggacgatacacattcaggtcgatgtaccagaaggaattcgacctcctttgggcaaaacaggttgagttctatccgaaagtgctcaccgaggatctgcgaagcaaagtccgcgacgagatcatcttcttccaaaggccgctgaagtctgccaaggacttgattggagattgtgaattggagccgactgagaagcggtgcccccgcgcggactggtacgcacgccggttcagattactacaggacatcaacaatcttatcattcagaaccccgatggaaccgaacagaaactatctcctgaccaacgggcagccctcctcggcgagcttggccagagagagaaattgaccttcgacaatatccgggcaaagctggggctcttggagacgcagaagttcaacgccgaataccggataggacgcaagggcaagaaggtggaggcaatcaagggagatgtcttcgtatggacgatgagaggcaagagtgtcttcggccccaaagcatgggatgcgatggctgatgaacggaaggtatcactgaacgaattgtttgtggaactggaggatgatgatcttgcgcggaagctcgaaaccgaatatgggcttaccgacaaacaggtgcaagcggccatgaaggcgtcactgcctcaaggatacatgagcttttcgcgcaaggctgttttgaagttgttgcccttcatggaggcaggtgcgttgacgcacgaagccatcgatcaggcaggttaccgaaaggaagaacccacacagactgacgccatcgccagggtgtcattcccgccagacttgcgcaaccccattgtacaaaaggccctctttgaagtgcgaaaggtcgtgaacgccctcgtgcgcgaatatggaaagccgaccagaataaagatagagatggcgagggacgttcagggcagcaaacgccagcgtgaggaactccattggaggaacgaagacaaccggaagaagaatgaagaagtccgcgaccgtctcagaacggacatccacatcgacgatccctcacgcgacgatgtcatcaagtacaagctgtggcaagagtccggcaagatgtgcccgtatacgggaaggcagatttgccaggaagcgttgttcgggccaaatcctgaattccaggtagagcatatcctgccgtatgatcgcagcctggacgacagttacatgaacctcacactttgcgaggtgcatgagaatattcacgggaagaggaatcaaacgccgttcgaggcatacggcagcggcgcggaacgatatgaacagatcaagcagaggatcaaggtcttgccctggccgaagcgtcagaagttcctccaacaagagatcaacctcgacagtcatataagccgagaactgaacgacacgcgttacatctgccgcgagacggtcgcatacctgaaacagctcggcgtccatgtgcgtggaacaaggggcaagattaccgccgaactgcgccatcaatgggggctggacggcatcttcagcgaacttggcgtccgtcgcgacgacgatcatcggcgccatgccgtggatgcactggttgtagctgtcactgacaatgagcatttgcgccgattggccgtgagcaagtacgttcttgcaggcccacgatttgaaacgccgtggtctgcattcagagacgaggccaggggcaacgtgaagaggatgaacgtctcccaccgcgtctgtcgcaaggtgtccggcgcgcttcatgaagaaaccaattatggccctacaggcgtgagggaccaagcgggccaggatatctatgcatatcgaaagaagctcgaagacctaacaacgcccatggtcgagaagatcgtcgatcccgtcgtgcgcgacattgtgagacaacggcttctcatgaagggcatcgaccctgccgcagccgacaggaagataccgaaggatgtatggaaagagcccctctacatgagacgcacaaagagcgataagatgatccagataagaagggtgagaatccatgacgtgaagaatagcatcattgtgctgaccgatgaatcgggacgcccttatcgggctgtcgagcctggcggcaatcatcacgtcgaggtgttcgagtacgttcacggcaccaagacaggcacgcgggaagcggaggtcgtcacaatgtttgaggcggtgcgacgcagccgtgccagagcacccgttgtgcgaagggatcatggaccggggactcgattcgtttgctccctggcgattaatgacatggtaatgatgccggacaaatcgggaaagatggacttgtttcgcatccagaagatgagtgcgagcaaacaggtgtacttccgccaccacacggcggcacgtatcgatagcgagaggacgctcatccggaaacaggctcacctattcaacggctacaaggtttccgttgaccctaccggggcaatctgtcgagccaatgactgagcctgcgctgcgaagcagcaaaagccgttcctcgatattgccgataacgccgctgggaacattgtgtacaatgaagcgggggtgcggcaatgatcaagcgcatcatcgagatatcgtcggcacggacgcatctatcggtccactacggccagttggtcgtcaaggagggtggcaacgagctttcgcagattccctgcgaggatatcggcgtgctcctgatcgaccaccaggggacgagctacacgcattgcgtattcaccgagttattggacaaaggggccgcgattgtcctctgcggcgggaaccaccaccctgcnnnnnnnnnnctgccgctcgaaagcaactgcgagcagggcgagcggttccgccaccagatcaacgccgccgagcccgtcaagaaacgcctgtggaagcagcttgtccaggccaagattcagcatcaggcgaggatcgtcggcaggggcacggagacctatgcagccctcatggccctgcgtcacagggtccgctcgggcgatccgcagaacatggaggcacaggccagccggaggttctgggcgtcctacctgcaagggatcgagttccgccgcaacgtcgagggcgcgccgcccaacaatctgctcaattacggctataccgtcatgcgggcggcggtcgcacgggccctctgttccgcgggcctgctcccctgcctcggcatccaccactgcaaccgttacaacgcctttgccctggccgatgacgtgatggagccgttccggggatttgtcgagtccaaagtcaaggaaatctgcgaaggggagggcgtgccggagcaactcacgcagccggttaaggcgaagctccttgaagtcctctcccagccggtcgtcatcagcggccttgaggggccgctgatggtgggcctccatcggaccgccgcctctctgcaccgctgctttgccggcgagcagcaggagatcgaattgccgcagttgtgatccccgcaggcctctgtggtctcggtgccctctgtggcagaagaaaattcaagagccgaaaatgatcttgagcgggtaccgagccgtgtggattttcgccatgtttgacctgccggtggacaccaagtcagcgcgcagggcctacaccgatttccgcaagaatctcttgaaaaacggcttcacgatgctacaatattctgtgtatgttcggcactgtgcgagcgaagagaatgccgatgtccattacaaccgaatcaagaatttcctgcccgacgatggcgaggttcggctcatcaccatcactgataagcagttcggccgcatggaaacccactggggaaaaatgcgaaaaccacccccgacagcgccccgacagctcgaattattctaattcagccnnnnnnnnnnnnnnnnnnnnnnnnnnnnnnnngaaacggccattgtaactgatccgcccctgagtgcaagtcacaactgtgtggtttcaacatggtaataaccccttattgtaactgatccgcc

SEQ ID NO: 4536 - DNA, 11732 bp, synthetic construct
  source 1..11732: mol_type = other DNA
  misc_feature 1..11732: note = Synthetic
cccgccagactgtgttagggtacgacggcctgcatcggcagatttcgcggacggttccgggctgcggcacggaatacaagggctatgacagccacaaccggctgctgtgggagatggacttcaaggagcaggtggtggggtatgcttatgatgccctcggccgtctggagtataagcggtattatgcggccgatgcgacaccgggcgatttcttccggaagcgttttaacacgtctttgaaaatcttgctctcgggttgttgtttctcgataatatgatcgttgggggacatgtccttattttagtataatattgtccagtgtccaggttgcctgttttgacattttgagatttgctgacatatttccgtgaacggttacgaaaattgtaaccgatacatgcatgaagccatcaaatcatatgataaatatctttttttatcatgaaagggaacacatggaacgcaggcaggcaggtattgacatttcgcggagggattttctcaaaacatcggccgtggcgacgttttcgctggcgggtctgcatagcgcctttgccgcaggctcagacaagattcgagtaggcgtcatcggctgcggcggccgggggatttacgactcgaccaattgcgtcaagtcggcagacaatgtcgagattgtagccttagcggatgttttccccgaacggctcgcgtcatttcaggagcatttcaagaccaacctgcccgacaaaatcaacgttacgccggagacttgtttttccggttttgacgcttaccgcaagttgctggcctgcgagctggacctggtgattctgacgactccgccccacttccgtccggcctatttccgtgcggctatcgaggctggtaagcacgtcttcatggaaaaacccgtggcagtcgatccggtcggcgtgcggtcagtcattgaaacgggggcgctagccgaccaaaagaagctgacggtgctggccggcacgcagatgcgtcgtttggaaccgctggtgcagattatgaagcgcatccacgacggcgatctggggcagatgaccagcggccagtgctaccgcatcggcgacggcatgaccggctggggaccgacccgacgtctgccggagtggtcggatatggaatggcatcttcgccgctggctgttttatacgtggctgtcgggcgattttattgtcgaacagcatgtccatgacctggacctgatgaactgggcgatgaattcgcacccggtgcagtgtattgccctcggcggcaggcaggcccggacggatgcgatcttcggagacgtgtacgaccatttcgcggtcgaatatgtctatccagacgatgtacgtattgattacaagggtgcccagattaacaagatcgccgcacgccacgaacatcggattttcggtaccaaaggctcggcattgttcgatttcggccaggccagcattaagggcgaaaagccgttcgtatttcagggcgacatgcctgacccgtgcctgcgtcagcatgccgcacagattgacgctattcgcaatagcaagcaccttaacgaagcagtgcagattgccgaaagcacgatgacggcgattatggggcggatgagtgcctataccggccgggcgctgcggtgggactggctgatgaaggcttccaagctcgacctgacgccggaaagctacaccttcggcccgctgcctgaacagcctgtggccgttcccggagtaacccagttaatctaacccgcaatccgaagacagtacttgtgaatgcaatggaccgacgcgatttcttgaaatataccgctgccatcgccgccgctgcaggactgaccgctgtgcccgcagccgctcagcaagccaacacccgaaatcccctgctcaaggcggtgcagattcagatactgccggggaatttgtcggatgtggataaattcaagctggccaaacgctgcggctacgccggcgttgaggctgtgccgctggagtcgctggaggcgtgcaaaaagcaggctgatgcggcgcgtgaggcgggcattacgattcacagtctgctgtacggctggtggccgccgtttttgaacaaggacgatgtggcaaagaaggcagtcgcggagatggagcacgctcttcgctgtgccagggtaatgggggccagtgccgtgctgatggtgcccagccgggtgacggacgactatgcgtatggggatgcgtaccgggattcgcagacgctgattcgcaagctgataccgctggccaaagagctggaggtggtcatcgccgtggagaacgtctggaataagttcctgctcagtccgctggaattcgcgcgatatattgatgagttggacagcccctgggtgaaggcctatttcgatgtgggcaacgtcattatttatgggttttcccaggactggattcgcacgctgggcaagcggatcgccaaggtccatttaaaggacttcaaacgcgatgggtatcagtgggtcgatctgggcgaaggcgatgtgaactggaagcaggtcagcgccgcactgaatgagatcggctactgcgactacctgacccccgaagtccgcggcggcgacgaagcctggctgatggagctgtcgcagagaattgataagctggtcaagataagctaaaacggtatcgttaaaagtataaagtagggatgcaactggcctgctgcccgacaattggtccggtatgagtgagagtataaccgatacgcagattcttgtttgggctgttcagcacgtctgacaacctggacaattaaacccctgcccattttcaataccaagatttcttttgtataagatggtggttgtaacgatatttccaatatcctcttttgacagctttccgttgacgtctgatgtccgatcatgccaggccgtgtgtggctcggactggcggccggacgagaatgggtcaccggcaagctcgtcggagttggccgttgcagctggcaagaattcaagagcctccttcttcccctgggcctccggcgtggagtgaacccttatagagcaacgcgatttgattgacggtctattgactcttgatggcttttatggccagcttggccatgaaggccgccggaaaatgcctccgttgcgtcataattcatacgtcctttcttctctaattgccgactgaattataccacaaccaccatcttataccctggtactaaattcggggagtaacctacggcacgaatctggcaaatttaggcacgcccattcatacattaaaatctttgatggggcactccaacatccagaccacgatggagtattacattttcagctcggacgagaataagaaaaaggctgtggaggggctgaatgggatattgggggagtaagaaataacaggagagcagtccattgctgaactgccctcctccgatataaatgacctgtcagctcgattaggagccgaaggggttacatctaccgctgaaacaagataaattgatcaaaactctatctgtttatttttggggtactttgctcaggggaatacctaatgctttggcgacaccctcaccataagcaggatctgccttgaggcagtttccaatgtggcgaatcttgatcatttcgggagcatctcccatagcacgagccgtgttgccaaacagggcttcctgttgttgcttactcataatccgaaacagtttgccgggctgggtgaagtaatcgttatcgtcttcgcggtaattccagtgatcggcattgccgttaatcttgagcgggggttcggcaaattccggctgctgttgccattcactgtaactattgggttcatatcctcgtgtgctgccgtaatttccatccacccgcatagcaccatcacgatgatagctgtggaagggacaacgggctgcattgactggaatcagatggtggttgacaccgagacgataacgctgagcatcaccataggagaagagccgaccctgcagcatcttgtccggcgaaaagccgatacccggcacgatgttagcaggattgaaggcggactgttcgacctcggcataataattttccggattgcggttcaactccatgacaccgacttcgattagcgggtaatcgctgtgataccataccttggtcaggtcaaagggatgatacggcagtttttcggcatcgagttccggcataacctgaatatacattgtccaccgtgggaagtcttttttctctatgctttcataaaggtcacgctggtggctctctcggcacttgccaataatcttctctgcttcttcatctgtcaagttcttgattccttgttgtgtcttcaggtggaatttgacccagtatcgctcattctttgcattaatcatactgaaagtatggctcccaaaaccatgcatgtggcgatatgtagctgggattccacggtcgctcattacaattgttacctgatgcagggcttccggaagggatgtccagaaatcccagttgttcaaagcactccgcagattggtgcgggggtcacgtttaactgcatggttaagatcggggaatttcagcgggtctcgcagaaagaatacgggtgtattattgcctaccagatcccagttgccttgctctgtatagaacttgatggcaaagccccggatatctcgctcggcatcagcagcaccacgttctcctgctacggtagaaaaacgaacaaacaaatctgtctttttgccaatttgagagaaaatcttggctttggtataacgagtgatatcatgggtgacggtgaagttaccgtaggctccggatcccttggcgtgcattcttctttccggaatgacttcccggtcaaaatgggcaagtttttccagaaaccagacatcctgcaacaattgtggcccccgcggcccggcagtcaggacattctgattatcagggacaggagctccggcattggtagttaattttttcttttcttccataaaattactcctttgcttagtctaattatgttttttgcaacattttttgcagaagccctcaatcgtaacacgcaaatttaagacttcacaatttttggagatatcttccggaacatcgattccgtcataatagtctgatgtaaaatcgattatgtccccgcatttcttgcattgaaaatgatggtgtttttcaagtttgggatcaaaccgtctggcagttccatatccttcgacctgatcaatcagccccatttcctgaaacgaggtaagggtttgatacacggtgtccaaagaaagatgatggaaggtgcttttgagtctgttgaatatctgttcgggtgagggatggtcggttgatttaagcagtgctttatagatgacaatcttctgatgtgttacccgcatcccatgctctttgcactttttgcgaaaaaagagaatttcatctggttcattctttattgtcacgtaattcctaataaggcattatgacaggattgtcaagtgaacttttgtatttttgggataaggcggacaataagagaacatatctataggcaaactggcaatgataggaaatacagtaatgctaatcagcactcatttcccactcaaattcattcactacttttttcttggcgacgcaaaacatacgcatttgagcatttttgagggtaaaaagggagtgaaaacaggtgcatagaatctccctaagatgttatattgtagggagttaaggaaaatgggcaggggcggactcgaaccgccgacacacggattttcagtccgttgctctaccaactgagctacctacccctcagcgttaagctgacaaggtatagtagtgtatcgaaaaaaacgaaagttgcaagagtctgtctgtcaaaaagtcctattttttatattttaatggctgtaagctgccagacgacgatgcttaacagaattaaggccaacccaatcaagattgtcagcttgaaaatgatagggaacaatcgatagggattgcgatgattgatacattgtccctccggctggggatcgtcgctggtcaggggggattctttgtcgtctaccagacggtataaggctcgaatcatggcatataagctcaatgagcccagatacattacagaccaaagcagtccataactagcagctcctgctccgattgccccagccgcagtaaggacattgagctgtaaaggcgagatattcccgaggatgctgttgaaggcctcatcttttggcaattcaggctctataatgtcctctgatacggtttctaccaaagcaatttgttccggaatgatacacgcttctttgagcttatccaaggctccggcctgctgcatcagttcggtctgctgagtccggtaatggtgttgtttttccggcaatttctggaaaaacagcactgaagccagggccgccaggattgctcccagcagcgccacaccctgtataatcgttttatcctgtttgcgtatcgtcattttgagtcggtctttaactgtatctatgttaaaatatagaaaatagtcgggcggaagaaaaatcccttagatatgtgaattaggattgggatagaaagaggatgccccgaagtctgcccaaaggccggcttcggggcattgcctgcgcggctctccaggagagccacttgttatgacaagctcgcaggcataggtcagttataactcttgcaactctatcatttttatctataatagtcaatataattcccgggaattttagctacttaacaggaggtactatgtcatatacactgggacttgacatcgggtcgaatagtataggctgggctcttattggcaacacagacaagccctcactgattgcaactggggtacgggtatttccggaaggcgttgaccgtgataccaaaggagctgagctgtctaaaaatcaggcacgacgattagcacgtggagccaggcgtaaccgcagtcgtaaggcctaccgtaaagataaactggtgcgggcgttaaaggccagggattttctgcctcaatccacagaacagatggaacgtctgtttttgctggacccctattcactgagagccagggggttagatgcgaaattagatcgctatgaatttggtcgagtgctatatcatctcaatcagcgcagaggattctggagcaaccgcaaaagcggcaaggccaaagacgatggtgtggtcaaaaaacaggcctctgaattgcaagccaaaatcgatgaatcggggtgtcgaacactgggagagtacttctccaaagtacgaagtgattccgtgatgattcgcgggcagaatacgtttcggtccatgtatgaacatgaattcgatttgctctggcaaaaacagtccgagtattacccggagctgaacgatgaagagtattataagaagatccgacatcaaaccatcttttatcaacgtccgttaaaacccatggataaccgcatcggcaaatgtgagttggagccgacagagcaacgctgcccgcgaggggatttttatgccaggcggttccgcatgctgctggaggtgaacaatttaaagatttataatcctgatggcagccaaagcgatctgagtcaggaacagcggcgaactgtttttgcgatgctttcggaaaagaaagaggtatcgttcgatgagatacgcaaaaaactgggcctgatggcaacccagacatttaacctcgaagaaggtaaagtggacaagaaaaatgccaaaatgaagggggatgaatttgcggccagtcttcgcagtgccgtcggcaagaaagactatgcccgattaacggatgcggatgttgcattgctcaatgagtatgttttggatgattccttgtctgacgaacaggttgaaaccgcgatcgccgagaaatttggttttactgcagaacagacccgaaaaatcatagacatttcattgcctgaaaggtatgcaagtttttcacgtctggcaatacaaaaactgctgccccatctcgaacaagggatgctgcttcaccaagccattgaggccgtttatggaaggccgcaggccagacaggatggacctgtagtggatcaattgggatttcctgcggatgtgcgaaatcccttagtcaacaaggccttgtgggaggtgcgcaaggtggttaatgccattatccgggaatacggcaagccggacaaaattgccatcgaaatggcacgagatgtcaagggatcgctggaggaacgcagggaattgcagcagcagattcgagccaatgagcaagagaacgagaaggcccgacaggaacttctgaaaatgggaatctcgaaaccatcccgcgacgatattatcaaatataagctgtggcaggaatgtggacaagtctgtccctataccggacgggcgatatcccaggcggccttatttggacccaccccggaatttcagatagaacatattctgccgtattcgcgttctctggatgacagctatatgaacaaaacgctgtgttatgtgaacgaaaatcgcctcaagggcaatgagacaccctatgaatactaccacggcaaggaacaatacgatcaaatcaagcagcggatacgtgtgttgccctatcccaaacggcagcgtttcctgcagaaagaagtggacctggatacgtttgtcgaaagacagctgaatgatacccgttatattacacgtgaagtggtcaagtatctcaaaacgctgggggtttatgtgtttggtaccaaagggcaatccaccgcagaattgcgtcaccaatggggcctcaacagtattctggatctgactggagccggcttgaaaaatcgggatgatcatcgccatcatgccattgatgcgattgtggttgcgttgaccaacaaagaccatttgaccaaactggccaggtcgaaatatgatcctgtcagtgacgtttttgaggagccgtgggaaggattccgcaatgaagtggagcaaaaagtcaatgcgatcttggtctctcatcgctgtactcgaaaagtgtcgggggccttgcatgaagagaccaattatggccccacaggccttacagacgacaagggacaggcgatttatgtctatcgcaagaaactgcaagatttgaccggatcgatggtggagaaaattgtggatcccgtcgtcagagccattgttcgccagcgtttattggcctttggaatcgatccgcaaacacagtccggtaaagtcggcaaagaagtctggcaggagccgctttttatgcggtctaaaaatggcaaaggcccgcagattaagtcggtccgaattcgagacgtatttaataatatgatcggtttaaaagataaacaagggaaattatatcgtgctgtaaagccgggaggaaaccaccatattgaactctttgaatataaagatgataaaggcaatacaaaacgcgatgcccgagttgttacgatgtttgaggcaatccagagagtgaaaaacaacaggcccgtggtgtgccgggactacggtgatggaaagaagtttttatgttcattggcgaaaaatgaactagtcatgcttcaaagggaggataacagtgaggttcttcatagaatccaatatatttctgaattaccgacagggccgcgtatagtattgcgcccgcatacgtatgcagggaaattgtctgattcggacatgcctcccttaattcaacgaaagactcccaacactttggttggctataaagttcaaattgatccactcgggaggataaccagggccaatgattaagcgaatcgtggaggtgtcgcgtgcagggacgcacctttcgattacgctgggacaacttgttgtcaggcaaaacagagaagaagtgggccggattccgtgtgaggatatcggtgtgctgttagtatggcatacgggggtctcctatacccatgccgtctttacggaactgctcaaaaccggggcggcgattattttgtgcgacggacactatctgccggcggggatgatgctgcctttggatagcaatacggtgcaaaccgagcggtttcatatccagatcaatgccaaagagccgatcaaaaaacaactgtggcggcagctggtccgggccaaaattgctcatcaggcacaggtggtcagggaagatgagccaaccagtcgatttcttcggggactgcgcgacaaggttcgcagcggcgatccggataatattgaggctcaggccagcaagcggttttgggcggcctatttaccggagttccggcgggacgccgaaggcggggcgccgcccaataatctgctcaattatgggtatatggtgatgcgggcggctgtggcaagggcgctgtgctcggcagggctgctgccgacgttggggattcatcaccgcaataaatacaacgccttctgcctggccgatgatgtgctggaaccgtttcggggatttgtggaaaaaaaagtacgggcgatggcccgagaagctgcgcatccggcggaactgggggagctgaccccgcagcgaaagcaggctctgctggaggtgctctacgagccggtggagattgccggatttaatgggcctctgatggtgggactgcatcgaacggcggcctcgctgcagcgctgttttgcgggacagcaaaaggacctggagcttccgcgatatgattgaatcggggtatcgagccatgtggattgttgcaatgtttgacctgccgaccgatacaccgcgggcccgaaaagagtattcgctgtttcgaaaaaatctgatgcaggatggcttcagtatggtacaatattcagtctatgcaaggcactgtgccagcgaggagaacgcggatgtccattacaagcgagttcaggggtttttgccgccggacggagaggtccggcttatcacggttaccgataaacagttcgagcggatggctattttctggggaaaaatgcgcaaaccaaccccgccgccaccccgtcaactcgaattattttagggtgtttttgacacaactcattgcggcatcaggacttgggtatgacgtattataactgacctatgcctgagagcaagccacaacaatccactggacctggccgtcctgccggcaattataactgacctatgcctgagagcaaactacaacttagaggatttcgacggccaggagggtgatgtcgtccacttcggcggagctgcgtcgccagcgggtgatggcgttttcgagggtggacatcatggacatgacgggcctgtcgcagagggtcaaaaacaggtcggagaatcggaatttgccgcggttgtccacttcgccgatcagcggttccacgccgtcggagtagagcagaatcttgtcgccggactggaccgggacgaggacctgttcgaaatccatttcctcgaatacgcccagcagacctccgcggctgtgcagttgctgcggttcccggccgggacgcagcagcagcgggtaagggtggccggcgcgggcgaatgacagttccatcgtgtcggtattcagttggcagcagcaggcggtggcgaacagacagcccttgaggtgctgcagaatcatctgtcgattgaggtggttcaagacctctctgggagggaaaatgtgatattgattgccgtgtgtttcacgcagcacggcggtatgtttgagaaacatcgtcagcagggcggcgggcaccgagtggcccacggcgtcggcgatgtaaaagccgatgtgggtttcatcgaggcgggcggcgtcgaagatatcgcccgag

SEQ ID NO: 4537 - DNA, 11603 bp, synthetic construct
  misc_feature 1..11603: note = Synthetic
  source 1..11603: mol_type = other DNA
acacgctcctgttacgttcttgcccgccttctccacctctgccttcattgccgatagtgccttttctccgcctgtttcgcatgcttcggcacaaccgttacaagcaagcagaaagatatttctttcctccctaagcgactctaatacttcatccaaaggtttatcttttgtgaacagcatctttaaaattcctcaagcaccatattaactacttccggaattctccggctgacctgctcggtcagttccagcccgtaatttatttccttcggctcaacgccgatgattacaatttctctcggtgcacagtccattttttcagcggcagccagagcatcaattagcccaacctgatgtaagctgattttcgaatccttgttttggccgaaaatccgggttaatttatctatctctccggcttttatcctggccttgtaaatagtgccaggtttgctgccagcccttgtcgcatcaatgaccaccagtttacccaaaccctcttgtgacagcagtatatccagcccggcagttccgccatcaataacttctacatcgccgggcaaatccagcttctgtaaatgtttggctacgtggacaccaacaccctcatccttcagcagaatattgccaagaccaagaaccagaatccgcccgcctttgccactactatttatccgactaaccaccaaatttgcacttgtctttatcgccatatcaaacaaccctaaagacccctaatttgttccccctgacgtcaagtagatgaaccgcgcaagccagacacgggtcaaacgaccgcacaattcggacaagctcaaagggattgtttttatctttcactttagtacctattatggcctgctctaccgctcccggctggcctttatcatctttcggcgaagcattccaggccgtaggtgtaatcacctgataacgctcgattttcttatccttgacggtcatccagtgtcccactgaacctcgcgcagcttctgttaagcccgcacccgcaccggtttcaggaatccggctctcaacgataaccggctcaccaggctttaaggcctcaagccagtcgaccatagcatcaccgacgagtttagcctccagagcccttgctgcgtgtcggccaagcaccgaaaacagagcatcgatgccggcactaaattggccaagcagcgaatcaaccagttctttcgtcttgccgtctgcctgcacataattgcttaccatccgtgccaaaggcccgacctcgcaaacctcacctttatagcgcggagacttcagaaatgaataggcttctttcttcttaagtgccggatttgtttcaccttctacggggtttcttccggaatcggaatccgcataccaggaatgtttcaaatcttccgtgatattctccgaagccatcggcccaggctgcaaatctggtgaaataactccggccttgaacagcttgccggtgggcaaatcaaagccgccataaacaagaagccttttacagcctttgccaatctcgaaatagtcgctgtaggccttcgctacagctatcacgtccggaatgtaggtattatcaacaaaatcacgtatctcgttcaatcgccacaggaagttggtgattttgtcctctgttggcttttcggtaactccgccgggaacaatgccaacattatgaggcatctttccaccgaaaatcgaaagcatctcatgacactttcgtctgatatccagcgcttttagataatgatttaccaactcagcgtttgctttgcctgatactcgataatcaccctcgtagcgcggcacaaaaggcgccaaatcacccaccacaccaaccgcatccacataatccaacgccgcaagatgatagaaatgaaggatatgtgactgcaggaagttggagccaaaaataagagcgcgaatcaacttggcattatccggaattttatccgtcagaccaaacgcctcatcgatgcaaaaagccgacgccgtagcgtgggcaatggggcagacaccgcagattcgctgggtcagttgattggcgtcccgagggtccctccccagcaggattatctcaaaaccccgaaaaagtgtgccggcacttttcgcttctttgaccacgccaccgtcaatcacggcctcgacagccatatggccttctatccttgttatcgggtcaatcttgattttcttgctcatttgaggtcctcgaatgtaatcttttcataaatcggcgatgtgccgtccgggaactccggctcaacacaacccagacagggcgagcctgccttgacacaccagttcacgccattattccactgtctcaaaggacaatccgcataggtgtaatgacccttgcaccccaatttgtagagacagcccgggtcacctaatacttgagcaaatttccccttatcaaagtccgctcggcgagggcagctctcgtgaatcaaccgcccgtagataagttttggccggcccagctcgtccaaatcaagggcttcggcacctgagaaaagtatcacagatattgtgcctgtaaaccactccgggtgaggaggacagccgggaacgttcaccaccagcgtctcaatcccttcttcattaaaaatcgtcttaacacctttacacaaagtagggttaggcttcgctgccggtattccaccataagcagcacaggtgccgagggagattgtaagcagcgcatttcttccaagctctgcaacgctttgctgaatagttacatgcttgccgtctctttcgcctatactgccgtaaagcccgcctgcagcggtgggaatcgcaccttccacaactaaaatatagccgccttttctgttcttctcgacatccctgagcacctcaattaccggctcaccttgtccagccattatcgtcgcgtggaacattaaattaagctgttggccaggtacaacctcgtcgagcaggagattctgtatcctcgggctgaccgcattcaaaactgatacggaacagccggtacaacctgctccctgcaaccaaaccaccggatatttcttggtagccacttttgtccctttccatattaaagtttgcgattcatcgctcgccacccgttacacaatctgaaaaaccaaaatatcaaacacttcagccggccgctatttttttatgacttttattcacaacgacttatacaatttattcccaaagacgtatacgacccagaagtcttttctttgcactatattgctacgaaaataatccgaagatgtgcttctacaaaaatttcagcattgtggataacctgttgataactcaaattccacatcttaaaggcagtttcagcaacgctaaaaataccaaataaaaccgatacgtttttcaccgtcactttttagacccagccactgccaaaaatcgtaacccttaagttcctaacaacaaaatagttacgccaactcttacatacattaacaaaatcaaaataaagtctcgaacatcatattaacaatttggccaaaacatcccaaattaacaacattttgacaaaaaactgaccgttcgtggataatttatagaaaagctcacagacttcaaggggcctattaaccacgaattttgctgatttcacagattcttgtccgcctctggcggattagaaaaccgcagcttactatatagcatcagagaaaaatactcaaacaagcagcgaaaatatggcaaatttagacaacacctcggcccctattaaactgacaatgaatgttatgatggctcctgcgccttttatattacaggataccacgtatgcccgatacatcaatgcgaccatccagattagcataagaataaccagaatcatagcaaacccaaatacaaacacatctatagagttaattacaactgccggagcagtctgggtaagcttgaacattagatactcaagaactcttcgattggcatccggaaacatcgctatagcggcaatcaggtaaggccagcgggccaatgcctgggtcccaaaaacgtctatcattctaaaagaagaacgtgacacaatcaaaccaaagaaaaacagcggtatcaccatacatacccaattgattagaacctcagcaaagaaaaaccacaacggagcttcaagacctgtgtgaacgtcaaggacaccgtcgaaatgagtattaccgaacgagccaacaaatgcgcttatcaatataatcgctaaacccaacaacaaggccttgaagccggcgatgaatcgaaaagggttaaagagccactctatagtgagcttgtcgaacctatggctcaggcggttactatttgctgttttggtattcgctgtgatttcagtcatagcttttcctccttgtcgtcttgctcagatttctcagcaaacttgatgtgtttgataatttcatcgagccggttgcggactgtcgggtagctcagtcccagtaggcgagccatttcttttaaagagccgcttgacttgataaactcaatgataaagccctggtcgtcaagggaaagtctcgatagtaatggcagctcatattggccctggatttccgtttggcaccgctcgcaaacaagactttttacgttcaactggctgttgcacgatggacatatcgcaggtaataccttcataaacttatttcctgttaaccgaagttctttttacccattaggctgttatttagcaggctcctgactggaaacgaaaaacaagccggctatctgctttttgcggtcaaatacaaccttggcgtccagaacacctttttcgaatttgcaagttacgaaaattacatcatacagcagtatcttctcccttcgagtcccagcttgctcgacaaaaggccccgcctgggcgattatggaattccaaacctgctgcagtttttccgccggcagcgcctttttcatagtcccgtcgaaattttccaccgtctctttgtattcaccgctcgccagcgcgttcaccaaatccttcgccagagcttcaatcgttgcaggctcagcgtccgacccctgcacgacttttttcgccggctcggcgttatcgccttcaaatcccgctgcaactgcaaacacaattagccctgcccagagactaatacctgttatgcctataatccgtctcagtaacatttgcttgcctccttttggtattctaagtacgaataaacgatagcaaaaacagaaaacgcgagcactggaataataatgaaaaatatcgcatagttttggaaaaacaccccaacaaaagtaattaccccggctgtcttaagcagcttcccgccgattttgtgggttttgtcccacactttgtcgctgctcaaggtccagggggttcttatacctataaaccagttcctttttgaatgttcacaaagaatgccaacatagaaaaacaaaaggccgatgccgatcggcagcataacattggggcttatttcaactccaaggttccatagaataatttgcaagtcgatagaaagaaggaagacgaaaaacaggataataaatccatcgtaatatttcctgaatctttcgatgtttgctttcagcgggtctatcttcggcatagccaaaaaaagcagcgcaagaccagcagaaattaaaggcgtcaagaataacgcccagaattttggtatataactatccacctctcctttggcgttccagtgagaagccattttctccggcatctggggataaaaatatatcccaaggataatatccagcacgattattccaataatggctatttcacttttcctgataatcatacattaccataactacggaacggctttgataaagttaaacctctatttaataatattaaactcttatttactttttgcaagcaaaatcttgatatttttcaaatttttttacattctcaaaaaccggcttttcaggcccaaaaaccaattaaaggcaggtatgaccgtaatgaagggttagaaagcggtgattttttcttttaatgctcggcaggcggctgtcgggttgctggcctcggccacagccgagcaaacagcaatcgccttcgcgcctgcgttcaaaacatccccgacattgtcgagcgttataccgccgatagcaacgtgtccgatgcctgtgccgccaagtatctccacgccctgtttgacatagtccaggccgacaggcgcagcggtcggctttgtgccggtggaaaaaacagggcccaaacttacataagtgggaagctcctcgcaggcagcgtggagatgctcgattgaatgagtgcttttgccgatgattaagggtgttaactggagcttgcgagcctggtcaacaggcaaatcattttggccaagatgcacgccgtcggcaccggcggcgactgcgatatcgaccctgtcgtttattattgccaatacgccagcatctttgcaaaccctcgcgaattcaagggcaagggcaaaaagcctgtcgtcgtcaacgtcctttgcccgtagctgaatgcaaccggcgccgccggcgacgcagcgatgagttaaagaaagcacatcggcgggccccttaggggcaggcagggtgctactgattattacatacagcctgaccggcttaaatttttcggttgtattgctgaaaagaacaatatctttttcaagcgtataagcggagaatcggagcttttcgattgtccgggctactgcaggatttattgtctgggtcatctcagcgagggttcgcaatgattcggtaaggcgtttgcagccggctgtaaaacaatcccttaaatcactgcgctggagctggttatcaaccgttttgcccgcacctacatcgccaatggtatctctggcggcgataagctgagcagcgtcgagtttgccgatacaggctgaaagctcgtgtcgaagctgttttgtgcgctcggtcaatggagcggaattcagcgcaaatctgcagaattcctctattacgcgcatcgcctcgcgggcacgattgaaattggcatctataattctataaacgctgcgctgcataacggttttgattatacggttttaagtcaatattgaatagtgaaaacaaaaatgggagagtttatggattaatttcgaatttgcaggagaaaggggggaatggtgctattatacgagcatatgattgaaaatattcgaaaacgtttgaaaactgtatagaaacgttcgaaaactgtatagaaatattcaaaaattgtatagaaacattcgaaaatattcgaaaattttggaagaaaagttagccacagatttcacggatgacactgatttttttggtcacaaaaaggcacacaaaacatccgccttcgctaaagcttccgacttcgtcctgatataagacatcgggactgcgccggacaagccggcggacaggcaaagaaaattagctgcaggttgcctaagttaacacctggctacgttgaggaacttccctgctttggcttagcctacgccgaggtaaacgccggggcgggggggattttttaagccacaaattgggacgaatttactttgactgggataggtccttcgactacactcaggatgcttgtggacaacaactcgcaattgggtaatgtatgggcataaaaaggaacagccggcttttggccggctggtgtccgcgtgcttacgcacttgttgtgacaagcacgcaagcacaggtcagttataattgagataatatatagtggagcggcagaaaaaagtcaaggggaattttcggaaaattttttatggagggcatatgggttcttgcacgcttgggttggatatcgggtcaaacagcatcggctgggctttgatagaaacaaagaaaaaaccgtcaatcgttggtattggagtgagagtgtttcctgagggggtagacagggatacgaaggggttggagaaatctaagaatgccacaagacgagaagcaaggggagcaaggagaacacatcagaggagaaatcttcggaaagagcaattattgaaaaccctgcagaaaataaaattcctgccaacaagtgaatcagagctaaggtcggtgtttcacacaaacccatacggtttgcggaaaaagggactggatgagaagctggagccatacgaatttggcagagtgctataccacatcagtcagcgcaggggttttaagagcaatcgaaaaagcggaaaagctaaagaagatggcgttgtaataaagggggcgaccgctctgcaaacagagatggatacaaaaggatgccggacgataggtgagtattttgcatcgctgaatccagaggagcaacggatacggaagtggtacacattcaggtcgatgtacgaaaatgaattcgaccttctgtgggcaaagcaaagtgagttttatccagatatcctgacggaggaacttcgcaagaatataagggatgagattatattttttcaaagacctctgaaaccgcagaacgaaaaaatcgggaattgcgagttggaaccaagcgaaaaacgatgcccgcgaggagactggcatgctcggcgattcaggctgcttcaagatgtcaataacctgattatacaaaacccagacggcacagagcaaaaactttcaaatgaccagcaaaagcgaaaggtgcttctggatgaattaagccaaaacgaaaaactgtcttttgataaaattcgcaaaaagctgggactgatagaaactcaaaagttcaatgcagaatacagagtaagcaagagcggcaagaccgttgaatcattaaaaggcgataacttttcgtgggctatgcgaaaaaagaacatcttcggccccaacgtgtgggatgcgatgaatgaacaagagaaaataaaactcaacgagtggcttgtagaacttgaagacgaccagcttagagaaaaactgagaatagaatatagttttaacgataagcagatagaagctactctgaaaatatcattaccacagggatatatgagtttttcacgcaaggctattataaagttgcttgagttcatggagcaaggagccctcacaagcgaggcgatagctgttgcgtaccgtgatagaaaaagaaccagcgaagaaaacaatctcgataaattgccgattccagaggacttgcgtaatccgattgtgaacaaggcattatttgaggttcgcaaggttgtgaacgcgatagttaaagagtatggtaagccagggaaaattaaaattgaaatggcaagagaagtgcagggaagcagtaagcagcggaaagaattacattggaagcaaattgagaataaagaacgaaacgagaaagtccgacagcgattaattcaggacatgaatatcccgaatccaagtcgcaacgacattatcaaatacaaactatgggaggaatgcggaaagatctgtccatatacaggtaaatctatttctcaagaggcgttgttaggacctgaatttcaaattgaacacatattgccttacgaccggtcgcttgatgatagttatctgaacaagacgctctgcgaagttcacgaaaacaaagacgtaaagcggaatcagacaccctatgaggcatataaccacgacacggagaaatatgaacagatactggaacgggtaaataaatcacaaatgccctatccgaaaaagagaaagttctggcaaaaagagattggtttagaacaggccctcaggcaacttaatgacacaaggtatatttgcagagaaacggtaaagtacttaaaacaattaggcatctatgttgaagggacaagaggtaagattaccagcgagttgcggcatcagtggggactggatgggatatttgatgaacttggaacaaagagggacgacgaccatcgcaggcacgcagtagatgcgattgtggtgggggttactgaagacgaccacctgcgaaaattagcgagaagtaagtatgctattagcggcccatcatttgagcttccctggccggatttcagagaagaggtaagagagaacgtaaagaagataaacgtatcgcaccgtgttcagcgaaaggtatcaggcgcacttcataaagaaactaactacggcgcaacaaagaaagaagatttgtatgtatttcgcaaaaatctggaggacttaactctaccgatggcggaagatattgttgaccctgttgtgcgcgagattgtgaaaaaacggctggaggaaaaggggattgacttggatgggaaggacaggaagccacctaaagaggtttggaaagagccattgtatatgaagacaactaagagcaacaagaaagtgccgataaagagcgtaagggtctacaacatagccgaaaatgtaattgcaatgaaagacaggtcgggccaaccatacagatatgttgagccggggagtaaccatcatatagagatatttgagtacacagacaaaaagggcaaagttaaaagagacggcaaggttatcacgatgttcgaggcagtacaaagaaaccgacgaggtgagccagttgtaaaaaaggattatggggacgggaaaaaatttgtttattcgctggcaataaatgagatttttatgctggaacaagatggggaactctatcgtgtgcagaaaatcagtagcaatcaacagatatttttcaggcatcatacctttggcggcgaacttcaaaaacataaagggataagcaagtatcacaataccctaaacggacaaaaaaagacgattgatcctcttggcaggatatggccagcaaatgactaaaaagggtcaaatctgctaaaggcggataaagtgtgtctgcgataatgacgaggatattatcatggttttagcaggaggaaaccgtgataaaacgaattgtcgaaatatcgcaggcgaagacacatttagcaattcggtacaatcaactcattgtaaatcaagataaaaaagaaacttcgtcaattccctgtgaggatattggggttttgttagttgaccacagcggggtaacatatacacattcggtattcacggagctattacactgcggggcggcgattgtgctttgcggaggaaaccatcagccaagcgggatgcttttgcctcttgagagcaatacgctgcaagcggagagattcgcacagcagatagaagcgaaagagccggtgaagaagaaattgtggcagcaagttgttcgagcaaaaatcaggcatcaggcaaagatagtcggcaaggacagtgacgcatataaatcgctgatggcacttcgggaacaggttcgcagcggcgacccggataatatagaggcacaagcgagcaggaaattctggcctgtgtttataagcacgatagattttaagagggacatagatgggccgccgccgaataatcttttgaattacgggtatatggtgatgcgtgcggcggttgcaagggcattatgcagtgcggggctgctgccttgtttagggatacaccatcacaaccggtataatgcgttttgtttagcagatgacgttatggagccgttcagggggtttgtagaatcgaaggtgaagcagatttgcgagacacaaacggcaatcgatgatttgacacagacgataaaggcgcagttgttagaggtgctttatcaggaggtgacaatt

SEQ ID NO: 4538 - DNA, 11332 bp, synthetic construct
  source 1..11332: mol_type = other DNA
  misc_feature 1..11332: note = Synthetic
tcgacccgctgctgtaataagcgcgtgccttgagcgtcagtgaattgttaatcgtaaccgtcccgccgctggcgatggtcgtgccgtaatccttcggctcacgcccgtcggttgtgtagtaaatcgttccgccgcctgttattgttacagttgagcccgcggcaatttcgccgccgaactgactaaacaccggtgccgctaccgtcggataaaatcctcgcgacggataaccattactaatcagccaattggtgcggttggggaaatatggaccaatccagccctcttcaatcgggtgactgggatttgtcagccggtcccgctcgttgtcccagtaagccggcgtatagagcggggcattgacatccttgaaatcatggacgaaatctccccatcgcaccgattcgccaagtatggctttctcaatttgacttgcccgaacctggtaacggtcgatgtttttctgggcggtcagggcaccgttgttgaacaagtgcttatgaactcggtcgccaagcagacgattatactcaggattattgtggagagcattgtgcatattcccgggacccttgtcgtagtaatcatagaaagggaagtcgtgaaactgggtatgctcccatatcgcaatttccgcgtcccaggtataaaatttccacttgtcgagaggcggaccgtttacatccaacggattgcgggtgcttcccgcgtaccagtttttggaaccccagtcccagtttgtaacgaatgtagtgtaaataatataatcgcacatctgtgcggcatcaacgtgctgggcaaactcggcgtaaacactcgcagtcaccggattgctatagctgaacggcgacagcaagcttcgcatataatcccaactgtcacgctgaccttccttgacttcaacgccccccacaccttcgatagttccctctattgcgtcgtaatcctcgcgctgacctccgagatgctcggcaaggaagggaccatccggccgttcgctggcctgatacagaccccagtaaagcccatcgaggtacacgtgaacaaaccgtgcatcgggcgacagataacccatatcccgcagcgaatcctgtgcaaaggtgtctttgaggtattgtgcccttttgctgctccatacaccgtcaagccagccccagtgataattcgccctcagcgaaaggttatctaagcgttttgcgccggtatttgggaaaagaggaaactcgagcttcgacggcccaaattcgctcttgaagaatatccgcatagaatgtttggaggtgtatgtcggccctttgctttgattgcccacgaggcgcaatcccgcgtttacctggaaatcggcgctgctgcacgggtcgaaatactctactgaaacagggttttctatcgattcccaggggttaacgtatatgccaaccacggggtcgaagatatatttcatatcggtgacaatcgagagcgtcggtatcgccttcatcgcggtctcgaacctgctgctgtaacaggggtcgttaagaacacaggggtccatttcataatcggtaaaccctatgtcccattggacagggaagcccttcgaataggcatagctattgttctggttccttacgttattgaggaaaatgtaggtcgcggtatcgaccgtgctggccttgtagccgggcttaaatgccgcggcgcgaagacacgttgtgcccgtaatctgaattcgggcgtctggattgtaaattagcccgaccgtgtcggtgggggtgttgccgtcgagtgtgtattttatggtcgcatcgttatccttgcagaatagctccaccgtaaaattgctgtcgtagatgccgtgaggatggcttatatcaaccccatcgacaagccctaagtaaccctggctgttctgcgcccccggcgtagggaaacccatatatcgccagttgtagctcccgtccgggtaaggcccgaaagagatgtcgctgtcttgttcgccgaactcgatactgtcggccaaactcaggtcactaaaataaagcccgaccgcctcgcctcctttatccaacttgaacccgacgtggttggggccttcagttgtctcatcgtctgcccaaagcactaaatacccgtgcgccgggatagtggtttgagtcggggcgttactcggtatccgccatttatcgggggtattcaggtcgtcggtaatatacattccgccgatattgatggcttctgaaccggggttgtatatctctatccagtcctcgtactcgcccttgttgtcctttatcgtcgagtcgttagcggccataagctcgttgataagcggctgttcttcgaggaggttgatttgccagttttccgccaggagtgcaaaatcattaaaatcaacatcaccgtcgccgctgaaatccgcacagccagtccccggacatccggcgggcgccagccactggtcaacaaacttattcacgtcctgccggtcaaccttccagtcgagattcaaatcgcctgatatgtatggcggcacttcagccgctccaaacgctgccactgaatgtgccagacgattaccagtggcgccggtgttatgctgccaacttatggttacttgtcccgccaaggcaacaggccttgtgctgcccgccgcagatgataaacttgctgatacgtcccaccgttccaccataccgctgccggtaggattaaatgagccactgctgcctgaaaccacagcatcaactacccaggcgccgttcgttagtgttgtgatattggtcgaaatgatgttttgttcggtatttgagttggttgctaccgcctctcttgccgtctgggcaacacccgtaagcgaaatagcgcctgcgtttttgttgtcgatgtttccggcgtaagtaacgaggacggtatatgtcccggcggcaggcaaattggaatcaagcatatagtagagttcagtttttcgccttgttgagccgacgatagcggtcgaaccggccaccagtgtcatatttacgccgttgtatttgacgctgcttatgaccaggtcggattcggtactatcttcagcgccgacgcccactatcagcatacggttgctgcctgagccgatagtatgtgaccagcttattgtggtatcggcggtcgaactgaacgtgcaactggcattgtcaaatctgatggcccccctgacaagcggtgcacagacggctataaaaagaaaaacgaaaaaagaccctaagtttttacccgttgtcggtagcattcacactcttctcaattttaaggccccggttatgccgcctgagccaataaaaacaagcttatcttacgccattagcttctgatttactcctccagtttggttagacgctatttgcaggcgtgtgattgctgcaacccgtgatttaacagggaattgcgcattcattcacagtattctaacaaattaggcctaatcagtcaatgaatttagccgaaaagagcagaaaaacgcccctgtgcccataaaatattgtttttttcaggacgttagttttgcacctaattatcatccattcctaccaggtcttccaaattaacccagccattgacggggggaaagggctaagttattctaagggcgatataaaaggaacagccggcttttggccggctggtgtccgcgtgctttcgcacttgttgtgacaagcgctaaagcacaggtcagttacaattgagatgaataatagccgggaggcaaaaatagtcaagagggaaaactgaaattttttggaggactttatgggttctcacacacttggtttagacatcggttcaaacagcatcggctgggcactactggaaacaaagggaaaaccatcaatcgttgatatgggtgtacgggtttttccggagggagtggacagagacaccaaggggctggagaaatcaaaaaacgcaacacgacgagaggcaaggggagcaagaacaacgcaccaaaggcgatcccaaaggaaaaagcaattactaaaaaccttacaggcaattgggttcctgccaacggctgatatagaattgaggtcgctttttcatacaacaaacccatacggattacgaaaaaagggccttgatgaaaaacttgagcaatacgaatttgggcgtgcgctttatcacatcaatcagcgacggggcttcaagagtaaccgtaaaagtgggaaagcccgcgaagatggggttgtaataaaaggtgcaactgccctgcaaaaagaaatggacgcaaaaggatgtcggacgattggtgaatatttcgcgggcctgaatcctgaagaacagcgaataagaaaacaatatacgtttcggtcaatgtacgcagacgaatttgaccgattttgggcaaagcaaaaagagttttatcctgacactttaacggaagatttgcgcaagaaaatacgagaagatattatattttttcaaagaccgctgaaaccacaagatgaaaaaataggtaactgcgaacttgagccgggggaaaaacggtgcccacgtggggactggtacgcacgacgattcagattgctgcaggacgtgaacaacctgatgattcagaaccctgacggctcggagaacaaattaacaagtgaacaacggaaagctttactcgacgaactcggacaaaagaaagaattatcatatgacaagattcgtgaactgctgggattattagaaacgcagcgattcaatctcgaacaggacggtaaggtcaagaacctcaagggtgatggctttatggcggcgatgcgcagcaagaagttatttggaccgaaagtctggggcgaaatggcggaaggagagaaggttaaactaaacgaatggttggttgaacttgaggacgatgaacttaaagagaaactgacaagtgagtacaaactgaacgaagaacaaatagaggcgtctctgaaaattgaacttccgcagagatatatgagtttttctcgtaaagcgattatgaaacttttgacgtttatggaacagggatatcttacttctgaatcaatagaaaaagcaggatacagacgcgatgatagtgacacaggacaggcagttgatgcgctgcccttgcctcaggatttaagaaatccgatagtacaaaaggcattattcgaggttcgcaaggtcgtgaacgcaataattagggaatacggcaagccgggaaagataaagattgaaatggcaagagatgttcacggcagtagtcgacagcgagaagaattgcactggaagatattggacaatgagaagaggaacaaagaggttcgcgaacggctgatagaagacatgaagatcgtgaaaccaaccagagatgatgttataaaatataagttatgggaagaatgcggcaggacctgcccatataccggaaaacacatttcacagacagcgctattcggggaaaacccggagtttcaaatagagcatattttgccatatgaccgtagtttagatgatagttatatgaacaaggcgctgtgcgaggttcacgagaatattcacgtcaaaaaaggtcagacgccctatgaggcatacaaccacaacacggagaaatatgaacaaatacttgaacgggtaaataaatcacaaatgccctatcccaagaaaaggaaattctggcagaaggaaatagacctcgaccaacatatcgcaagggaattgaatgacaccagatacatttgtcgagaagtggttaaatacttcaagcaacttggagttaatgtgcgaggaacaaggggcaaaattaccagcgagttaaggcatcagtggggtttggacggggtttttgatgaaattggaacaaaacgagacgacgaccacagacgacatgccgtcgatgcggttgtagtaggtgttaccgaaaatgaacatttgcgccgattggcgaaaagcaaatatgcggtgacgggcaagacatttgacctgccttggccagatttcagagaggaggttcgggagaacgtaaaacagataaacgtttcctatcgtatccagcgaaaggtgtcaggcgcacttcacaaagaaaccaactacggggcaacaaataaagatggtttgtatgtatttcgtaaaaatctggaggacttaactctaccgatggtggatgatattgttgaccctgtggtgcgcaatattgtaaaaaaacgactggaagaaaaaggcatcgacttgaatggcaaggacagaaatcccccgaaagagatttggaaagagacgttgtatatgaagacaactaagagcaacaaacgggtaccgataaagaaggttagggtttacaatgcagccgagaatatgattccaatgatggacgaacaagggcaaccatacagatatgttgagccggggagcaaccatcatattgagatattcgaatatactgacaaaaacagtaaggtcaaaagagacggaaaagtcgttacaatgttcgaggcggttcagcgaaatcgacgaggtgagccagttgtaaaaaaggattacggggacgtcaagaaatttatttgttcgctggcaataaatgagatgtttatgcttgaattagatgatggatccaaagaattataccgagtgcagaaaataagcagcaatcaacaaatattctttagacatcacacctttggtggcaatcttcaaaaacataaagggataagcagatatcccaataccctgaatgggcaaaaaaagactatcgacccacttggcaaaatatttttggcgaatgactaaaaaatagcaaatccgccgaaggcggataaagtgtgtctgcgatattgacgagtatattatcatggttttagggagtggaagctgtgataaagaggataatagagatatcgcaggcgaaaaggcacttggctgtccggctgggtcagctaatcatcaaagaacccccgacagggaatcagggcgagcaatcatcgagggtaaccggccaagagcagagcattccctgtgaagatattggcatattactcattgaccacccagccgtgacatatacacattcggttttcacggagttaatccgctgcggcgcggctgtaatattctgcggaagcgaccatcaccccgcaggattggttctcccaatcgaaggaaataccgtccagacagaacggttccgacagcaaatcgaggccaaagagccgataaaaaaacagttgtggcgacaactcgtccgagcaaaaatcaaacaccaggcgaaaatcgcgggacaggacagcgaggtctataaagagttaatgggattacgagagcgggttcgcagcggcgacccggaaaatatcgaggcacaggcgagcaagaaattctggcccgcttttataaccactatcgacttcagaagaaacatcgaagggctgccgcccaataatcttttgaattacggttatacagttatgcgtgcggctgtggcaagggcattgtgttcagcaggattgcacccatcaatcgggcttcaccactgcaataaatacaacgcgttttgtcttgccgatgacgttttagaaccattcaggggttttgtcgaagcgaaggtcaagcaaatctgcgaaacccaatcagccatcgatgaactgacacagccgataaaggcgcaactattagaagtgctttatcaggaggtaacaattggcgacaacgcgggccctctgatggttggtctgcacagaacagctgcgagtttggttcggtgttttgcgggcgagcaaaaagaaatggatttaccaaaattgtaaccacgaagacccaaaggcacaaagaaaagaaaaaattcagggtaatctgtgaaatctgtggttaaaaaacttggtgtctttgtgacttggtggtaaggcagtagctaaaatgatattaagcgggtatagagccgtgtggatttttgcgatgttcgacttaccgaccgatacaaaaaaggcaaggaaggactataccgattttcgcaagaatcttttgaaaaatggtttcactatgctacaatattcggtgtatgttaggcactgtgcaagcgaggaaaatgccgatgttcactacaacagggtcaaagtttttcttcccgatgacggcgaagtccgactcgttaccattacggataagcagttcggatgtatggaatccttcttgggaaaaatgcgaaaaccaccccctccgcagcccagacaactcgaattattctaattcgagccgttcgcaaacccttgctgcgcaaggccttgcgaacggctcattgtaactgacctgtgcctgagtgcaagccacaacttctatgataagggtgaggtactatcggacattgtaactgacctgtgcctgagtgcaagccacaacttttgaaccggacgatattatcgggactctattgtaactgacctgtgcctgagtgcaagccacaactttcagattcaaacaaagagccggactcccattgtaactgacctgtgcctgagtgcaagccacaactgtctgctggaggtaaccatctgttggctttattgtaactgacctgtgcctgagtgcaagccacaactcattttttgatgctcggacacaggttatcattgtaactgacctgtgcctgagtgcaagccacaacggaaaatttatccgcacagtgttcacgaagattgtaactgacctgtgcctgagtgcaagccacaacagagtccgcatacttaaagcatcgccgaatattgtaactgacctgtgcctgagtgcaagccacaactcggagaggggcacaactcgttcgattccgattgtaactgacctgtgcctgagtgcaagccacaactatcgaagaccttaccgacattgtttacaaattgtaactgacctgtgcctgagtgcaagccacaaccggttgtggccgagttcctcatctttatcgattgtaactgacctgtgcctgagtgcaagccacaactagagccgattagtgcttttgttatacagtattgtaactgacctgtgcctgagtgcaagccacaacgcgatgctatgcggtaatatttgcgattatattgtaactgacctgtgcctgagtgcaagccacaactgtcactaatgcaggtctttggtatcataaattgtaactgacctgtgcctgagtgcaagccacaactatccgacggagctatcgacatcgtccagtattgtaactgacctgtgcctgagtgcaagccacaacgctgaaatcgttgataagaaggaaggccaattgtaactgacctgtgcctgagtgcaatccacaactcaaatcaatgtaccttacacaggaacagcattgtaactgacctgtgcctgagtgcaagccacaacgacgaagccggcgggtgctcgccgacggtgattgtaactgacctgtgcctgagtgcaagccacaaccgccaaccttgccttccgcgtgcatcaaatattgtaactgacctgtgcctgagtgcaagccacaacttcaatgacctgtgccatactgaaggcagtattgtaactgacctgtgcctgagtgcaagccacaacgctcaagcttgtttatgcgctcgcggtcctattgtaactgacctgtgcctgagtgcaagccacaacgaaaaaccaagcggagtcagattattcgatattgtaactgacctgtgcctgagtgcaagccacaactatggcagtcgaaacatctaaaacgccgttattgtaactgacctgtgcctgagtgcaagccacaacacgcagtcgatgattatctcatcggcggtgattgtaactgacctgtgcctgagtgcaagccacaacgagataatgcttgacaatgacctgcctttaattgtaactgacctgtgcctgagtgcaagccacaactcactatgatgtcggctctggcaaacgtaattgtaactgacctgtccggctacggctcggcgccttcgccgagacgagtgcctgctcgtgctacgtagcgtcccgctaaaatcggggatactacgcagagtagcaagtgtaagccacaacagtcgtttcagccgtaaaaatccgtgttctctttgtaatctgcgaagccctgcgtcggagcgaagcgcagaccccgcggctcgttttgctttgcaaaacggcgggggtggttaaagttttaagtccggccggactgtgtaatctgccctgccaactgctcgagggtggcgtgcatccgggggtcttttttctgcaggtcctcgattttaccgcaggcgtgcatcacggtcgtatggtcccggcctcccaaatgcccgccgatttcctcaaagctgtgctttgttagctgcctggccagatacatacaaatctgtctcggctcggctacgctctgggcgcgtttcttgctttgcaggtccgctaagcggacattgaagtggcgagccacaacgtcggtaatatcgctgattctgatgtgcctggtgctggcgtcaaactggccatcgagggcggtctgggccatttgaagggtgatttctttgccggtcgtcatcgagaccgcgtatatagtcgtcagcgccccttcaagctcccttatatttgcgtggaactttcgggcaatgtggccggcaacctcgtcgcttacctccagcccccgaagatgggcctttttctgcacaatggcgatgcgtgtttcatagctcggcgggtcgattcgagcgaccaatccccagttgaacctgctgataagccgctcttccagcgatggtatctcgcctggcgggctatcggcgctcaagatgatttgtttgccgttgctgtacagcgcgttgtatgtgtgaaaaaattcctcctggctttgttcgcgttcgcggaggaattgcacgtcgtcgatgatgagggtatcaaccgagcgaaatcggctctgaaatcccggcatattaccctgctcgattgcctgaatgaagcgattcacaaattcctcacagcttaaaagctggataacggcggagtgggatttgcgtttcatttcgtggcagacggcgtgaagaagatgggtcttgcccaggccggaatggccgtaaacgaacaggggattataggtgttgccgggcgactggcttacggcgacgcagcttgcatgcgccagccggttgcaggggccgactacgaaattgtcaaaagtataatcgggatgcagagtaggtccgtctttaggtctttgacctgctgaatccgtccggagcaaaccatcggcggaaaactgaacggatataagatggcccgttatctgctgggcggcctttgtgaaggcgctgcggcagttactgtgcaaaaactgggcgcaggcctcgtccgggcagccaacctcaagcgacccgcccgt

SEQ ID NO: 4539 - DNA, 7832 bp, synthetic construct
  source 1..7832: mol_type = other DNA
  misc_feature 1..7832: note = Synthetic
cacaagattatcctcgatgttcgtaatcaatcccatcagtcgctcggcgaacggcttacgatccaagcagtcgttcttaaaaggatcatctttatctattgtgatttctggtgtaatcaacctcattaaaatctctcctgttttttcgctccaaaatccaaacccgcaattcccgccaaacaaattcgtccgttctccgtccctaagggactgcgaaggatgaatcgctcgtctctcgtccatcgtccgtcctccctcgtccactcaacactcaccatttaaccaatcaaccaattcaatttcaagtaggtctgtgttaatcagcgaaatctgtggttcattttatctacttttcaagtaactcgaggcatagttgcgaccaggtctccatagaaccccgaaccttacgcagctcggctggactcataaaagccatctgggtaatcacctgctcccgcctgctgacgttcggcgaatctaaaatccagtggtgaactattcctaagtgcacgcttccaacctcggtagagtcatcattgagcagagcgacaattttatcgctgtggccggcttctacagatacttcctccgcaacttcacgctgaacggcggtaagataattttcgtataagtaagcaaataaagaactattatcagcatcaatcggatttatatggcctcctatgccgatggaccttagtcccgtaagccgggactcccctgcccgcctgccacggacgtagctgaggtatttgccgtcgcagctcattatcacgtagggaataagctgcttatagccggggtcggcttcggcctgcggcctcgatatgaaacgcggaacgcccggaacgaagagcttatcgagatatcgctggacgtcaaaaaccagcccctggaacatccctgcctgctcgaggacctttcgctcaacaaccagcacctgttcttccttcgccatcctgctaatccttgttaggaaactaattcgctaatccctattctcctgatttcctgttctcccgataccctgctccctgctctcccgataacctgataccctgacccatcactcactacttaccaaacagccacggcgttaaatgttcctggacctccattactccaacattcctatttggtatgataaagtgctccggcacagggaatcgtgagcacaaaagcaacgcctctctgctgacctgttcgattaccgactcattgtcgataccttcagtcaccctatttataaaggtggcaatctgccggcattcctcttccttcattcccctcgtggtaatcgccggcgtcccgaggcgcactccgcttgggtctgccggcggagcagtgtcaccggggacagtattataattagccactatcctggccctgtctaatgccttggctaatttctttccggggatttttttgttccgcaaatcaattaaaatcaaatgattgtccgtcccgccggatacaagcttaaaaccatattctaacagtttctcagccagcgccctcgcattcttgactatctgctctgcataagcgacgaactccggcgtatcggcctcagccagtgccacagcaatagccgttagcgtgtgcatatgcgggccgccctgcaggccggggaaaaccgccctatcgaccttttccgcgtgctcggctttacacaacagcattccgccgcgaggcccccgcaatgttttatgtgttgtggtggaaactatatctgcatacgggaccggacttttgtgtatccccgccaccacaagacccgcaacgtgcgctatgtcactgacgtggtatgcccccaccttttttgctatctggccgaatatctcaaaatcaatctccctcggatacgcagtggcgccggagataattatctttgggcggtgtttcttggcaagctcctcaatcaggttaaaatccaatctgcccgtatcagtgtttacaggataagagatggacttatagaacttgcttgtcagagacaccttccagccgtgcgtcaggtgtccgccgtgcacaagggacattcccataatggtatcccccggctctatcagggccgcataagcagccaggttcgcaaccgaccccgagtagggctggacattcgcatggtcggccttaaataatttcttcgcccgttcctgagccaccttttcaataaggtcggttacctgctggccttcatagtatcgcctgcccggataaccctccgagtatctgttggtaaggcagcttccgctggccagcatcaccgccttggatacatagttctcggaagggataagacggattgagccgctctcaagggcctcttcctgtcttataagctcatatatttgcgggtcatactgctcaagagccattttcataattggtgcctccttaaaactcctttcattacgagtcgttccggggttcctaaatgcagcatcctgcctgcaaattctcttatagcacagcccaactttctatacaagtatttatcacaggattacttatttttttaatggttccgatggattttttcaataacttgacacggaatccactttcctttatcatttcctccggtgcgaatatcaatgaggaatacgcaatgccgcttctaactcaaaacagactcttctatcgcggattaaaaaggattcgccccaccgaacatttgttacaatgctcgatggggcggagtccgcgggttttcacccttgttgtgaaaagcacgcggacgcggatcaataataattataaaaagtagtggtgcagatagtcaagtagaaaaatcaaaaaattttagttcttggagggaatttatggattcttacacactggggttagatattgggtcgaacagtatcggctgggcattgcttgacgtaggggaaaggcccacaatagtcggtatgggggtgcgggtttttccagaaggggttaacaaagaaaaagggcaggaaaaatcgaagaacgctacgcgacgagaagccagaggagcaagaagaacgcatcaaagaaggaatctaagacgagaccagcttgtaaagactctaaagaaggcgggactattaccggaaggaaataaagaattagctgagctgctgagcaataaagacccgtacgaattacgcaaaaagggtttggatgagaaactggatttatatgattttggacgcgcactttttcatattaaccaacggcgcgggtttaagagcaatcgcaaaagcgacaagaagaaagaggacgggccgattgcaaagggagcaggagagttacagaaaagaatcaacgacgcaaagtgcaggacattaggagagtactttgcagggctgaacccggaggagcaacggataagagagaaatatacattccggtcaatgtatgaggaagaattcgacttgttgtgggcaaagcaaagtaagttttatccgaaggtgttgactgaggaacttcaagagaaggtacgagacaagattatatttttccaacgaccgatgagatgggaccctaagacaattggtgactgcgtacttgagcttggggaaaaacgctgtccgagaggagactggtacgcgaaacgatttcgaattctacaggatgttaataatcttaaaatctgtaatccagacggaaccgttgattctttgacagaagaacaacggcaaattctgctggatgagctaagcaaaaagaaggaagtgaaattcacgtctttacggaagagactcggcctgttggagtcacagaaatttaatgctgaatacgaggtcgatgagaagggtaagaagaatgaaaaactcaaaggtgatgttttctgcgcatcaatgaggagcaaaaagatattcggctccaaggtctgggatggaatggatgaggaagaaaagattaagcttaatgagtggcttgtggagttcgaggatgaccagatcggagaaaagctgcgaagcgaatacaactttaatgataagcagatagaatccgttctgaaaatatcactgccacagggttatatgagtttctcgcgcaaggcgatacaaaaactgctgcctctaatggaagagggaaagcgaacagacgaggcattggacaaggtttatccggagcgcaacgagtatgacgaggtagaagaaaccaacaaactgcagttacccaaagatttgcgtaatccattagttaatcgtgctatgtttgaggttcgaaaagttgttaacgctatagttcgagagtacggaaagccagcaaaaataaagattgagatggcaagagatgtcagaggcaccacaagagaaagaaggaaaagccacttcaagatgctggacaatgagaggcgaaacgagcagacgagaaaaagattaatagaggacatgaagatagtaagtcctacgagggacgacatcatcaaatacaatctctggatagaatgcgggaagatatgtccctacacaggcaaatcgatttctcaggcagctttgtttgggccgaatcccgagtttcaggttgagcacattctgccctatgaccggacgctggacgacagttttatgaacaagacactgtgcgaggttcacgaaaacaaggacgttaaaaggaaccagactccctttgaggcatatggtcatgatgaggagaagtttgagcagttgaaacaaagggtaaacaggacaaagatgccatattggaaaaagcagaagttttggcaaaaagaaatcgatacagataatatcataagccgagaactcaatgatacacgatatataaatcgagaggtggttaaatatcttaagcaaatctgcagcaatacaagcgggacaaaagggaaaataacatctgagctcgggtatcagtggggatttatcaaggacaggaacgaccatcgacatcatgcgatagacgcagcagtaattgccgttacccagcccgagcatttgcggcaattgggaaagagtaagtattcaaagggaacgattagttttcaaccaccgtggccacactttcgagaggaattatctgagagggttaaacatattaatgtctcacataagcccagccgtaaggtatctggagctcttcatgaggagacgaactatggactgacggggctgaaggataaaaagggacaggacatttttgtctatcgtaagaaattggaggatttaaccaaccagatgataatcaaaattgttgaccctgttgttagagaaattgttatcgggcggcttgccgaatatggaatagaccttgcgaaagacaagaaaattcctcctaaggatgtgtggagtaagccattgtatatgaagaacacaagaagcgataagaaagtgccaatcaagaaagtgagaattaggaaggtgctaagcaatgctgagggtatccgaaatcaagagggaaaggtatatcggtatgttaatcctgggagaaatcaccatgtagagatttgggagtacacagaaggaaagaaagaagggaagcgagacgcggaggtggtaagcatgtttgaggcggttcgtcgtagtcagtcaggtaagccagtggttcaacgtaaccacgggccagggacaagatttgtctgctcattagcgattaatgatatggtcatgatgaaaaataagacgggtgaaatggatctctaccgagttcagaagatggatgcaaacaagatggtcaggttccgtcaccatacggcatcaacgattgaccggaaggaaacatacatagacaagacggcgcatcttttcgagggtcataaggttacggttgacccattgggtcgggtttggagggcaaatgattgaagtaattagcgatttctgcttgccggttttcgattgattgatagattatctcgcggagtaaatttgccgataatgtaatggagggatgaaggcgggatatcggcaaaatgataaagaagataattgagatatcggaggcaggggcacatttagcagttcggcacgcccagttaatcgttaagcgagacggtgcgcaaatcagcagcataccttgcgaggacgtgggggttcttttggttgaccacatcggcgtgacgtacacacactcggtttttacagagttactgcgtcagggtgcggcggtggttctgtgcggagggaatcatcagccgacagggatgttactacccatcgaaagcaacagtatgcagacagagagatttcggcagcagatagaggcgaaggagccggtaaaaaagagattgtggagacagattgtccgagcaaagataaaacatcaagcgaaattagtcgggcaggatagcgacgtttataaagtattaatggtgttgcgggataaggtgcgctcgggcgaccctgaaaatatagaagcgcaggcgagcaagaagttctggcctgtgtatgtgcaggatattatttctgagtttcacagggacatcgagggcaggccgcccaataatatgctcaactatgggtatatggtaatgcgggcggctgttgcgcgggcactatgttcagcgggtcttttgccctgtcttgggattcatcatcgcaaccgctacaacgcattttgcttagctgatgatatgttagagccatttcggggatttgttgaggagaaagtgcgagatatagtcaaggcaaatggtgtgccggatgaattaagtcagccgattaaggcccggcttttagaggtgttatatgagccggtaacaatcacgggtttcgaggggcctttaatggtcgggcttcatcgaacaatggcatctctgcaaaggtgctttgcgggagagcagaaggagctggatttgcctgagatatgattttgagcagttacagagcgatgtggattttcacgatgtttgatttgccaacggacacaaaaaaggcaaggaaagactatacggattttaggaaaaatttgttgaaagacggctttagtatgctacaatattcggtgtatgtcaggcattgtgcgagtgaggaaaatgcagatgtgcattatggaagggtcaaaaattttttgcctcctgatggagaagttcggcttgttgctattaccgataagcaattcgggcggatggagactttctggggaaaaatgcggaaaccccctgctgttcagccgagacagctcgaattattttgaaaaatttagccgcaaacccttaacagcaaagggtttgcggctcacccattataactgatccgcgtccgagtgcaagccacaactaccaagcgtatttgttacggctaattttgattataactgatccgcgtccgagtgcaagccacaacggtgagaatgttttatcaacacacattttcattataactgatccgcgtccgagtgcaagccacaacgttaaggcgatatacgtgggggtagttaccattataactgatccgcgtccgagtgcaagccacaactccatatcgcaagcacctaaagcgtttattattataactgatccgcgtccgagtgcaagccacaacattgtgcagggtcagcgtatctttacacacattataactgatccgcgtccgagtgcaagccacaaccaagaaggtgcagtaggtttagttattgagattataactgatccgcgtccgagtgcaagccacaactggtgaaggtaatgtccagtgtgcagcccaattataactgatccgcgtccgagtgcaagccacaactgatacagactcactgattgtaaataataaattataactgatccgcgtccgagtgcaagccacaactaactgccggaggggttaccgcctccgaggattataactgatccgcgtccgagtgcaagccacaacccagaacccgaaggcactctcagc

SEQ ID NO: 4540 - DNA, 6879 bp, synthetic construct
  misc_feature 1..6879: note = Synthetic
  source 1..6879: mol_type = other DNA
ggccgatttgtagaggattctcgacaattgtagagcaacttgggtgtctgtcccttcgactctcctgagggcaagcttccgtcttctgccttgtgtcttctgtattctgtcatctgtcttctgccttgtgcattcctcattaaccacggattccacggatgaacacggattgggtgaatgtgtttatgcggtcctatttacccattttctcgcctacccatctgcacaaagagcctcttttaactttttactcttagcttgtaactcacaaggctttggcttgtctgttagatatatattatacccgatggacggctttttctcaagcgaattgcggacaaaatctccgcgaccatacggcgtaaaccgtatctcgtaccttctcaagcatatgtcgcccgctcatccgcgccgttttctgcgaagaattccgtttgtcgttcgcgagatttggactaaaatggggtaagaagggggacgcggtcttgaatacagtggacggactacaaaaggttgggccccattgggcattttttggaatgcccaatggggcttagcctgcgtagcttgcgctacttgttatggcaagcacgcaggcacggatcaattgtaggataccatagattgcggagaaaagtcaagaccgaaaattagaaattctcagaatttaggaggtgaagattatgagcagttacacgctcggattagatatcggctctaacagtattggctgggcgctggttgatttaggtgagaagccatccatagtcgatatgggtgtccgggttttcccggaaggcgtggatcgggacaccaaaggcttagagaaatcgaagaacgccacgcggagagaagcaagaggtgcgagaagaacgcaccagaggcgtaatcttcggaaaggacaattgctaagcactctgcaagtgtctgggttcttgccaaaagacgactcggaattgaggtcgctgtttcacaccaacccttatcaattgcgcaaaaagggactcgatgagaaactcgaaccttatgaatttggcagagttctttatcacttaagccagcgtagggggtttaagagcaatcgcaagagcggaaaagggaaggaagacggcgttatcataaaaggggcaaacgcactgcaaacggaaatggacagcaaaggatgccatacgatcggggagtattttgccgggcttaatgccgatgaacagagaatccgaggacgctacactttccgcagtatgtatgagcaagaattttctctattgtggacaaagcaaggtgaatattatcctgatgttctaactgtaggacttcagaaaaaaatacgtgatgagattatatttttccagcgaccgctaaaatgggatcccgagacgattggtgattgtgaattggagccaggtgagaaacgctgtccgagaggagactggtatgcgaggcgattcaggttgctgcaggatgtcaacaacctgattgttcaaaacccagacggcagcgaagataagctgtccggcgaccagcgaaaaatactccttgatgagttaggccaaaaagagaaactgcctttcgacaagatacgacaaaagctggggctgatggaaactcagaagtttaacgccgaatacaagataggcaggagcggcaagactgtggaatcattaaagggtgataacttttcgtggtcaatgagaagcaagaatatcttcggccccaaaaagtgggatgcgatagatgagcaggaaaaaatgaagcttaataagtggcttgtagagtttgaagaggaccagcttagagaaaaactgcgaagcgaatatggttttaatgatgagcagataaaagcgcttttgaaaattgtgttgccacagggttatatgagtttttcgcgcaaggcgatcataaagctgcttgagtttatggatcagggagctattacaagcgaggcaatagctgttgcgtatcgcggcgggcaaacgaccggtggaaaagaggataatctggatgaactaccgatgccagaggacctgcgtaacccgattgtgaacaaagcactatttgaggttcgtaaggttataaatgctattattcgggagtacgggaagccaaagaagataaagatcgagatggcgagggatgtacagggcagcaggcgccagcgagaggaattgcattggaagcaagaggaaaacaaaaggagaaacgaggatgcgcgcaagcgggtgattgaggatattgggataaggaatccgaccagagaagatattatcaagtacaacctatggcaagaatgtgataagagatgcccatatacgggaaggcagatttcgcaggagggattgtttggggcgaaccctgaatttcagatcgaacatatcctgccttacgaccgcagcttagacgatagtttcatcaacaaaacgctctgtgaagtccacgagaatattcacgtcaagaagaaccagactccctttgaggcgtacagccacgacccagaaagatatgaacagataaagcagaacataaaagttctaccctggccgaagcgacaaaaattcttggagcaagaaataaacctcgacacgcatataaatagagaactaaacgacaccagatatatctgccgagaagtcgtaggatacctcaaacagctcggcgtaaacgtgcgcggaacaaagggcaagattacggcagagctgcgtcatcagtgggggctggacggcattttcgaggagcttcgaaccatgcgtgatgacgaccatcgtcgccatgctgtcgatgcagtcgtggtgggcgttactgaaaacgagcatttgcgcaggctggccagaagcaagtactcagtgacaggagtgtcctttgaagcgccctgggatggtttcagagagcaggttagagagaaggttaagcacattaacgtttcacaccgggcttgtcgcaaggtatcaggaaagctccacgaagagacgaactacgggccgacaaaggaaaaagaccggtatgtgttccgcaagaagttagaggacttgacgctggcgatgctgaaagacattgtcgatgatgttgtgcgggagattgtaagaaaacggctggaggaaaaaggcgttgatttggctggcaaagacaagaaaccaccaagggaggtctggaaagacctgtatatgaagacaaccaagagcgagaagaaggtgcggataaagaaagtccgggtttataatgtggctaagaatgtaaaaggaatgaaagaccgttcgggccaggtatacagatacgttgagcccgggagcaaccatcatatcgagatatttgagtacacagacgcaaaaggcaaagtcaaaagagatggggaggttatcaccatgtttgacgcggttcagaaaagccagacacgtgaacctgttgtaaacaggtatttcgggcagagcaagaagtttatattctcccttgcaatgaatgagatgtttatgatggacacaaaaagtggttcaaaagagctctatcgtgtgcaaaaaatcagtggcaataaacagatattctttaggcaccatacatttgcaggggagttacagaagcataagggaataagcaagtgcccgaattctcttcaaggatacaaggtcacgattgacccaattgggagggtttggccggcaaacgattagcatttacgccattttccgcgtaaggaacgccccgcattttgccgatatacagtatcggcagaaccgtgccagcgggagatggtgcccatgattaagcgtattgtcgagatttcatcggcaaggacgcatctttcaattcagtacaaccagctaatagtcaagcaggaaggacaggaggtttcgaggattccctgcgaagatattggcgtactgctggtcgaccatcagggaaccagttacacgcactgcgttttcacagagctattacgctgcggagcggcaatagtactttgcggcagtaaccatcatccggcagggatgctccttcccatcgaaagcaatactatgcagacagaacgtttccgacagcagatagaggtaaaagagccggtcaagaaaaaattgtggcagcaaatcgtaaaagcaaaaattaaacaccaggcgaaggtggtcggcaaggatagtgacatctataaatccttgatggcgctacgagacagagtccgctccggagacccggaaaatattgagtcgcaggcaagcagaaaattctggccggtatatttgcaggatacacaattccacagggatatcgaaggcccgccgccaaacaatatgctcaactatggatatatggtgatgcgtgcggctgtcgcccgcgcgctttgctcagcaggacttttgccctgtctgggtatccaccaccgcaaccgctacaacgcattctgcctggccgatgatttactcgaacccttcagaggatttgtggaggcaaaagtgagggacatgtgtaaagaaatcggtgccccggacaagctcgaccaagcgctcaaagccagaattttggaagtgctctatgagccggtgacaatcgcagggtttgaaggacctttgatggttggtcttcatcggacgatggcatcgcttgttaggtgttttgctggcgagcaaaaagacctggatttacctgaaacttgtcctgagcgcagccgaaggatatgattctaagcggatacagggccgtgtggattttcgccatgtttgatctaccaaccgacactccaaaggcgcggagagactacacggattttcgcaaaaatctgttgaaagatggcttcactatgctacaatactcggtgtacgttagacactgtgccagcgaggaaaacgcagatgttcactataaaaggatcaaaagttttttgcctccggacggtgaagttcgaattattaccgttacggataagcagttttctcgcatggagactttttggggaaaaatgcgaaaaccagcccgtccgcaacctcgacagctcgaattattttagcaaatttaggctgcaagtccttgcaaagcaaggacttgcagcctcagtattataactgatccgtgcctgagtgcaagtcacaactatctgctgcaaggattcgtgtcgagaataattataactgatccgtgcctgagtgcaagtcacaactcaaactcgatgcgcagtataagactgcttattataactgatccgtgcctgagtgcaagtcacaacggtgcggccatgaatgtgtctactgttataattataactgatccgtgcctgagtgcaagtcacaactcttacttgccgctgctactaccactccgtattataactgatccgtgcctgagtgcaagtcacaacgaaaacattaagacagaccgggccggtcaaattataactgatccgtgcctgagtgcaagtcacaactctgctaaatacgcaaagaagctcggcacattataactgatccgtgcctgagtgcaagtcacaaccttccttcgcccgctcgtcggtgacgtcccattataactgatccgtgcctgagtgcaagtcacaacggtaactatgtccggcacctttcaaagggcattataactgatccgtgcctgagtgcaagtcacaacccgaacctcgtccacccaaaaggaagggctattataactgatccgtgcctgagtgcaagtcacaacaatatgtagcactttgttcctctggcacgattataactgatccgtgcctgagtgcaagtcacaacggatagtcctcgtgggagtttcagcacttcattataactgatccgtgcctgagtgcaagtcacaactggggagtgctggagattttgtagtccatcattataactgatccgtgcctgagtgcaagtcacaacgtatcgtgtatatggtcggcttgcacgtggattataactgatccgtgcctgagtgcaagtcacaacccaacaatgattggagcaattgcggtgaaattataactgatccgtgcctgagtgcaagtcacaactattcacagccgatagatatggtccttggcattataactgatccgtgcctgagtgcaagtcacaacggatcaggctgcaactaaaattgaaactctattataactgatccgtgcctgagtgcaagtcacaactgaatgggcagagcggtattgggcagcccaattataactgatccgtgcctgagtgcaagtcacaacgctacgtagtatccggctatcgtaacaatcattataactgatccgtgcctgagtgcaagtcacaaccgtatctaaagctgatacgtgagcgggaggtattataactgatccgtgcctgagtgcaagtcacaacccacgtgctgcggcacactttcgccaccagattataactgatccgtgcctgagtgcaagtcacaactcagcttccaggtgaacgggtatcgggttaattataactgatccgtgcctgagtgcaagtcacaaccaagagtctccgcggcgtgattgtgccttaagaaaaccccccgttaaaacggggggctaaacgccgaaaagattttaccaagacccccggcacagagcagggggctaaacgtggatgccaacgggctttggtcagtattctttgaaatttctcatccattcgggccagtcgctgggtctacagccgccgccggctgtccagggcccatttatgttatactgacggtgccacctgaacttccagagctccttcagccccaccttccgaacagaccagtccaaaaaaagatgatttacggttccgctgccgtgccgatcaatgcagaagtgcatcatttccttgccggcccctaaccactgaccgttgtatgcaggagggtcgctgcgtgggcccacgtcataggggccgccgcctcgccacatcg

SEQ ID NO: 4541 - DNA, 6660 bp, synthetic construct
  source 1..6660: mol_type = other DNA
  misc_feature 1..6660: note = Synthetic
cgccaagcacttcgccgatatggtcgcctacatggataagctgattggcgaactcgtcaccaggctcgactcgctcggcatacgccacaacacgctcattctctttgtcggcgacaatggaacgggccgaggcacgcgctcgatgattggcgacagggtagtcatcggcggcaagggcacgaccaccgatgccgggatgcacgtgccgctcattgcaaactggccgggcaggattgttgccgagaaggtttgctacgaccttgtcgatagcacggattttgtgccaacccttctcggagctgcgggcgtgccgtcaccgtcgggcgtgaagttcgatggccgcagttttctgccccaacttctcgctgacaaagggcagccgcgcgactgggtctattcgtggtactcgccacgccagtcaggcgacctgaccatccgggagtttgccttcaatcgccgctacaaactctaccgttctggcgagtttttcgacctcgagcgggatctgcgggagaaacagccgctcaaggttgcatcgctccaaggcgatgccgccgctgcggcgaagctgctccaggacgcgttggaccagttcaaagacgcccggccttcgcagctcgacggcgcctttgggcaagctaacaaaggcaaagcgaaagaccaacaagcgacagggaaaaccagacgaaaggaccagaaatgaaaatgaaatgtcacactcgatgtgtcctgggtttgctattgtcatctctctgctggagccctctggctcacggagccggcaagccgaatattctgctgctttttgccgacgaccaacgagccgatacgatcgccgccctgggcaatccacatatcaagaccccgaacatcgacaaactggttacctcgggttttgtctttcggagcaattattgttttgggggcaacagcggcgccgtatgcgtgcccagccgggcgatgctgatgagcggcaggacgtggttccatgtggatactgcgtcgctcaaagacgccaaactgctgccggaactgctacaagaaaatggctacgtgacctttggcattggcatccatcttaacatcggctttggctttaattggctttgattggctttgtttttgccgagcctccagacgcctaaattctcatatcccttttcactataacgttttacgctcatttggtcttttcgcaaattggctttgttttgcataatttagcaaaaatgatcaccgccttcttagcattaaccacagattccacggatttcaaccacggattccacggataaacacgcgtttggtgaatacatttgtacggtttctcattttacccatcttcacatccggccatctacttaaaactcctgttccttcggctgggctcaggacaggcttctgccttctgtgttccgtcttctgtcttctgtattctgtgttctgtattcggtgttctgcatttagttagatatatattatacccgataggccgctttttctcaagcgaattccggacaaatctccctggccttatctcgtggagcttcaatcgctggtcacggggtccgccgggcggttgcggtttttgtcaggtatttcatttgcctttcgcgagatttggagtagaattgggtaacaaaggcgacgcggtcttaaacaccttggacggactacgaaaggttgggccccattgggcatttttagaatgcccaatggggcttagcctgcgtagcttgcgctacttgttatggcaagcacgcaggcacggatcaattgtaggataccatacattgcggagaaaagtcaagaccgaaaattagaaattctcagaatttgggagacgaagattatggccagttacacgctcggattagatatcggttcaaacagtgtcggatgggcgttgcttgatctgggcgaaaagccgaggatagtggatatgggcgtgcgggtatttccagaaggcgtggatcgggacaccaaaggcttagagaaatcgaagaacgccacgcggagagaagcaagaggtgcgagacgaacgcaccagaggcgtaatcttcggaaaggacaattgctaagcactctgcaagtgtctgggttcttgccaaaagacgactcggaattgaggtcgctgtttcacaccaacccttatcaattgcgcaaaaagggactcgatgagaaactcgaaccttatgaatttggcagagttctttatcacttaagccagcgtagggggtttaagagcaatcgcaagagcggaaaagcgaaggaagacggcgttatcatgaaaggggcaagcgcactgcaaacggaaatggacagcaaaggatgccgcacgatcggggagtattttgccgggcttaatgccgatgaacagagaatccgaggaccctacactttccgcagcatgtatgagaaagaattttctctattgtggacaaagcaaggtgaatattatcctgatgttctaactgtagaacttcagaaagaaatacgtgatgagattatatttttccagcgaccggtgagatgggatcccgagacgattggtaattgtgaattggagccgggcgagaaacgctgtccgagaggcgactggtatgcgcggcaattccggattttgcaggatgtcaataacctgattatccaaaacccggatgggacggaacagaaacttacagcagaccagcgaaaaatactccttgatgagttagggcaaaaggagaaactgactttcgacaagatacgacaaaagctggggctgatggaaactcagaagtttaacgccgaatacaagataggcaggagcggcaagactgtcgaatcattaaagggtgataacttttcgtggtcaatgagaagcaagaatatcttcggccccaaaaagtggcatgggacagatgagcaggaaaaaatgaagcttaatgagtggcttgtggagctcgaggatgaccagcttaaagaaagactgcgaagcgaatatggctttgacgataagcagattgaggccatcctgaaaatatcgctgccgcgggggtatatgagtttttcgcgcaaggcgattataaacctgcttgagtttatggagcagggagccctcgagagccaggcaagaactgtagcataccccgatagaagaacaaccgacgatgaaaacacccttgataagctgccgatgccggaggacctgcgcaacccgattgtgaataaggcactatttgaggttcgcaaggtggttaatgcgattgtgcgtgagtacggtaaaccagcaaggataaacatagaaatggctcgggacgttcaagggaacacgcggcagcgggacgaattgcactggaaacaacatgagaataaagagaggaacgaagatgctcgtaagcgactgaaagaagatatcggaatcaacaatcccacgagacccgatgttatcaaatacaatctgtgggtggagtgcggaaaaagatgcccatacacgggaaggcaaatttcacagacagctttgtttggaccgaatcccgagtttcaggttgagcatattctgccttatgaccgtagtttagatgacacttacatgaataagactctgtgccatgtggatgagaacagagtcaagcacaacaagactccgtatgaggcatacagccacgacccagaaagatgtgaacagataaagcagaacataaaagttctaccctggccgaagcgacaaaaattcttggagcaagaaataaacctcgacacgcatataaatagagaactaaacgacaccagatatatctgccgagaagtcgtaggatacctcaaacagctcggcgtaaacgtgcgcggaacaaagggcaaaattacaggagagctgcgtcatcagtgggggctggatggcattttcgaggagcttcgaaccatgcgtgatgacgaccatcgtcgccacgctgtcgatgcagtggtggtgggagttactgaaaacgagcatttgcgtcggctggccagaagcaagtactcagtgacaggagtgtcttttgaacctccatgggataatttcagagaggatgtcagagagaaggttaagcacatcaacgtttcgcaccgggcttgccggagggtttcaggaaaactccacgaggagacgaactacgggccgacaaaggaaaaagacaggtatgtgttccgcaagaagttagaggacttgacgctggcgatggtgaaagacattgtcgatgatgttgtgcgggagattgtaaaaaaacggctggaggaaaaaggcgttgatttggctggcaaagacaagaaaccaccaagggaggtctggaaagacctgtatatgaagacaaccaagagcgagaagaaggtgcggataaagaaagtgcgggtttataatgtggctaagaatgtaatagcaatgaaagacctttcgggccaggtatacagatacgttgagcccgggagcaaccatcatatcgagatatttgagtacacggacgcaaaaggcaaagtcaaaagagatggggaggttatcaccatgtttgacgcggttcagaaaagccagacacgtgaacctgttgtaaacaggtatttcgggcacaacaagaagtttatattctcccttgcaataaatgagatgtttatgatgcacacaaaaagtggttcaaaagagctctatcgtgtgcaaaaaatcagtggcaataaacagatattctttaggcaccatacatttgcaggggagttacacaagcataagggaataagcaagtaccccaattctcttaacggttacaaagtaacggtggacccgcttggacgggtttggccggcaaacgattaggatttacgccattttccgcgtaaggaacgccccgcattttgccgatatacactatcggcagaaccgtgccagcgggagatggtgcccatgattaagcgtattgtcgagatttcatcggcaaggacgcatctttcaattcagtacaaccagctaatagtcaagcaggaaggacaggaggtttcgaggattccctgcgaagatattggcgtactgctggtcgaccatcagggaaccagttacacgcactgcgttttcaccgagctattacgctgcggagcggcaatagtactttgcggcagtaaccatcatccggcagggatgctccttcccatcgaaagcaatactatgcagacagaacgtttccgacagcagatagacgtaaaagagccggtcaagaaaaaattgtggcagcaaatcgtaaaagcaaaaattaaacaccaggcgaaggtggtcggcagggatagtgacatctataaatccttgatggcgctacgagacagagtccgctccggagacccggaaaatattgagtcgcaggcaagcagaaaattctggccggtatatttgcaggatacacaattccacagggatatcgaaggcccgccgccaaacaatatgctcaactatggatatatggtgatgcgtgcggctgtcgcccgcgcgctttgctcagcaggactactaccctgtctgggtatccaccaccgcaaccgctacaacgcattctgcctggccgatgatttactcgaacccttcagaggatttgtggaggcaaaagtgagggacatgtgtaaagaaatccgtgccccggacaagctcgaccaagcgctcaaagccagaattttggaagtgctctatgagccggtgacgatagccggcttcacgggcccgctgatggttgcgctgcaccgaacagcagcatcgctacagcgatgttttgccggagagcagaaatcgattgatttacccgacctgtgataaccacattctgttttctgtattctgacttctgaatttatgataataagcggatacagggccgtgtggatttttgcaatgttcgatttaccaaccgacactccaaaggcgcggaaagactatacgtattttcgcaaaaatctgttgcaagatggcttcactatgctacaatattcggtgtacgttagacactgtgccagcgaagaaaacgccgatgttcactataaaaggatcaaaaattttttgcctccggatggtgaagtccggctcattaccattaccgataagcagttttctcgaatggagactttctggggaaaaatgcgaaaaccagcccctccgcaacctcgacagctcgaattattttagcaaatttagcctgcaagtccttgcaaagcaaggacttgcaggctcagcattataactgatccgtgcctgagtgcaagtcacaactttcgccacgcatcatcgaaaccacactgcattataactgatccgtgcctgagtgcaagtcacaacggtaccggccacattctctcacatgaaggtattataactgatccgtgcctgagtgcaagtcacaactaatcgagtgaactgcttccgctcccatcaattataactgatccgtgcctgagtgcaagtcacaaccgcttgtacaatgacagcacttgctcagtaattataactgatccgtgcctgagtgcaagtcacaactcctgatggcatgcatagcatagcgtagcaattataactgatccgtgcctgagtgcaagtcacaactgggtggtcgaccgagataaggaaagtcgcattataactgatccgtgcctgagtgcaagtcacaacgcagtgataac

SEQ ID NO: 4542 - DNA, 5690 bp, synthetic construct
  misc_feature 1..5690: note = Synthetic
  source 1..5690: mol_type = other DNA
cggaggattttaatgacgcgctttcgcagggccagatggccgatgtctcaagcaagtccgccgcctttacctgctacccggatagttgtccgtctctgggccagcaaataacggctcgtttcagtgtcccgcgttatggcccggatgattccttcgatatggcgaatttcacctgctcaggtttcgttacgcgcgttgatgacgtaagtaagtttctgcgacgggttgcgcttcagtttgccgagcctttgcctttcaggcccggcgagcagggtgacgttgaaactgaaaccgggtatgagagagacctcgaggttggaacgatagtgggttaataaaaaaccagccatttttgaattggttagggtgcctgccctccatagcccgaagggcgacggagggtcattcccgcgaaaaaacgtagggtgtgctccgcacaccaattccttattgtttagccccgaagcctgcttcggggttcttattgcaatcgaaaacggcaaagccgccttgagcttgcctgtggtgaacttgtcgaaccatcaaagggcctgccctgcgaagctctgccgtttagagcgaagtagggtcattcccgcgaagcctgtccatcactactttcggcgggttttgcccccagttttacctcggttcttctctcaaaataattcttgcccccgccccggatttcctttatcatttcctccggtgcgaatatcgggtttatccgcctttggcggaaggaatacgcaatgccgcttctaactcaaaacagacccttctatggcgaaatgaaaaggattcgccccaccgaacatttgttacaatgctcgatggggcggagtccgcgggttttcacccttgttgtgaaaagcacgcggacgcggatcaataataattatagaagatagtggtgcagatagtcaagtagaaaaatcaaaaaattttagttcttggagggaatttatggattcttacacactggggttagatattggctcaaacagtatcggttgggctttgcttaaagctggtgaacagccagaaatcgtaggtatgggagtgcgggtttttccggagggcgtggatcgagacaccaaaggtttagaaaagtcaaagaatacaacccgacgagaagcaaggggcgcgaggcgaactcaccagagacgtaatctgagaaaacggcaattgttgggtgcgctccggtttaagggtctattaccgagtgatgattcgcaacttatatcattatttcataccaacccatacgaattgcgaaagaaaggactggatgagaagctcgaaccttatgaatttggcagggtgctttaccatttaagccagcgaaggggctttaagagtaatcgcaagagcgggaaagcaaaagaagatggtgttgtcataaagggtgcaaacgccctgcaaacagaaatggatgcaaaaggatgccggacgatgggcgagtatttcgcggggctaaatccggaggaacaacggataagggggaagtacacattccgttcaatgtatgagaaggaattcgatttgctatgggaaaagcaaaaagggttttatctgaacgtgctcacagacgagctatgtaaaaagatacgggacgaaattatattcttccagaggccgctgaaaccgacagatgaattgatcggcgaatgcgaattggagccgggcgagaaacgctgtccgagaggagactggtacgcgcggcaattccggattttgcaggatgtcaataacctgattatccaaaacccggatgggacggaacagaagctcacagcagaccagcgaaaaatactccttgatgagttaggccaaaaggagaaactgactttcgacaagatacgacaaaagctggggctgatggaaactcagaagtttaacgccgaatacaagataggcaggagcggcaagactgtcgaatcattaaagggtgataacttttcgtggtcaatgagaagcaagaatatcttcggccccaaaaagtgggatgcgatagatgagcaggaaaaaatgaagcttaatgagtggcttgtggagctagaggatgaccagcttaaagaaaaactgcgaaatgaatatggctttgacgataagcagatagaagccgtcctgaaaatatcgctgccgcaggggtatatgagtttttcgcgcaaggcgattataaagctgcttgagtttatggagcagggagccctcacaagcgaggcgatagatgttgtgtatcatgacagaaaagcaatcggcgaggaaagcgagaacctcgatacgttgccgctgccggaggatttgcgtaatccgattgtgaacaaggcattatttgaggtccgcaaggttgtcaatgcgattgttcgtgaatacggcaagccagcaaaggttaaaattgaaatggctcgggatgttcaagggaacaagcggcaacgggacgaattgcactggaaacaacatgagaataaagagaggaacgaagatgctcgtaagcgactgaaagaagatatcgggattaacaacctcacacgcgacgatgttatcaagtataagctgtgggaggagtgcgggaagatgtgtccttatacaggcaagcacatttcacagacagctttgtttgggccgaatcccgagtttcaggtcgagcatattctgccttatgaccgtagtttagacgacagctatatgaataagacactctgcgaggttcacgaaaataaggatgtgaaaaagaatcagacgccctatgaggcgtatagtcacgagccggagaaatatgaacagatactggagagggtgaataaatcgcagatgccatacccgaaacgcaagaaattctggcaaaaggaaatagacctcgaccagcatattgccagagagttgaacgacaccagatatatctgcaaagaagtgcgcggatacctggaacaactcggcgtgaacgtgcgggggacaagaggtaagattacgggagagctgcgccatcagtggggtcttgatgggatatttaccgaacttggtgtatggcgagatgacgaccaccgtcggcatgcggtcgatgcggttgtggtcggcgttacagaaaacgaacatttgcgtcggctggccagaagcaaatactcagtgacaggggtattctttgagccgccctggtctgatttcagggaggaagtgagagaaaaagtaaaacacattaatgtctcgcatagagtatgccgcaaggtctcgggagcattacacgaagagacgaattatggaccgacaggactaaaagacgagaaaggacaagatttatttgtctatcgcaagaagcttacagatttgactatcccgatggttgaaaaaattgttgaccgggtggtccgcgaagttgtcaagaatcggcttacggaaaaaggggttgaccttagcaagggggagaagattccaaaggaggtatggaatgagccgttgtatatgaagtgtaagaacaacgacaagaaggtgccgataaagaaggtaaggattcgggatgttttcaacaatatgattacgctaaatgataagagcggccagtcgtaccggagcgttgcacccggcagcaatcaccatattgagatattcgagtataaagacaaaaagggaaacactaaactggatggggacgttgtaacgatgtttgaggcggttcggcgaagtcagacaggcgagcgggtagtaaaaatagaccatggacaaggcaaaaagtttgtctgctcgttggcaataaacgagatgttcatgctcgaagtggagggaaaagaagtacttcatcgcgtacagaaaataatacacgatggtcgaattgtgcttcgtccccacacgtatggaggcaagctaagtgactcggacagtccgccagcaatccagcgcaaaagcccaaatactctaaaaggttacaaggttacggttgacccattgggtcgggtttggagggcaaatgattgaagtaattagcgatttctgcttgccgtttttcgattgattgatagattatctcgcggagtaaatttgccgataatgtaatggagggatgaaggcgggatatcggcaaaatgataaagaagataattgagatatcggaggcaggggcacatttagcagttcggcacgcccagttaatcgttaagcgagacggtgcgcaaatcagcagcataccctgcgaggacgtgggggttcttttggttgaccacatcggcgtgacatacacacactgcgtttttactgagctacttcggtgtggggcggcggttgtcctttgcggagggaatcatcagccaactgggatgttacttcctatcgaaagtaatattctacaaacggagcgatttcgagagcagatagaggcgaaggagccggtaaaaaagagattgtggaggcagattgtccgcgcaaagataaaacatcaggcaagattaatcgggcaggatagtgacgtttataaagtattaatggtgctgcgggataaggtgcgctcgggcgaccccgaaaacatagaagcacaggcgagcaagaaattctggcctgcgtatgtgcaggatattatttctgagtttcacagagacatcgaaggcaggccgccaaataatatgctcaactatggctatatggtgatgcgggcggcggttgcacgggcactatgttcggcggggctgcttccctgtcttgggattcatcatcgcaaccgctacaatgcgttttgcttagctgatgatatgttagagccatttcggggatttgcggagcataaggtgcgagatatatgcaagacaaatggtgtgccggatgagcttacgcagccggttaaggcccggcttttagaggtgttatatgagccggtgacaattgccggttttgaggggcctttaatggtcggactgcatcgaacaatggcgtcgcttcagaggtgctttgcgggagagcaaaaagagttggatttgcctgagatatgattttgagcggttacagagcgatgtggattttcgcgatgtttgatttgccgacagacacaaaaaaggcaaggaaggactatacggattttcgcaaaaatttgttgaaagacggctttagtatgctacaatattctgtgtatatgaggcactgtgcgagcgaggaaaatgcagatgtgcactatggaagggtcaaaaaatttttgccgccggatggggaagtttgtcttgttagcattactgacaagcagtttggacggatggagactttctggggaaaattgcggaaaccccctcctccacagccgagacagctcgaattattttgaaaaattcagccgcaaacccttaacagcgaagggtttgcggctcacctattataactgatccgcgtccgagtgcaagccacaacctgtggtgaaggtaacgtccagtgtgcagcattataactgatccgcgtccgagtgcaagccacaaccgaggagaccgcgtggggcgagcactggtaattataactgatccgcgtccgagtgcaagccacaacccaagcgccgtggatgcaaaccgcatcttaattataactgatccgcgtccgagtgcaagccacaacagtcggcggtatcgtccagatgattctactattataactgatccgcgtccgagtgcaagccacaacactacgcctgtcaacaagacaaacacaatattataactgat

SEQ ID NO: 4543 - DNA, 5114 bp, synthetic construct
  misc_feature 1..5114: note = Synthetic
  source 1..5114: mol_type = other DNA
tgtagagcaacttgggtgtctgtcccttcgactctcctgagggcaagcttccgtcttctgccttgtgtcttctgtattctgtcatctgtcttctgccttgtgcattcctcattaaccacggattccacggatgaacacggattgggtgaatgtgtttatgcggtcctatttacccattttctcgcctactcatctgcgcaaagagcctcttttaacttttactcttaacttgtaactcacaagtctttggcttgtttgttagatatatattatacccgatgggcggctttttctcaagcgaattgcggacaaaatctccgcgaccatacggcgtaaaccgtatctcgtaccttctcaagcatatgtcgcccgctcatccgcgccgttttctgcgaagaattccgtttgtcgttcgcgagatttggactaaaatggggtaagaagggggacgcggtcttgaatacagtggacggactacaaaaggttgggccccattgggcattttttggaatgcccaatggggcttagcctgcgtagcttgcgctacttgttatggcaagcacgcaggcacggatcaattgtaggataccatagattgcggagaaaagtcaagaccgaaaattagaaattctcagaatttgggagacgaagattatggccagttacacgctcggattagatatcggttccaacagtatcggatgggcgttgcttgatctgggcgaaaagccgaggatagtcgatatgggcgtgcgggtatttccagaaggcgtggatcgggacaccaaaggcttagagaaatcgaagaacgccacgcggagagaagcaagaggtgcgagacgaacgcaccagaggcgtaatcttcggaaaggacaattgctaagcactctgcaagtgtctgggttcttgccaaaagacgactcggaattgaggtcgctgtttcacaccaacccttatcaattgcgcaaaaagggactcgatgagaaactcgaaccttatgaatttggcagagttctttatcacttaagccagcgtagggggtttaagagcaatcgcaagagcggaaaagggaaggaagacggcgttatcataaaaggggcaaacgcactgcaaacggaaatggacagcaaaggatgccatacgatcggggagtattttgccgggcttaatgccgatgaacagagaatccgaggacgctacactttccgcagtatgtatgagcaagaattttctctattatggacaaagcaaactgaatattatcctgatgttctaactgtagaacttcagaaaaaaatacgtgatgagattatattcttccagcgaccgctaaaatgggatcccgagacgattggtcattgtgaattggagccaggtgagaaacgctgtccgagaggagactggtatgcgaggcgattcaggttgctgcaggatgtcaacaacctgattgttcaaaacccagacggcagcgaagataagctgtccggcgaccagcgaaagatactcctcgatgagttggcccaaaaggagaaactgactttcgacaagatacgacaaaagctggggctgatggaaactcagaagtttaacgccgaatacaagataggcaggagcggcaagactgtggaatcattaaagggtgataacttttcgtggtcaatgagaagcaagaatatcttcggccccaaaaagtgggatgcgatagatgagcaggaaaaaatgaagcttaataagtggcttgtagagtttgaagaggaccagcttagagaaaaactgcgaagcgaatatggttttaatgatgagcagataaaagcgcttttgaaaattgtgttgccacagggttatatgagtttttcgcgcaaggcgatcataaagctgcttgagtttatggatcagggagctattacaagcgaggcaatagctgttgcgtatcgcggcgggcaaacgaccggtggaaaagaggataatctggatgaactaccgatgccagaggacctgcgcaacccgattgtgaataaggcactatttgaggttcgaaaggtggttaatgcgattatccgcgagtacggcaagccagcaaaggttaaaattgaaatggctcgggatgttcaagggaacaagcggcaacgggacgaattgcactggaaacaacatgagaataaagagaggaacgaagatgctcgtaagcgactgaaagaagatatcggaatcaacaatcccaccagacccgatgttatcaaatacaatctgtgggtggagtgcggaaaaagatgcccatacacgggaaggcaaatttcacagacacctttgtttgggccgaatcccgaatttcaggtcgagcatatcctgccatacgaccggagcttagatgacagttacatgaataagactctgtgccatgtggatgagaacagagtcaagcacgacaagactccgtatgaggcatacagccacgacccagaaagatatgaacagataaagcagaacataaaagttctaccctggccgaagcgacaaaaattcttgcaacaaaaaataaacctcgacacgcatataaatagagaactaaacgacaccagatacatctgccgggaagtaatcgcatacctcaaaaaacttggcgtgaacgtgcgcggaacaagaggcaagatcaccggggaactgcgccaccagtggggactggatgggatttttgacgagcttgcaacaaagcgtgatgacgaccatcgtcgccatgctgtcgatgcaactgtggtgggagttactgagaacgagcatttacgaaagttagcgcgcagcaaatattcagttagtggcgtgcgattcgattcaccctggccggatttcagagaggagatcagagagaaggttaagcacatcaacgtttcgcaccgggcttgccggagggtttcaggaaagctgcacgaggagactaactatgggccgacagggaagaacgatgaaaatggccaggatatttatgtttatagaaaaccgcttgatgctctgaccctgccaatggttgataaaatcgttgacccggttgtgcgaggaattgtgaaaactcggctggtggaaaagggcatcagccttgactccagcgatagaaaaatacccaaagaggtctggaaagaaccactatacatgcgggcaagaaagtctgacaagaaagtgcccatcaacagtgtgagaatacacgatgtgaaaacaaacatgaaacccttgaaggataaaaccggcaaggtgtacagatttgtcgaacccgggagcaaccaccatatagagatatttgaatacagagacgaaaagggcaacataaaaagagatggaaaggtcgttactatgcttgatgcggtgcagagaagtcagagaggtgagccagttatccagaaagcccacgggccgcataagaaatttatttgctctctggcaataaatgagatgttcgtactggagctagaagaccaaataaaaattctgcatcgagttcaaaaaatagataagaacaacagaataattttgcgaccgcatacatactctagaaaagtgagcgactctgataacccacccctgattcagcggaaaagtgcaagcacgttgagagggtataaagtgacggttgatccaattgggaggatttggccggcaaacgattagcatttacgccattttccgcgtaaggagcacgctggattttgccgatatacaatatcagtaggggcgtgccagcgggtcctgtctcgtcatgttccacggttgcattataactgatccgtgcctgagtgcaagtcacaactaagtgcgggaacgatccataaaagaggtattataactgatccgtgcctgttctactctgcgtagtaggtacgctacgtagcacgagagtgcaagtcacaactcaaccgatggttcctcaagcgccgtgtatattataactgatccgtgcctgagtgcaagtcacaacgtgcgcgtgatggtgccattggcgagttgcattataactggtccgtgcctgagtgcaagtcacaacccctgagcattgatgatccttttggtgaaaattataactgatccgtgcctgagtgcaagtcacaacggctccaagcaatcactattggtagtgtcgattataactgatccgtgcctgagtgcaagtcacaactatgttcgaccgggagcggattgaattgtaattataactgatccgtgcctgagtgcaagtcacaatggctcaggtaatacccgaacatcgtacttattataactgatccgtgcctgagtgcaagtcacaacttacatcgacttctgtcgagatggcaggctattataactgatccgtgcctgagtgcaagtcacaaccgctggccgggcgatcagatcgaagggatgattataactgatccgtgcctgagtgcaagtcacaactaacactgtctggataatcgcttatattttattataactgatccgtgcctgactgcaagtcacaactgtgtgatagtctgggcctttgccattgtattataactgatccgtgcctgagtgcaagtcacaactctagcccaggcgggctggcttgtcgtgattataactgatccgtgcctgagtgcaagtcacaactcgtccatgtctgggtgggtgtagatctgtattataactgatccgtgcctgagtgcaagtcacaaccaagagtgtccgcggcgtgattgtgccttaggagaacccgccgttaaaacggggggctaaacgtggatgccaacgggctttgtcagtattctttgaagtttctcatccaagggggccagtcgctggatctgccgccgccgccggctgtccaagggccgttgatgttaaactggcggtgccacttgaacttccagagctccttcagccccaccttccgaacagaccagtccaaaaacagatgatttacagttccgctgccgtgccgatcgatgcagaagtgcatcatttccttgccggcgtttaaccactgaccgttgtatgcaggagggtcgctgcgtgggcccacgtcataggggccgccgcctcgccacatcgtatcggcgaagacggggatctggtctgcgcttctgacgtctctggtcctccag

SEQ ID NO: 4544 - DNA, 5042 bp, synthetic construct
  source 1..5042: mol_type = other DNA
  misc_feature 1..5042: note = Synthetic
aatgataatgggtaaaagtaaaaattaaacccgaccgcaaaaatcctttaaaatcagggaggattgaaaaatatataaataataaaaatgctatatgttatttttaaaatgttctcaataaaattaaaatgttatggagaaaagagtttcggtttgagttcttcgttttgttgtaaaaaggtttaccccacagacctttttacagatctgtggggcagagcctgcgaaatttttcttgttatgaaaagtcacaggccgagattagttacacaccagtacaatatacttttcaatggacaaatcaagtatttttttgtacaattcaactgattttttcaaccatagttggcaaagcaggaggcatttatggctttaaccttaggattagatatcgggtctaacagcattggctgggcactaattgataatgaaaaacacaaattaactgatataggtgtccgtgtttttccagaaggagttgacagagatacaaagggattagaaaaatccaagaatgcaacacgaagagaagcaagaagtgcacggcgaacacgtcaaagaagaaattcaagaaaattaaaattaataaaagaattacaaacggttggtcttcttccgaaacaagaaacagaattaaataaattatttttaacaaatcataatccttataagttacgcaaaaaaggattggacgaaaaactcgaaccttttgaattaggcagaatcctttatcatttgagtcagcggagaggctttaaaagcagccgaaaaaacggcgaaacaaaagatgacggcaaagtcaaaaaagaagccaatgaattacagaaattgatggattccgccaattgcagaacgcttggagaatattttgcgatattggatcctgatgaacaacgtattcgagggagatatacatttagatcaatgcacgaaaaagaatttgatttactttggtctaaacagacagactatcataatatattaacaccagaactacaaaaaaagttgcgtgatgaaattattttttatcagaggcctcttaaaccatctgacgacttgataggcaactgtgaacttgaaaccagtgaaaagcgatgtgcaaaaggagattggttcgcaagaaagtttcgaatacttcaagatgttaataatttaaaaattcagaatccagatggctccgaaaacaaaccaacagaagaacaacgaaattatattcttgatgaattaagcaaaaagaaagagttgaaatttgacgatatacgaaaaaaattaaatttgctggagacacaagtatttaaccttgaacaagatggtaaagttgcatcgttaaaaggcgatgcttttgtggctgcgatgaaaagaaaaaatgtttttggtcataaaacatgggatacaatgccggaacaggaaaaaatcaaaattaacgaagcgtttatcgatcttgaggatgatgaccttgtaaaattttttaaaaataaatataaatttaatgacgagcaaatcgaaacggcattgaaagcaccgctgcctcaaaaatatatgagtttttcacaaaaagcaatattgaaacttttgccttttatggaacaaggttatttaacatctgaagccattgaaaaagccggatataatcgaaatcatgaaaatgacataatgacagatgtgttgccattaccgccggatttaagaaatcctatagttcaaaaagcattgtttgaagttcgtaaacttatcaatgcagttatccggcaatatggcaaaccaaagactatcgcattagaaatggcaagagatgtgcaaggcagtagtaagcagcgtgaagagatgcattggaaaatgctcgaaaatgaaaaacgtaataaaaaggtaagagaaaaacttataaatgatatgaatatcacaaagccgagccgtgatgatattatcaaatataaattatgggaagagtgcggcaggaaatgtccatataccggtaaaagcatttcacagaatgcattgtttggtgaacatccagaatttcaaatcgaacatattctgccttatgaccgttcgttagacgacagttatatgaacaaaaccctctgtgatgcgcacgaaaacattcatattaaaaaagggcagacaccgtatgaggcgtaccataacgatacagaaaaatacgaacagataaaacaaaatatcaaaatattaccatatcccaaacgacaaaaatttttacaaaaggaaataaatcttgatgagcatataaaaagagagcttaatgacactcgttatatatgcagagaaacaataaactatctcaagcaacttggaatttatgtgcgtggaacacgaggcaaaacaacggcggaattacgacatcaatggggattggatggcatctttgacgaaatcgggagcaaacgaggcgacgatcacagacgacatgccgtagatgcggcgattgtagctttaacggataatgaacatttacggcagcttgcaacaagtaaatatgcggttgcaggaatttattttgatccgccctacccagattttagaaaagagataaaagaaaatgttcaacaaataaatgtctctcaccgagttcaacggaaagtttccggcaaactgcacgaagaaacggcttatgggcccacgaatcgaaaagatgagaaaggccagaatgtttttgtttatcgcaaaagacttgaagatttaacaattccaatggtgggaaaaatagttgatcatgatgttcgagatattgtgctaaacaggctcaaagaaaaaggaatagatactaataacggagacagaagcatttccaaagaggtttggaaagaaaccgtgtatatgaaaaatacaaagagcgataaaaaagttccaattaaaaaagttaggattgaagatgttgggaacaatttaattccgatatctgacaaaaataaaaaaatttatcgctatgtagcaccaggtaataatcatcatattgagattttcgaatatattgatggaaaaaggagaaaaaaaagagacggcaaagttattacgatgtttgatgcggttcaaagaagccgaaatggtgagccggttgtttgcagagactataaagatggcaaaaaattcatatgctctttagctataaatgaaatgtatttaatagaaacagaagataaatcagaactttatagagttcaaaaaataagcagtaataaacaaatttttttaagacatcacactttcgggggcgatttaagcaaaagcaaaggaataagcaaagtgcctgaaactctaaagggacgaaaagttaccatagatttccttggcaggttatatccggcgaatgattaaaaagataattgagatatcgcagcaaaggactgctttatctatcaggcacgggcaactaatccttaagaccgaaaccggtcaaaattcaattccttgtgaagatattggcatattactggttgataatccggcaacagtttatacgcacagtgtttttacggaattattgaaagcaggagcggcagttgtactttgcggaaacgatcatttgccaagcggatgtttgctgccgattgaaagcaattcaattcaaacgcagcgaatagcagaacagataaaagctaaagagccgctacgaaaaaatttatggcaacaaattgtcagggccaagatacgtcatcaggcaaaaatagtgcgtgataatacatcagttcataaaggattgatggaattgataagtcaggtgcgcagcggggatgtatcgaatgttgaagcaagggcgagcaaaatattttggggtgcgtatttgcaaagcatggatgaatccgtgtgggctgaagcccaccctacagattttaaaaggaatagagagggaaagccgccgaataatttgttgaattatggatatatggtgatgcgtgcggctgttgcaagagccatttgcagcgcgggacttttgccttcggttggacttcatcataaaaataaatataacgcgttttgcctggcggatgatttgatcgagcctttcagaggatatgtagaaattaaagttaaagaaattgtttccggcggcgaatgggaagaattaacgcaatcagtaaaagcaagattgcttgagacgttatatgaagaagttgaaattgcggattataaggggccgctgatggttgggcttcacagggttgcggcgtcactggttaggtgttttggcggagaacaaaaggaaatagatttgccgaaactttaaccttgccatagtgatggcaaggctaaccatacatcgccgctgcggcgatggctaaacatttatgataataagcggatatagagcggtgtggatatttgctatgtttgatttgccgacggatacggaaaaggcacgaaaagattatacgcattttcgtaaaaatcttttgaaagacggctttgcgatgttacaatattctgtgtatgcacggcattgtgcaagtgaggaaaacgcagatgttcattaccgcagagtacagaattttttgccgccggatggcgaggtgcggcttattacgcttactgataagcagtttgaaaagatgcgtattttctggggaaaaatgcgaaaacctgcacctccagcgcctaaacagctcgaattattttaagcttgttttaacgcaagtcctgtgcggacagcaggtaatggaaaaggtagtgtaactaatcccgacctgctgtcaatccacaaccacaatctcattgtctacatcttcatcggcagtgtaactaatcccgacctgctgtcaatccacaactcaagctctttaatttctttgtttgataatagtgtaactaatcccgacctgctgtcaatccacaacattgataacattcataaattaagcactcctagtgtaactaatcccgacctgctgtcaatccacaacaagattgtagattgaagattgaaaatttaagtgtaactaatcccgacctgctgtcaatccacaacaatagcagggatcggattcgaaccgacgacagtgtaactaatcccgacctgctgtcaatcc

SEQ ID NO: 4545 - DNA, 4537 bp, synthetic construct
  misc_feature 1..4537: note = Synthetic
  source 1..4537: mol_type = other DNA
aaaaatatagcttgatgtcaaggttgaacaactacgcagccacttctattatcataattctaaaccagtatattactattatattactatcgtcaagaggagtccgcaagaaaaataaaatttttttgcggttttttgctgattatttgcagattatagcggctaatgcataattttgttcgtaattccgtgtaaatcctttgtttttagggagagagaagctatgaaagctttttcgtttccgccgtgccggcgacgaacttttgttgggcggatttggtttgacggaaaaggcggttttgggtataatagggcgtattaaaaaggattcgccccaccgaacatttgttacgatgtttggtggggcgttgtccgcgggttttcacccttgttgtgaaaagcacacggactcggatcaactctgataataacagatgaagcgggagtaagtcaagtagcaaaagcaaaatttttagaattttttggagtgtagattatgggttcttacacattggggctggatattgggtctaacagtatcggttgggctttgcttaaaactgggaagcagccgggcattgtaggtatgggggtacgggttttcccagagggagttgacagagataccaagggactggaaaagtcaaagaatgcgacgcggagagaagcgaggggcgcgaggcgaactcaccagagacgtaatctgagaaaacggcaattgttgggtgcgctccggtttaagggtctattaccgagtgatgattcgcaacttatatcattatttcataccaacccatacgaattgcgaaagaaaggactggatgagaagctcgaaccttatgaatttggcagggtgctttaccatttaagccagcgaaggggctttaagagtaatcgcaagagcgggaaagcaaaagaagatggtgttgtcataaagggtgcaaacgccctgcaaacagaaatggatgcaaaaggatgccggacgatgggcgagtatttcgcggggctaaatccagaggaacaacggataagggggaagtacacattccgttcaatgtatgagaaggaattcgatttgctatgggaaaagcaaaaagggttttatccgaacgtgctcacagacgagctatgtaaaaagatacgggacgaaattatattcttccagagaccgctgaaaccgacagatgaattgatcggcgaatgcgaattggagccgggcgagaaacgctgttcgagaggagactggtacgcgcggcaattccggattttgcaggatgtcaataacctgattatccaaaacccggatgggacggaacagaagcttacagcagaccagcgaaaaatactccttgatgagttaggccaaaaggagaaactgactttcgacaagatacgacaaaagctgggcctgatagaaactcagaagttcaatgccgaatacagaataggcaagagcggcaagaccgttgaatcattaaaaggcgataacttttcgtgggctatgcgaaacaagaatatcttcggccccaaaaagtgggatgcgatagatgagcaggaaaaaatgaagcttaatgagtggcttgtggagctcgaggatgaccagcttaaagaaaaactgcgaaatgaatatggctttgacgacaagcagatagaagccgtcctgaaaatatcgctgccgcaggggtatatgagtttttcgcgcaaggcgattataaagctgcttgagtttatggcgcagggagccctcacaagcgaggcgatagatgttgtgtatcatgacagaaaagcaatcggcgaggaaagcgagaacctcgatacgttgccgctgccggaggatttgcgtaatccgattgtgaacaaggcattatttgaggtccgcaaggttgtcaatgcgattatccgcgaatacggcaagccagcaaaggttaaaattgaaatggctcgggatgttcaagggaacaagcggcaacgggacgaattgcactggaagcaacgagaaaatgaggagagaaacgaggatgtgcgcaaacggttgagagaggatatcgggattggcaatcccaaacgcgacgatgttatcaaatataagctgtgggatgagtgcgacaggagatgcccatataccgggaggcagatttcgcaggaggcgtttttcggggccaataccgaatttcaggttgagcatattctgccttatgaccggtcgctcgacgacagttatatgaacaagacactatgtgaggttcacgagaatatacacgttaagaagaaccaaacgccctatgaggcatacagccacgaccctgaaaggtatgagcagataaagcaaaatataaaggttttgccctggccgaagaggcagaaatttctgcagaaagaaatagaccttgaccagcatatcagcagagaactcaatgacaccagatatatctgcaaagaagtggtcggatacctcaaacaactcggcgtgaatgtgcgggggacaagaggtaagattacgggagagctgcgccatcagtggggtcttgatgggatatttaccgaacttggtttatggcgagatgacgaccaccgtcggcatgcggtcgatgcggttgtggtcggcgttacagaaaacgaacatttgcgtcggctagccagaagcaaatactcagtgacaggggtattctttgagccgccctggtctgatttcagagaggaagtgagagagaaggtcaagcatattaatgtttcgcacagagttcagcgaaaggtatcgggcaagcttcatgaagagaccaactacggaccaacggataaagaaggtctttatgttttccgcaaaaagttagaggacctgatgctgccaatggtggacaaaattgttgaccctgtggcgcgagaaattgtgaagaaccggcttatagaaaagggcatcaaccttgagggcagcgggaagccaccgaaggaggtctggaatgagccgttgtatatgaagcgcaccaaaagtgataatcaggtgccgataaagaagatgagggtttacaatgtggctgagaatgttattgcgatgaaagacccttcaggcaagacatacagatacgttgagacgggaagcaatcaccatattgagatatttgagtatacagattcaaaggccagaacaaaaagagacggtcgcgttattacaatgtttgaggcagtgcagagaagccaaaagggtaagccagtcgtttgtaaagactacggtgacggcaagaaatttgtgtgctcgctggcaataaacgagatgtttattctcgaagtggagggaaaagaagtacttcatcgcatacagaaaataatacacgatggtcgaattgtgcttcgtccccacacgtatggaggcaagctaagtgactcggacagtccaccagcaatccagcgcaaaagcccaaatactctaaaaggttacaaggttatggttgacccattgggtcgggtttggcgggcaaatgattgaagtaattagcggtttctgcttgccggttttcgattgattgatagattatctcgcggagtaaatttgccgataatgtaatggagggatgaaggcgggacatcggcaaaatgataaagaagataattgagatatcggaggcaggggcacatttagcagttcggcacgcccagttaatcgttaagcgagacggtgcacaaattagcagcataccctgcgaggacgtgggggttcttttggttgaccacatcggtgtgacatacacgcactgcgtttttactgagctacttcggtgtggggcggcggtggttctgtgtggagggaatcatcatccggcggggatgctacttcctatcgaaagtaatattctgcaaacagagcgatttagagaacagatagaggcgaaagagccggtcaagaagcgattgtggaggcagattgtccgggcaaagataaaacaccaggcgaaattagtcggtaaagacagtgacgtttataagtggcttacggctttacgagagcaggtgcggtcgggcgaccctgataatattgaggcgcaggcgagcaggaggttctggcctgcatatatacaggatgtcatttgtgaattccacagggacattgaggggagaccgccgaataatatgctcaattacggttatatggtaatgcgtgcggcgattgcgcgggcgatatgttcggcgggtttactaccctgcttagggatacatcatcgcaatcgctacaacgcgttttgcttggctgatgatatattagagccatttcggggatttgtggaggcgaaggtgcgggagatatgtgagacggagggagcggcggaggaattgacacagccgattaaggcccggcttttagaggtgttgtatgagccggttacaattgctggctttgaaggacctttaatggtcgggctgcatcgaacaatggcatcacttcaaaggtgcttttcgggtgagcaaaaggagatagaactaccacaaatataaccacagattgaacagattacactggataaaaagagctaaatatgagaggtga

SEQ ID NO: 4546 - DNA, 3935 bp, synthetic construct
  source 1..3935: mol_type = other DNA
  misc_feature 1..3935: note = Synthetic
gaagtggagtagtggagtagttaaaagggggcggtgttgtcgggaaaggtttgcgtgtttttcgggtggggggaattcaatttagggattaccccggcggccgggattagacggtcgccggggcagtgcctgcgggcttccgaagaagcccttgttatgacaagctcgcaggcatggattagttacaatggttgacaaatatagccagtgtagtatcattgtcaagagaaaaaattggggggacaaaaaaagcgggagaattcatgacggactacacgttgggattggacatcgggtcgaacagcatcggatgggcgctgattgacgctaagggcaaaacgctcgtggatgcgggggtgcgggtgttccaggagggggtggaccgcgacacgaagggggcggaggtttccaagaatgagacgcggcggacggcccggagtgcgcggcgggcgcgacaacggcggaactatcgcaaggacaaacttcttcggatgttagtgcggaatggcttgctgcccgaaggtgaagaacaattggcgaacgtgtttgatctcgatccgtacgcactgcgcgacaggggattggacgagcaactgaaggcatacgagttcgggcgggtgctgtatcatctgaatcagcggcgggggttctggagcaatcgcaagagcggcaaggcgaaagaggacggggtcgtgcagaaggccgcgacggagttaaaggtcgccatgagcgcgagcggcagccggactctcggggaatacttcgcaggactcgatccgcatgagcagcggatacgcggcaactacacgtttcgctcgatgtacgaagaggagttcgagacgctttgggcgatgcaggcggcgtgtgacggcgagctgcttacggacacattgaagaaggccgtcaaggatgagacgatgtttttccagcggccgctacggtggaatccggagacgatcggggattgcgaactggaggcaggcgagaaacgctgtccgcggagcgactggcatgcacggcggtttcggattctgcagacggtgaataacctgagggtgtgtaatccggacgggactgaaggcgatctgggcacgtaccgtgatttaataatcgaggagttgtgcagcaagaaagaagtgccatttgatgcgctgcgaaagaaattggggctgctggacagccagacgtttaactatgaaaatgggtcggcggagaagaaaacagcgaagctgaagggcgatgagtttataccgcagttgagatcggcggttggcgcaaaagactttaagaagctggatgaggcggacatcatcgagatcaatgatgcgttgatcgatgaggttgtgggggatgaagaactgacagggtggctgatcgagcagtatggcttcaacgaagcacaggcgcaggcggtcgtaaagatatcgctgccgcaaaagtatatgaatttttcgcggctggcgctgcagaagctgctgcccaagttggaggcggggctccgcacggatgaggcgattgaggcggtctacggaaaaaggcaggccgttggggccatcgagaaggcggagcgattggggcgcgtgccggaattgcgaaatccgattgtgagcaaggcgctttgggaagtgcgcaaggtggttaatgcgctggtgcgggagtacgatgcgcctgcgaaaatcaaggtcgagatggcgcgcgaagtgaagggatcggcgaaggagcgggacgagatacgccttaagcagtggaagaacgagcaggagaacaagcgagcggaagaggaactcaaggcgatggggattgtcaaaccgtcgttcaacgaccgactcaagttcaaactgtgggacgaatgcggcaggcggtgcccgtacacgggcaagagcatcagtcagcatgcgttgttcggggagcatccggagtttcaggtggagcacattctgccgtattcgcggagcctggatgacagttacatgaacaagacgctttgccatgtgaaggagaacgtggacaaagggaacgagacaccgtatgagtactacgcgggcaagcacccggagcgatgggatgagattttgcagcggatcaagctgctgccgtatgcaaagcgtcggcgcttctggcagaaggaggttgtgctggacaacttcatccagcgtcaactgaatgatacgcggtatattaccaaggaggtggtgcgttatctcaagcaattgacgtcgaacgtgcaggggacgaaggggcaagtgacggcggagttgcggcaccagtgggggctcaacagtgttctggattatacgggggcgggattgaagaaccgggaagatcatcgccatcatgcggtggacgcggtggtgacggcggtcgtggaaaacaagcatcttcatgggctggcgggcagcaaatgcgacaaggacggtacggcattcgatgcgccgtgggagaatttccgcgcggaggtacaagagaagatcaatgcgatcaacgtttcgcatcgggtgacgcgcaaggtgagcgggcaattgcacgatgagacgaactacgggccaacgggactaaaggatgagaaggggcaggacgtgtttgtgtaccgtaagacgctggagtcgctgacgatagcgatggtgggcaagatcgtggatccggtggtgcgagaggtcgtctgcgagcggctacgggagttcgggattcgccctgagggtaagggaaccatttcgaaagatgtatggaaggaaccgctgcacatgaagtgcaagaacgggaatgggccgcagattaaaaaggttcgtattcgggacgtattcaacaatatgatagtcatgacggacagggacggaaaagcttaccgtgcggttgcgccagggagcaaccatcatgtggagatcttcgcatacgaagacgccaaggggcgggtcaagaaggacggcagggttgtgacgatgtacgaggcggtgcggcggagtgtgagcggacagcctgtaatatgccgggattatggcgacgggcggaaatttgtgtgctcattggcgaaaaatgagatgttcatgctgaaaacggacgaaaatgaggagttgctgcaccgggtgcagaaacttgaccagaacggcaggattattctgcgaccgcatacgtatgcggcgaagctgaacgacagcgacgcgccacctttgattcagcgaagaaatgctaatacgcttcggggatttaaagtgaccgtcgatccaatgggaaggatatgcaaggcgcatgattaagcgtgtggttgaggtgtcgcacgcagggacgcgttgaagggtagatgcgggtgctttcggtcacggacaaacagtttgaacggatggcaattttctggggaaaactgcgcagaccgacacccgggccgccgcgtcagctcgaattattttgagccatttggcgcgcaaatggttgtcgcttcagggtttatggaagaggtattgtaactaatccatgcctgagagcaagccacaacgcgaggatggcgcggcatgcggcgttcagaattgtaactaatccatgcctgagagcaagccacaaccgagcgggcctgccagcattcaacgctcccattgtaactaatccatgcctgagagcaagccacaaccagtccagcttgatggggtcagggacggagattgtaactaatccatgcctgagagcaagccacaacctcgatccaatcccgagcaactcccggcctattgtaactaatccatgcctgagagcaaggcacaaccaccactgcatcgccacacgcagggtcaaattgtaactaatccatgcctgagagcaagccacaacgccacaccacagcctcaaggttctcgccgattgtaactaatccatgcctgagagcaagccacaacatcgaagcataacgcggctcattcagcagaattgtaactaatccatgcctgaga

SEQ ID NO: 4547 - DNA, 25451 bp, synthetic construct
  source 1..25451: mol_type = other DNA
  misc_feature 1..25451: note = Synthetic
taatgaattctaatcttgagctctcagaaatggccatatatagaaaaaattatgaaaaacttccggttttactgtcgaggatggagatggccactgccagcatgggcagggtgattgagtcatttcttttcctcgacaggcgctttgtgtttgacaaagctgatcagaaaaaggtgaatatcctggagttttttgaggagatgaagatggaaagcatccaggaatgggaaggtgttcaggtcaggcaaaagcttagtgctggtgatttggagtggaggataaacactcaggggtataagtatgtagtcgttaaccttataagtaacgccttgaagtacagccagggaaagcctgctcctgtggtatcactttcggtgagtaacgactcgtatattaccacagtaagagactacggcattggaattcccgctgacgaaaaagagcacattttcaaaccctacaagcggatgagcaataccaacgggatcaagggcactggcctgggcctgttcatcgtgaaaacgattatcgaaaaagtaggtggtgccattcaggtggaatcaacagttgggatgggaacctccatgactgtcacctttcccagactaccttcgcaaaatgaaaaggttcatcatcaacccgactttactgcaaacccattgaaggtgagccagaaaaaatctcctaccgaagtgaggtaattgtcggaaagctctaaagcctcaggggcgtaattactgactgaggctcattcccctttttagattttagtggattgtccctcagcgagcagctttatgcaaatcgggcggtataaataaacgttttgattaaactagtgtgcgtttaatctaaagaattccccgatgcttgcatcgggtgttgcgatgagatagataactatctttggttatggaagataaccatattaggaagagccacaataaaagtttgctgttgtatcacgtggtttgcccctcgaaatataggcgggaagttttcaccgcagaagttgaatctacgttgaaattgacttgccaggggatatcggagcgatatgagataaactttgtggagataggctcagacgaagaccatgttcattttcttgttcaaagtgtaccaatatattcaccgaagaaggtggttcaaacgataaagagtataacagcgatacggatatttgaacttcatccagaagtaaagcggaagttatggggcggcaagttttggagaagtggctactacatcaacaccgtaggccaatatgccaattctgatgtaattaaagcgtatgtgcagaaccaagggaagcaatacaaacaaattcacagaggccagatggaactgttttagattcgtctagcagtgataccccgtcagcttgctgcggggttgttcatttccagattctgggttttagaaaaacccggggagggccttgtccgtaaattccatatcaaataaagctagtatggaatcactttttgaccaaaaacctgcactaattctaatagacatacaaaaggcctttgaagatattgcgtactggggtgggcatcgcaacaatccaaatgctgaacagaatgcgtcggagctgctttttatgtggagaattcaccagttacctgtcttccatgttcgacattgttctgccaacccccggtcgccgctacactcttccaacccgggcaatgcttttaatgaactggtggagccgctacctggagagcctgtggtagaaaaaagtgtcaacagtgcttttattggcaccgacctgcaaaagcgactgaatgaaaaaggtattgacagcctggttattgtggggttgactacagaccattgtgtttctaccacaacaagaatggccggcaacctgggctacaaaacctatttggtgcacgacgctacagccacttttaacaaaatcggacacgacggaaacgagtattctgctggagtcattcatgccactgcattagcaagtttgaaagacgagtttgcacagattgtttcaaccgattcgctaaaagcgatggcaccaatattgaattaaataaaatcaattcaaatgatcgttgctaaccactgcccggatcaggaaacgcttacccggttaagaaatgaagtgaatagcggggacaatcgagggctggaatggcccaatgtggtagtaaacagccactatcaagcgttcgagaaagagatacccgagagctcattcactattttttctgtcaataccgacgggctggtgacgcttaccacaaaagaccgtgatgtcaggttttgcagagagactatttgtgttgttaacccctttgagcatttcagcttctccattcgtgattcgttgcctgtgaacattatgaacgtgcacctgggctttgatacttacaatgagatcctttccaatatcctctcggacgatgaaaagctgcttgacaacccgactggacgcagagcaccctatttgtttgacaaccgactttttttcaacgagcctctgtttagaagtaagctacttagctaccagagtgacagcggcgatgaataccttttggaactgatggatgtgatgggcggactgattggcaaaaataaaaagtctgctatgaggattccgtcgcaaaaaagtgccacccgagctgagcttttcaagagggtagccatgggcagagatatcattttcagccagtatagtgacccatcgttgacggtagatgttctgagcagagaggtgttgatgtcgaagtttcattttatccgggtattcagacaggcctttgggtttacacctcacaaactgcttcagcaagtgagggttagaaaagcactcgagtatatcgggagtggcgagatgaccattgccgacgtggccgacaaagttggttttcaggaggctaactcgctttatccattgatcagaggaagacgatttcagtttaattagcaatttcgaatagctggcgagggttggcctggtgctagttttgtgtcaaaaaacaacaaagacatggaactacagcttattcgaaacgctaccgtcaagctgcaattcggtggtgtcacttttttaattgacccttatttgggaggaaaatatagtcaaccctcactggcgggtaggtccaaaaacccaaccgttgatcttccctgtagcatcaaagagatcttagaaggtgttgattacattattgtctctcatctgcatccggatcattttgatgacgaggcacagcataatctctccagacaggcacccattttttgccagcctcaagacctggatgcgcttatgtcaagtggttttggaaacgtcagggccattgatcgggacttggacattgagggggtgagcatcacccgaacagactgtcagcatggctcaggtgagattctgccgctgatgggcgttgcatctggttttgtattccggcatttggaagagaagactctttactggtgtggcgatacggtttggtacgatggagtgcaagacgtgattgacaggcataagccagaggtagttgtctgtcatgcgggaggaaacgcttttgcgcattcctacaacgtatttgggccagctttttctggcgatagtgagtctctggttatggatgcagggcaggtgttaatgctttgtgactacgccacgcaagcgcaggtgttggctacgcatataggagctctggatcatgactccctcaccagggaagagcttcggaaccggacgatcacacaagtggaaagagggcagcttcttatacccggtgacggacagaaaatgattttttaaccataagattatatgaccagcattgaaaaacagatcaaaaaattggggcttgttctgccgaatccgtcaacgccgggtggcaactattcttcatgcaatacccggggaaacatcgtgtcggtggcgatacagttcccgataaaaaatgaagagttcctttaccaggggaagctgggcgccgacctggacaccgaggctggctatcaggccatgcacctgtgcgggctcaatgtgttgtctcagataaacaagtatttcgaccttgaaaatattgaaggcctcaaccatgtcgacatatattatcgcagtgccgacaactgggatgatgccccaaaggtagcgaacggcgcttctgacctttttgtggaggtgcttggcgaaaaagggcagcattccagagccatcatcggtgtgcatgccttgccacgacagttttcagtggggctttcagccaccctgaccttgcgcagacggattccatggattttcgcctgaaagcggttcgataaataggtcgtatcctttttaacttatttaagatgaataccaataataatgttttagatcccgttcaactgtcgctctcatttttggagcgtgtgtggggcccttctcatgatctcgacgccatcgatgagttgatgaccggggattacaccattaccactggcggcgctagtatcagcgggcgcaacgagttcaaagaatgggtgcgaaattttcaacaaagactgaccgacgccatcacggtgagccaggagaccatccgaaatgaatcaggcgaccgggtgatatcccggtggatctgtacgggaaaaaataatgggatttttggactaccggccgacggccgggaggttgcctttaccggaattgctatttggcgtgttcgggacgacaggctcgctgagtgctgggtggagcgcagtgcgctcgaactctaccagaaaatcaaacatgatcactcatgatttttaatccggttccttttttatcactcttaatttattcattacaatgaaacacatttttaaattgtcggaagagctgctcgaaaagctctccagtgttatggctgccgcacttttgatagtaggaatgaacgcctgccagccatccactgaagtgaaggaacagcctccgttgactggcgaggcgttgatcaaaagaggtgaatacctgatcaacgcaggagcttgcggtgactgtcattcgcccaagatcatgacagaaacaggcccgatccctgaccccgacaggctgctgtcggggcatcctaaggacgaaatattgccacccattgtcaataccagcgactggatattgttttctactggtgttacctccttcgtggggccatgggggcagtcatttgccgccaatcttacgccccacgccacaggcattggcaactggacatttgagcatttcaaaaccgccatccgaaaaggtaaatacaaggggctggaaggttccagaaacctcgttcctcctatgccgtggcagttttacagccacatttccgacgacgatttgtatgcgttgttcgcctacttgaagtcgatcaagccagtggataaccaggtacctgcttacatctctccggaaaatttatcgcttaacacggttcaaaatgctgagtaaatggctatgggagcgcatcctggccggggagacccgaggtgggagcgctgccttagtattgttaaagtaaaaaacttcacttatgaaaaatttagacagcctttggatggcccacgagcagctgcttgtgacacgactaagcggggatgcgacaatcgccgacattgaaaaatggaaaacctctctctataccgcacttgatgcgataagccagggaacaaagttcaaaattttggtcgacttgtttgggtttacggctatcaatgtagaagcgcataagcgctttcgggaaattgtgccccgcacactggctcaatacggatggcgggtaggttacctggagatgtttgaggaggccagcgaattgcggttagggttgaaaggaggtattagatgtactgcagctgcccatgttcatcaggatgctaccaaaattgaaaaataccaaagtttgtatggcacagggagggagcagtttttcaccgatcctttacaggcccgggagtggatcgcccaacttgcagtttagggtttttcgaaggcccaatgcaaccatttttatcactttcatgtctggtttttattttcaaaactgatgagactcacaatttttttactgctgcttccgcttctggtgaaagcacagctcattggcgatttttggaaaacccttgagccccgcctcggaaacaacaccttcttttattcgctacaggtaaatagtcagggaggtatttacctgggaacaaacaagggtattgttaggagcaccgacgaagggcgttcatgggcaagcttaaatgtggatcccatgcccttctttcacctcgttgtatctggggactccatttatggcgtttccgacagcggcatcatttatgtgtcgttaaacggcggagagagttggcacagcagccagctacagcaggtggatggtgtaaccgatatcctggtgttggctaacggcgacgtactggtggccaccggctacctggaggttgcaaatgatgtaggctatttccgtgggaacggactttttaagtctgttgacgacgggcacacctggcgcaaagttgagctcgggagggctcaggatcagtatatttcgcacctcgcacaaggctcactgggccgcatttacgcatcgttgaatgagtatacgtcggcggacggtgctttgctgtattctgccgaccacggagaaaactggcagccattgcccgatcctttgttcgactggggaggtgaggatggtttgggcacgacaagcattgtgcaggtaaccagtttggaggttgaccgccaggacaatattcggataagcctgctgggggcctccggtagagtggccacttctttgaatctgagtagcagctttcagggagctgtcaatggagaggaatggaaccaccaccatttggtgtcatttggctatccttggctttacctggagtcgcacaatagcttcttcgcctccaatggcgacagttatgccttcaggtttggtacctcgctgaacctttcgggtgtgtcctattcaaagcaagggctaggtttcgagaagaaacatattaaccctttggtaatagatggcgtagcccagttcaattactgtgtttttgctgagagtccaaccggacgagtctatttgattcagcaactggatcgtacactgtattacactgatgagtctgtcaaacagcccgtgctgggtgttgacaaaggcactgccatagccatctacccaaaccctgccagccaatatgtaagtgtgaggttggcgccctccgtgactcaggtgcaaatcgatatcttttcgtccgatggctgccaggtttacaacggcacttttaccaccgggggccagactgaggtgccgctaaatggtgtattgcccggcatttatttcgtgacagtggctaccgaccgctggaaggagacgcacaggttggtggttgagtaacccgaaaaagcaaatagcccaataagtagcgggagggcttatctagccgaaaatgggagttcaatttttcataatttttgattgttcggacaggtttgaaagttgaaggtatatacataggcatcgttgaatactgcgaaaactggaaaagaggattcgaagatgaaagagaactgatggtcaccacttttcggagtcagattaaagccattgaacatattggcagcactgctattcccggccagtgtgcaaagccggtaattgatatttttgtggccgtttcgccatttcgcaaaatttccttttacgatcggaagctttttgcacttagttatcgcaaaaccccaacggatattgccggccgacatctgtttgccaggtataccagtgagaacacctggacgcataatttgcacatattgccatgggacgttgaattctattcacggaacgaaatactattcagagactatttgagaaggagaccggacatggtagtcaggtacaatgatttgaaaaaactgttagtgctcaggaatttctcttcactggaggagtatacaaaggcgaaaactcaatttattcaggagattgtggatttagccagaattgaaaaaggactcccgaggcagaatgtatggacaatggagtacttcgaagacgaaaaataatcccgtagcaatttaggctttcggtgacttttgctttccctgttggtaatgccccagctctttcctcacataccaggctatccgttgctatctctcaagcaaagagcccgacggggccaaccagaaagactgccgatacaccaccgcctccacaataaccacattgaaccaaaatcaggatattttatcggggcaaagtgagagattccgatggcgttgcagcgtcctccatgaattcactgttaccatcaccttgcggatcgttccccactgaagcctcctctcacctccacccaagcctgagccgattccctttcaagcttgtgtcggctgtggctgaagcttcgaccttttcctgctcaagcttgtatcgttaacggtgctagcttgttccgtttacagtggaagcttcaaccggatccgactgaagcttcaaccagaactcattgaagcttcaacgggagctcattgaagcttcgacaagagtccgttgaagcttcaactgaaagcgctcacttttttctaagggaaagagggtgatttatcacgtatttaggaagttgattgtaataaaatgcctgttttcgttatcatgaaattatgcaaatattgaaggacagcttatggtgactttagagcagctttcgatgcatgacttaagatggatgcaaaaattcgggtatgcaaatacaatcgattgaaatgtaaaaaatgtgctttattgagatgtgttttaaacgacgaaactccaaaatggtttacctttataaggcgtttctttatcaattaggataaaaaaactaaatgagaaaaataatagaattttttcctaataattggagtgagtaggggtattttggcactaatattgaaaagagaattactgtacgaaatgaactgaatattccctctcacaaagcttcgttcaaggcgccagacaggttttccaaagttggtttttcgtcataagtacaccttaaatcatttattcacattttaacaattttcaatcatgtctattttgtataaaaccatccgcaaagccgagccgggagtggcaggcggcggtcagtacaagttctacgcaggtatcgtaagagagcgggaagccactctccgggaaatggtgaaggagatttcttccagaagcaccgttaccaccgctgatgcctttgctgttatcgaaaactttttggagctggtgcccaagtttctgcgcaacggtcgcaatgtgaaccttgggcagctgggtcgtttcaaagtgaatttgaaaagcaaagggcacgagctacctggtgaagtaagtaactatagcattcttggtagcaaggtgtcttttacccctagcctggaaatgaaggaggagcttatgaccatcaggtacaccaaggcggccggccatgagcaggactttgaagaggaggctgaatgatacgtgtccttgaggctaaggtcctaacctagaatcccgcagcgatctgcgggatttttttatgtgggttggtagtgaaggctgcagcttctgaagctgccgttaattctgaaaataatttacaaaggaaatttgctaggttttaatcgaattgttctctaaattttcactggccagccatatttttttaattattccctgtgaacctttctaagtgaagtattttttctgccgacaaatggcagaaacttcttattgtatttgagaaattttaggaattgaggtgaaaaaatgcccagcattgtaaggtgaggcggcttagatattttgtccacaagttgttgatttcaaaaggtgttcatgaaacatccaaaaaaaagcgaggtactccgaagagcccccgctttgaatgttttcacaacggaataatccttattgtgatttgctttcagatagtaaaactagaaataataccgaataagtaaagacatatgaaaaagattttagggctagatttggggacaaactcgattggatgggcactgattgaaattaaccatgaaaatggcatagtgaaaatcataggcctagggtctcgcatattgccgatggatgccggagaaatcggcgattttgaaacaagtggaaagataaaaagtgcagcagcagcccgaaccgaaaaaagaggtccgaggcgtttgaatgaacgctacttactcagaagagatcgattacatctcgtacttaatttacttgatacactcccccggcattacaaactagaaattgatttcacaaacggaaagggtgaaaagtgtggccagtttaaaacaaacagggagccaaaaatcgcatactcaccaaaaaaatacggaaaaaaggccgaattccttttcatggacgcttacgaagaaatgcttgcagatattaatgatacgggtgttagaaatgaaaagaggaaacgcattccttatgattggacgctttattatttgcgccagaaagctttatccaaagaaattactttagaagagttggcttgggtattactcagctacaaccaaaaacgggggtacgaaaagttggatattgaggacaattcagaaaaagacaatgaaataatagaagaactggatctagcggtaaaagaggtaaacccaaagattgacaaggaaggccatgacgttttcgaaatacaacttgaaggaaatgactcattcatttacagtgaagattcacataagaaaatgtccttcaagggcgatataaaagaggttctgaaaatttcccaagttaatgaaacaggggaaaccgatgtaaagaaaacaaagtttaccatcactgacatatatgaactggaaatagaaaacgtccagtacgaaaagaccaattataagaatccacacaaatattcttttcactttactaatgggtggatccactccacggaaaagaagaattataccagccaatttaacaaggtaaaaggaagggtatttgactacatcgttacatccgtctttgactaccagggaaatttcaaagagcgctcattcaaaacacctgattatagttctgaaacgagcaaagactggacactactcaaaaagaaaaccgaaaaagaggctttaaaattcaatagtgaccaggggtacaaggacgaagaagggaacacaaaaaactacatttcccccaagatatacagcatcttgaagaatgatgcccgaataggataccgtaccaagatcatcggaggtatgttccaggtggtcgagcggaagttttatcgtgaggaactgaagcaaattatagcaacacaaagagaatttcacaacagcctgaaagatgccgcactctttgaaaaatgtgtaagaacactttatccaaaaaacgaatcccacgccaaaaacctcctaggcaacaaggatacgattgagcacctattggtagaagacatcctgctgtatcaacgccctctcaaaaccaagaaatcagaaatagcagactgcaagtatgaaatcaggcattggaaggaattgcgtgacaaaaaaacaggcaatccgattgaagtagttgataaggaaaccggggagattactattagcaaggaagctgtttatcacaaagctgtttcagcatcccacccctactttcaagaattcaggatttgggacaaactccacaatttgagattaattcaactagagtgtgaaactgatggcaaactttcaactaacgtggatatgactggaaagtattttgatatggaagcatatcaagcacttttcttcaagatgaacaatcagaaatcacttgaccgaaagcagttcctttccttctgtaagtccagatttaagataaaagacattgaaaattacgtctggaacttcccagagggcgaagaactaaagggcaatgaaacaagggtgagtttcgctaccagatttaagagatgtggctttaccgaatatgtcgagttcctgacccgggaaaaagaaattgagctatggcattacctctactcggtgaactacaaagagcgtaaggaaaatgacaataaaagtatccaaacattcttcaaccgctttttaaacgacagtggtatttctgacgaaatcaaggggcagattatcgatgactttactaactatccaaagttcgcttcgaggtactgtgcctattctgagaaggctttgaaaaagctgcttcccttcttgagaatgggagaaaatcggtttacagggaagtttgacctttcaacatacaaggccgatttggaaagcatcagccatgataaatccaggatttcgtccttcatagccagttcaaagaaagtaggaaaagaagcagaagataagaaacaaggcctttatgatgctctgtggaaacattctatcaacgaacggatagacgagatactcaacaggctaagcaagattgattttgaagcggatgaaattgattacaccatagcaataaccaaccaaggagattccaaaaggggtacgctaccttatccaaaaggcttgttcaaggctttcagagagtttaaggaagctacagacttcacctctctcgacctgacaaaaacgtcttacttggtttatgggcgtcattcggaattggcccaggccatacagtggaaatctcccgaagatattagaacgcaattgcatcaggagctaaagcaacactccttgaataacccggttgcagaaaaagtaattctggaaatgatgcaggtagtggctgatatctgggagcataaagaattaggagatagtcagcctaattactttagtgaaatccatgttgaggtcggacgagagctaaagaaatctgtaaaagaaaaagaagctgaaacaaacagacaaaaagggaacaagactcaaaatagaagaatccggcaagtcttggaggagtttttagctagcagtcagtaccgagcaaatcccaagaactctgatcattttgaaaggttgaagattgtagaagatgccgtcttgaatcaacatcagtacaagaaaaaagccgaacgtgatgatattgacagccttctaaaagcaccgatcacaaaagaaacttttgataagtacaaattgtggatagagcaaggttatagatcaccctacactaatctaccaattaggctcacggacttatttgatggcgacaaatacaatattgatcatgtattcccccaagcatccatcaccaatgattcactcagcaacaaggtggtctgtgaaagagaagtaaacaaattgaaaagcgaccaaacaggacgtgaattcgtcaatcaccctaaagaacgtgaacaatactgtgttgcacatggcaagaaggttaaaatagtcgatgaccatacctatgtgagcatcgtaacgtcacagttttccggcagtaagagatacatcttactatcaaaagaaatacccaaaggatttacgaatagccagctaaacaacgcccgccatattgcccggaaagcaatggaacttttaagccatattgttcgggaggaaggagaggttgagttcctttctaagaatgtattacccgtaacaggcgcagtaacaggaaaactgaaagaagcatggagattggaccaggtctggaaagaggttgttgcgccacgattcatcaggatgaatgatttaacaaaatcaagtctattcgggcaggaaagagtatcaaaatccggacataaatattttgactgcaatttggacaaaagcattcgtgaaaaagacgaatcgtatgacatcaagcgcattgaccatcgacaccatgcactggatgcgctgatagtcgctctatgtacaagagatcacgtcaactacatcaacaacatcaatgcaggggtcaagtctgtcgactttggcaaacaacgacaaatagaaaaatacagacagacactgaaaagaaaactcatgtcttcaaaaaaggaagacggaaaggatgacaaggattggcactatatgcttcctggagaaatcagacaacaggacgctgagaagtttacaagagatacagtgatggccaaatcttatttccacaaagactcggattcaaaaggtgactataaagcaatggtattagatgccctacagcatacggttgtaacctttaaacaaagccaacgggtcatcaataaaactgtgaatcgatataacaatacccccaacaaaaaggaatttgttaagcaagaagggaaatataactgggcaatccgaaggagtttgggaaaagacaccttctacggaaaaatgttaatagatggagaagaaaaaatagtaattcgaaaaagtttagacacttcttttaatagtgataagatcaagactatttctgatgcagtagggcaaacaaaagcgatcttgacgaaccatctaaagcaattcgataccgtcgaactcccattcgaggaagctatttctcattacgatgcacttttagaaaaagaggaattcgaagcaatcacaaaaagtgaagacaattatatcaaagatatgaatgaactcattgagtacttaaggaccaataaatacaggtttgacaaaacggattactccaaactcaatgtctttgttaataaagtgccagaaatagattttacgaaagagataacagcagaaggaaaaaacaagtacaaagttgaggagcatccggaaatagcctttgctcctgaaatgattgaagagatgaacaagccggaaactcttaaaaagctaaatggaggcaaaaatcatactccgatcagaaaggtgcgaatttctagaggatttggaaatcaaagagctttaaatgaagaagacaaagagtccgtcaagtcaaaacaatatgtagtaaatgatgctggttccaatctctaccttggtttttatgaaagagtttacagagatgacgatggaaatgaagtgaaagaaagaaggttcaaagacattggtttaatggatttgattagggtacttaaagaagataaaaataatcgccataaccctaatgatgaacgtttatttgacgatggtaagaacgtattcgacagaattttcactctttcgccactggatttggtttatgtgcctactgaagaggaaattaaaaatccttcaacagtacgactcaataacctttcaacagaacaattgcaacgtgtttacaaatatgtagatggaggtggtggaatcgcaaactttatcccttattcagttgccaaaccaatatggaggttccatgacgataaaaagaaaaacgccatttataaagaacttagtgagaaaggagtgcttaatatccctgaaaaagatatgataaaagatgagttcggatttggaagtcaacaaacgaaaaatcagaatatgattgatggtgcaactcaaatcaaaaaaatctgctggaaaattcgtgcggataggttgggaaatgtttcaaaggcataaccatgatcaaacgcaccctctacttcggtaacccggcctacctgaaaaagcagcaggatcagctggtggtggacttcaaggacgaagtgaggccctctgcttcggtgcctattgaagacattggcctggtggtgctcgaccatcagcaggtgagccttacccatggcctggccaatgcgctgatcagcaacaatgccgccctgctgttttgcgacgaacgccacctgcccaacggcctcgtgctgcccatgagcgctaacagcctgtttacagaaaagctcagggcccagctcgatgccagcgctcccctgaaaaaacagctgtggaagcaaacagcgcaggccaaaatccgcaaccaggccgccgtgctcactgagctgggcttgcccaccgacaatatgcagcgctgggccgagcaggtgggcagtggcgaccctgtgaacctcgaaggccgggcagcggcatggtactggaaaaatttgtttgagcacgtagaccattttacccgccatcgctacggagagccgcccaacaacatgctcaactatggctatgccattttgagggccgtagtagcccgcagcctggtaggcagtgggtgcctgccggccatgggcatccaccaccgcaacaagtacaatgccttttgcctggccgacgatattatggagccctaccgcccctatgtggacaggctggtgctagacatggtgcataccatggaagacttgcccgaggagctgggcaaggaagaaaaggccaggttgctggcggtgccaacgctcgacgtgcacctcgacggcatgaaaagccccctcatggtggccatgcaacgcaccacggccagcctgatggcttgttacgaaggagaaagccgaacacttgcctatccgcaaatgtgagtcgctcggcagccaccgagcgactcaaccaataccgcatcatgtgggtttttgtatttttcgacttgccgaccgacaccaaaaaggacaggtaccactacacccagttcagaaagaatttacaaaaagacggcttcagcatgatgcagtactccatttatgtgcgccactgcaacagccgggaaaacgccgatgtgcacatcaagcgggtgaagcgttttttgccacccaaaggggaggtgattgtgtttacccttaccgacaagcaatttggtatgatggagttttttattggaccggaaatgaaagaccggcccgacaccccccagcagcttgagctgttttgaacggttttttagtgactgccattcatgatggcgattctattgatgccatattcgccggttgtgagcatacctgtgaagcacctccccgccatcctctactgctaacctactagacgccgtcatgcctgcgcatgcccctggctcgaacaggggcaggcaggcatctctcaacagcaaactggagcctgaaaacaaaaaatcccagccccattcaggagccaggatttggaaagtatcggtaaactgccagtctacagcacaagttgatcagttttttgatcctgcatatcggtgtaacacactgaataccaatcattaacggtagggtatactgtttccgatacgtcaaagatcattgattgaaagcaaatcacaaccgatcttcccatgaagcatgagtgatgcgaactgtttccgatacgtcaaagatcattgattgaaagcaaatcacaactagcatctatatcaatcttaatgaagaaagactgtttccgatacgtcaaagatcattgattgaaagcaaatcacaactacatcgctcaatcaaccaaccatggaaagactgtttccgatacgtcaaagatcattgattgaaagcaaatcacaactgagcgagtcgctcacaggcacatgggtggactgtttccgatacgtcaaagatcattgattgaaagcaaatcacaaccgagattggagaatacatttccatcaaaagactgtttccgatacgtcaaagatcattgattgaaagcaaatcacaactgttttttaaacgattccaatgaggcacctactgtttccgatacgtcaaagatcattgattgaaagcaaatcacaaccagaagatgattccgaacaatcagaggaagactgtttccgatacgtcaaagatcattgattgaaagcaaatcacaacccgcacagatgcgggtttgcattttatcgcactgtttccgatacgtcaaagatcattgattgaaagcaaatcacaacttggccagagagaggttcccctctggcctcactgtttccgatacgtcaaagatcattgattgaaagcaaatcacaacgtggacagcaacaacaagctgtacttcgacactgtttccgatacgtcaaagatcattgattgaaagcaaatcacaacccaggctattattaaccggtcggtttgtaaactgtttccgatacgtcaaagatcattgattgaaagcaaatcacaaccaatgctgccgctaaaggcggccgccggtgactgtttccgatacgtcaaagatcattgattgaaagcaaatcacaacgaagtctcacccacagtcttacaacctattactgtttccgatacgtcaaagatcaaaggctgcccgcccgggattgaaagcaaatcacaactgtctttgttttcgaagaaaaacgggtaggactgtttccgatacgtcaaagatcaaaggctgcccgcccgggatgaaagcaaatcacaacactgtaggtgatgagtgggaattctacactactgtttccgatacgtcaaagatcaataggctgcccaccagggatgaaagcaaatcacaactggttgtagggaaggctaaagtcatgtttaattacaaatacgggtagttttgctttgaaaccgggattaaatttaggtctttgtctattgattaaactacgctcaccatgaagaattttcttgtccccttttttttgatgctaagcaccagcctagtgttcagtcagccagtgcaaaaacatcgggtagttatcctgtccgatattgaggcagaacccgacgatatcgaatctttcgctcgcctggtgttgtactcgaatgtgatagacatcaagggaatggtagccaccacctccatttggaagaaaacgagcgtagccccggagtcaattcggaaagtgatcagggcctacggcaaggttcagcctaaccttttgaagcacgaagctgggtttccggaagccgaagatttgctggcgacagtaaagcaagggccgccggtatatggcatgttgggagtgggcgatggaaaggactcagaagggtcggattggattatcaaagtgcttgaagaaaaggacgaccgccctttgtgggtaacagcctggggaggcgtgaacacgctggcccaggccctgcacaagattcagaaaaccaagtcgcccgcagaagcaaagcgactcatcgccaagctgcgggtttacaccatatcggaccaggatgacagtggcatttggatcaggaataacttccccagcctgttttacattgttagtcccggcgaccactacggcagcgccacatggagtgccatcaacaacgttattaaaggcatagacaatgaaaaaataagcaacccatggatagctgaaaacattcagcaaggccatggccccgtgggcgtggaatatccggacgtggcctggggcatggaaggcgacacaccgtcgttcctgggtttgatacctaacgggctcaatgagccggagcatccggaatggggtggctggggtggccgctacgaactctacaagccagatattgctacgctaaaaaaggggagctcaggtgttccgtttgagcctgaaaccaggcctatatggacggatacaaaggatagttatactccgtacgtgcccagtctgtacggacgcacagttcgcagagatacggtttctttcaataacaacaaggccacgttgtttcgctggagagacgactttcagaatgactttgctgcccgaatggactggtgcactatgtcgtatgaagaagctaaccacccgccaacgccagtgctggagcatgccgaccggttgactgtgaagtcaggagaaggttttggcctggatgccttcagctctaccgaccccgatggagacaatctgagctttctgtggtttcactacccggaggcaggcagctataagaagcaaatagatatctctgctgaaaacgtgcatggtgtgtatgtgaaggcgccggtcgtcgacaaggaagaaacactacatttcatcctaaaactgtcagacaaggggagtccggtattaacaagatacaaaagagtgattgtgactgttgtgccaaagtagcggaggctccggggtcatcagttcctttgtgctgccggcatgtttgcgagccgggcaagatgcctgagatggacatttgaaggattcctttcgctgtgaagaaaaaacaagtagcttagcgagcccccgagggatagcaagggaaggcgtgttatatccaaccagtaggcatataaagtgatcatctcatgttcaggcatcaaggtaaaagcaggacactgaagcataacctgcaaattgccaccgtactttcctttgtagctggcattgtgaacgtaactggttttttggccctcaaacaattaactacaaatgtaaccggccatttcgcactgtttatctatgatgtttcaaatctggagttttggagagggacggtgtatttcctttacattttctctttcttctttggctccttcttgtcaagctttcttattgagctcttccgggaaaataaaagatggaatgtttatgttttgcccacaacaattgagtctctggttttgctctcgataggtctgctgagcaatgtagtagacatcacttatcctgatgtcatcgcctgtttactgctttttgccatggggctccagaattcttatgtgacaaaaatttccaacacaatcgtgagaaccacccaccttacagggcttttcactgacctgggtattgaaatttcccagctactcttccctaaatcgcatccgaacagggaaaaactcaaatcgaccatcaaactgcgcatatacattatttcattcttttttgccggaggacttgccggcggttttttctattctaaaatcgacctgaaattaaatacgctggtatttgctgccgtagttttattgctaagcttgctattcgacgattttcgatacagtttgatcagggctaagagaaaatatcgccaaaaatgaaaacggctaccgactacatggatgcaagtttgtatgcacttgccggccgacatagctttttaggtgaagagacacagtcattattgctgttatttcccctccaggtactctctcaaactccttcccacaatatccgtccatccggcggcgaagttttctggtgccaaatccggattaccgctgttgaagctttcaatgttcgcatgagtgagtcgcaccaaggtggagttcccatggtcaaacagctcccaggtcacgtaagagatacctggctctccgtcgtagcgccagctgtgggctagttttttctccttaatcacttccgtcacctcgcaaatgtgcaggtactgtttttccggtgggccgcctttaaaacggaactcaaaacccacctcagctttgaactcagccagatcaaagtaccaaaccttcattttgtctttgtcggtgatggcttcccatacttttttagtgggtgccttgtatgttttttcgatggtaaatggagtctcttccatattattgtttggttatagatgcttatacagttcggcgtactgcgccttcaaggcctcttgcctgtctggtatgcttggtgttgcttcgtcgcctgccagcgttttctttagtgtatcgagcataaaatgccagcctgcaggaactgactttgcccattgcccatccactttactatgcgtaagtgtaagaaggcaccgttcggaactcagctcctgaagctcccaggtaacaagctcctcttcccagtagtactcaaacagcttcctctggatgatcctggttatttttccaaatgattcagaattgtcgggttcaggaaagcggatgaccattttgccacctggtttgaattccatttctgttgccatgaaccatgtcgccagcttgtcgggatttgtaattgcctcccaaacagcttcggaactaaatggaaactctcgttcgaataccactttgtacccgtcgggttcattggtgagttttccggggtttagcaggtcactcataacttttgtcttgttttgtattttggtcattctccagaaacacctctagcgcatccaacttctgagtccagaaggccctcatctttgctgtccagtctgttacctccttcaatccatcgagcctggcgctacaaaagctctccctgcctcttttttcaatatcgatcagcccacactctttcagtagctttaaatgcttggccaccgctggcctgctgatgtcgaacttgtcggccacggtgttaaggttcagaggctggctggccagcatcgtaatgatctctcgccttgtggggtcggcaatggctgcgaatacgtctctttgcattagggaaccttttggtttcaaatatataaaggaaaccttttagtttcctaatatgatcacccatttttttcaatagatgcctgaggctggttttggacgcttctggcggcaaattattgggtttcagtggtgttaaaaatgcgaggccgctgaataattgtaaattcattcattgactaccttaatttttgactatgagacgttacctgattatgatcctcttctgcacctctgtacttagtgttgctgctcagggtgtgcaaaaagatgccgatggctttgagtactttgaaatgcaggaaggagatacaacgtatatcatgaaaaagtatttttttgtgatgctcaatagcgggccaacaaggagccagacgaaagaagaagcggcggccattcaggaaaagcacctggcacatatcaactggatggcgagcaatggccatgtaaacctggctgggcctgttgagtccgaagatgaattcagggggattttggtcttcaacgtaacctctttggaggaggtggaaaagctggtggcgatggatccggcggtaaaagcaggcagactggtcatgaagatatatccctggtggtgcgttaaaggaggtgtgttgcgctaactgaaaatcaacgctttagtagtaataattgcgtcggcggcttatcttcgggaggacattgcttataaccttgagatttactaggccaaccgctgttttttcaatcattatctttttttttctccctgattttgtttttgcgcaagcaagtaccattgatcagctggaggctgaaaatgatgcctataccgcctcggatagtgtgaaagttgacatgctcaacaggctggctctcgaaaatcaatttgtttctattcttgaggcttttgcttacggacgtgaggcactggaactaagtgtggaaattggctacgtgaatggcgaggcttatgcttaccgaaaccttggcagcagctatgcgatacggcaggattttgtcactgctgtgcaactgttggagaaagcgcaggcacttttcgaggcaattggttctcaaaggggagtggctgattgctatatttccatggggcatgtgtacagatggcagcttgactactttaaggccattgaataccaaagaaaggccgccgatatctatgcaaagcttgatataccagagcgttatggcatcactcttcataaccttggtgagaactacctttttatcggcgacctgaaaacagcgcaacaagttacccagcaggccacaaagattctcaaagctgttggcaacaaacaagtgctgacttcttgctacaaagtgtttgggcaaattgcttttgaaaggaaggattttgcaggtgccgaaagttacttcagggaagcgctgaccatctccgaagagcttgagaaaaattctcaaaaagcggcgacgtttgatgtttacttgatgctggctaaaatttatcaccaatgggggcggaggtctgacgaggagttaatgctaaataaggcgcttttgctggctggcgacaatgtgctgctgtcgcaggaacggcacgcttacacccaacttgttaaccactattttttctacaaggaatatgagttggcagacaaaacttttgatgctttcagccttatcaatgaaaaaatatacgaccagcaaaaaatagaaatggccaatatgatggagcaggtgcttcaaaccataaaggtggctaatgagaatgaacttctaaggcaggagagccaattgcaggaagaaaggataacgctgcagcaataccagatttacttttttgtgttttccattgccttgctcggtatgttagcactgcttttggtacgctcagataggctaagaaggaaacatgctgaggaactggccaccagaaacgaattgatagaagagaaatcgaaaaagcttgaagagttggtgcgggtaaaggataagttcttttctattatttctcacgatcttcgcagccccataagcaccctggcccagtttgtgttgatgctgaaaactagctacaaaaatttttcggatcaggaaatggaggatgtgctcggaaagtttgacgcacaactgacctcgacactttcactggctgatgacatcattctttgggcgaaggcagagattaatcaggctcccggaataaatgatgcttttgaagttaataaagctatagaagctgtggtcaagttggcagctgaacagctgcgaatgaaaggtattgttttgcaggcggcaattggcaaccacctgatggtgtctgctaacagggatcaggtggagttttgcatcaggaatattctaagcaactcgataaagttcacacctacagggggacacattggtatcggaaccttttccgaaggaaacatggtggctgtgaaaatagaggataacggaaccggtatttcgattgaaaagcaaagtattctgttccaaagccctttgaaacagagtgaaggagaattgggcactgacggtgaaaagggtaaggggcttgggctgtatctggtgaatgattttatgaagaaaaacggaggcagagtggaggtgtcgagtgaagcaggaaagggctccgtgttcaccctctatatccccgttgccacggcgtcataggatatcgtcaaccacctcaatggcgctaaagttggaagaacaacaagcccttagcccgagattagcgcctcatcatgttgcccagcgccgcttttgctcctcccattttgttcatggttttcatcatcttgcgcatttgctcaaactgcttcatcaggttgttcacttcctgaatgctggtgccacttcccctggcaatgcgctgacggcggctgccgttgatcaaatctgggttttctctctctttaggtgtcattgacttaatgatcgcctcaataggtttgaatgaatcatcatcgacatccacatccttaagggcttttcccatgccgggaatcatacccatcaggtctttgatgttgcccatctttttgatctgatcgatttgagaaaggaaatcgtcaaagccaaattggttcttgcggatcttcttgttaatcctgtcggcttcctgctggtcaaaggcctcctgtgctttttctaccaaagacaccacgtcacccataccgaggattcgctgggccatcctgtcggggtggaacaggtcgatggcgtccattttctcgcctgtggaaataaacttgataggcttgtcaaccacggccctgatagaaagtgccgcaccaccacgggtgtcaccatccagcttggtcaacactacgccgtcgaagttaagcctttcattgaaggttttggccgtgttcacagcatcctgacctgtcattgagtcgactac

SEQ ID NO: 4548 - DNA, 25430 bp, synthetic construct
  misc_feature 1..25430: note = Synthetic
  source 1..25430: mol_type = other DNA
aattggtggcaccgcatgatgttgtaatgtataaaaaaacggtgtagctgtagttaggacaattagattctgtgtattcatgcggaatagggaagtcttgagaatttacagggtctgcgctattaaagtaagttgagctttcaagttgttgttgggtgtaagtttcaatagtgccatcaccataatcaacttggtaatttgtgtctggtggattggttccccaagagccaatagcaaattctattggagcaatgggggtacataaattaacggtattacccggatttataatagcgcctgttgggttgcttgaattttttattaaataggttactgtgttgtcacaattaataccattacccgtaatgcgcatgttgtaagacccaagttgcgtataggtatgggtaagtgggaaactcacattagtttctgtattaccatcgccccagtcaacatcgtaagaagtgatacagcttccagtagatctgtttcctacattaatagtgtatgaagggtctgaagtattattgccacagttatcaaatgctggggtaaaattagcttcggcatcaatatcataaaaatctaaattaggtttttgaagtactggtacagctttagttatagtagtgctttcgttattagaatccgttacggtaagcgtaacatttatgttgctagtaccgcagcctaaagctgtaaaggtatgcgaaggattattgctagtacttgtactattatcatcactaaactgccataaataagtaaaaggaccattgccagttactgtagaggtaaagtcaacttgtgttccagaacaagcgccactgttgttaaaggtgaagtcaacaaccagaggtggtaaataacgactttttttataggtatcattcgtattgttttttctattagtgttacttaatccaaatagagatacaccaattatgaaaaaaaatacagttgcaagaaaagaatgcttcctcatgtgtaataattatgttaatagctgagactaaaatagatattcttttttagcatactaaattaaattagaggtttggcttatttattctataaaatacctgatattaggtatataaaagttttaaaacagtttataaactgaatgtataatgtttatatttaagcataatttattaactaaatgagagcattagtgatatctggaggaggaagtaaaggggcttatgcaggtggtgtagcgcaataccttattgaagaagaaggtagagactatgatttgtttcttggcacctctaccggaagtttattggtaccgcatattgcagctggtagaattgataaattgcatgatgtttataccagtgtgagtcaaaatgatatatttagtgtaaatccttttgtgattagaaaaaaaggcgatagagagtttgtttctattgattttataaatacgctttggcaatttatacgtatgaaacgaacctttggtgaaagtaaaaacttaaaaaaattaataagaaaacgatttactgaagaagaatatcatttaataaagaaaactaaagatgatgtggtagttacggtttctaatttgtctaaaaatagagtggagtacaagtctattaatgagttttcttatgaagaattttgtgaatggatatggatttcctgtaatttcattccattcatgtcattagtaacaaaaaataattatgaatatggcgatggtggtttaggatgtattgttcctatacgcgaagctattttaagaggtgctacacaggtagatgccattgtgttaaagtctgaatctatggatcaaaacaaggtgcttggaaaaaaccctttttctttaatggttagtttgtttgggcatgttttagatagattagaacgtaacgatgttaccataggcaaactagcagcaacagccaaaaatgtagagcttaatttgtactacacaccatctaaactcacagaaaactcattaatatttgataaaaaactaatgactgcttggtggcaacaaggatttgaatatgcgaaagcaaaatgtacagaagctaaatctaatgagttacgattagaagattagtttaccacaaatcagatacttcttcttttataaaagaaagtgcagcgtcactaggtggttttcgttccatcatttcggttaaaataacttctcttaatttattagcggtatctgttttttctgataagttagcttttctaattaattgtatagtagcatttttagcagctacaataatgttccaacatttatcactcacataaatttgttgagataaattatgctcaaattcttgttctatattttgtatgagtaaagattcgtaatcttctttatttgatgttattggggtaacccttaccaatagtttagaaggcgataacctttctaaaaaaagcgtcatacgttcgtaggcttgtaaacgaagcggaagcgcatttacttgcaagtctttttttagtaaaaagcgtcttcttccatcttcatttttagtatgttctctaaaaaaatagtaagcaataagtcctgtaataattgtaggaatggcgtatgaaaaaaggtcgataattctagaaatttccatgttaatttggggttaagcgttatgtttacctcccaaatatacacaatcttttaaatcctgcatactggtaaaaggtaccgaaactttttcatacatataagttgtatcaagttctttagaaaggttgtggtcatctacattcatttcaatatcattcattttaaattggcaggggtgttcataaccagcagcgtgtgtaatttcaattagttcttttctaaaagttttaaaatactgtgctaagcgtaccgattttaatgtagtgtctataccgttttgtaaccatttattttgtgtagcaaccccgctagggcaacggttggtatgacaaacttgagcttgtatacaacctatactcatcatagcttctctggcaacattaatacaatcggctcccatagcaaaagccatggctgctttggcaggaaaacctaattttccgctaccaataaaaacaatacgctctgttagccctttgtttttaaaaagtctatataaatcactaaacccatatacccaaggtaaagacacatggtctgcaaaactaggaggagcagcgcctgtaccaccttcgccaccatcaacagtaataaagtcggggcctttatttgttttcaacataatatctgctagttcttcccattggtctaattttccaatagcagcttttatacccactggtaagccagtagctttagcaattttctcaataaaatctaccatttcgggtacattagaaaatgccgaatgattagggggcgatagtacatctttaccaatttcaactccgcgaatgtctgctatttgcttggttattttagcacctggtaaaacacctcctttaccaggtttagcgccttgagatagtttgacttcaatagctctaataaacggatttttttcaactaaggctatcattttttccatagaaaagtttccgtttttatctctaacaccaaaataccccgttccaaaatgaaaaataacatcgccaccaaaactgtgataaggagataaaccaccttcacctgtgttgtggtaggcatttgccattttaacccctttattaagagattctacagctttagcagaaagcgagccaaaactcatggcagatacgtttattattgatgctggtctatacggttttttgcgtttatgatgtaagcccataactttggcacaaggcaaaaaagttttgtcaatagtattagggtgatttgcatcaactttaaaaggcatcatagcattgttaataaaaatgtgctggtgctcgtatatgtttctatcggtaccaaaaccttcgtagttgttttctttttttgcagaggcatatatccaaccgcgttctatacggttaaaagggagttcttctctgttattagctaccaaatattgcctaagttctggccctattttttctagcatataccttaaatgacctataagcgggtagttatggcttatggtgtgttgtttttgaataaagatatcgcgtatggcaactagtagtaatactattaaaatccatccccaccatgggatgttagaaagtatatttagaattgaatccatttttgaactgtaaaaattgaagtttaaatatatttaaattaaaagaattatacctgcataattaatacaaaaacttagtatagaaaaataacatagcagataagttgtgttagggattgtagtggcatcctttttaaaccatagtaaataagctattattatggggcggtataaaaattatattaaattgaaaaccagcttttaagaacgtttaaaaagatataacggaaagcccgaccacgcttaaagcgtgggaacacccaaattattaatatgaattgtttataattattaataattagcccttaataaaagcataacattagttattttcacgttgtaaaattgaagatgatttggaaaagtatttaagccaacttaatgatgcacagttagagcctacaaagcaaattgaaggccccatgatagttattgctggcgcgggttctgggaaaacgcgtgtgcttacttatagaatagcctatatgatgagtaagggtattgatgcctttaatattttagcattaacctttactaataaagcggcgcgcgaaatgaaagagcgtattgcttctattgtaggtgatagtgaagctaaaaatttatggatgggaacattccattcggtttttgctagaattttacgtagtgaggccgataaattgggctaccccagtaattttaccatttatgatacacaagattctgataggttaatagcatctattattaaagaaatgaatcttgataaagatatttataagtacaagcagattcgttctagaatttcgtcttataaaaacagtttaataacggtaagagcttattttcaaaatccagaacttaaagaagccgatgccatggcgcgtcgcccaaaaatgggagatatctataaagaatatgtagatagatgttttaaagctggcgctatggattttgatgatttattgttgaaaaccaatgagttgttaacgcgttttccagaggtgttagctaagtatcaaaaccgttttaaatatattttggtagatgagtatcaagataccaatcactctcaatatttaattgttagagcactgtctgataagtttcaaaatatttgtgtagtaggtgatgatgcgcagagtatttacgccttccgtggtgcaaacattaataatattctcaattttcaaaaagattatgatgatgtaaaagtgtttaggttagagcaaaattaccgttctaccaaaaacattgtaaatgctgcaaattctgtaatagataaaaaccaaaccaaattagataaggtggtttggacagccaatgatgagggaggaaagataatagtacaccgctctttaaccgatgccgatgaagggcgttatgtagcaagcactatttttgacaataaaatgaatcatcagttaaaaaacagtgattttgctattttgtatcgtaccaatgcgcaatcgcgctctattgaagatgccttgcggaagcgtgatattccgtatagaatatacggaggcttatcattttaccaacgtaaagaaattaaagatgtattatcgtatttaaggttaattattaaccctaaagatgaagaagctcttaagcgtgttatcaattttcctgcaagaggtattgggcaaactactatagataagcttgttgtggctgcaaatgcttacaataggtctatttttgaggttatgaaaaacattgacaaaaccaatgttaaaataaattctggtaccaaagcaaaacttcaaaactttgttacacttatagagagttaccaagtaatgaaccaaacggccgatgtttttgaattagcagaacatgtaactaaaagcagtggtttaataagagaatttaaaaaagatggaacgcccgaaggtgttaccagaatggaaaatattgaagagctcttaaacggtatgaaagattttgttgaaggccaaaaagaaatagccgatgccacagggagtttagcagaatttttagaagatgtggccttagcaaccgatttagacaatgaaaaagatgatggtgataaggtagccttaatgactattcacttagcaaaaggattagaatttccgtatgtatatattgttggtttagaagaagatttattcccaagtgctatgagtatgaatacccgtagtgaattagaagaagaacgccgattgttttacgtagcacttaccagagccgaaaaacaagcctatttaacctatgcgttatcgcgttaccgttggggtaaattaatagatgctgaacctagtagatttattgaagaaattgacgaccaatatttagaaatacaaacaccacccgaagaacagcgctttaaccccatgttagatgccgatatttttggagatcctgagcctaataaagttaggtttaaacccgctaaaaaagctgttattaaaaaaggacctgctaaaaaagaagcgcctaagtttcaggttaccacaccaaaaaatttaaaacctgtttcaaaatctaacggaaatactaacttgtttgatagtaaactagctgttggtaatatggtaaaacatttgcgttttggtactggagaagtgttaaaaattgaaggtacaggtgccgatatgaaagcagaaattaagtttgatgccggaggcgttaaaaagctgttactacggtttgctaagttagaagtgttggggtaaaaacaactattttaccatacaaaccgagtttatattgccattaccatcatattctttaacctcattattggggtctgtaatccatgtaccatctactatgaatttataatgatgtttgccaccagataatggtactacgtacttccagccgtagtccattttgcgcatttcaaactcgtgttcattccaattgttaaaagagcctgcaagaattaccttttttgcattggtgtatccgcgtagtttaaaagcagtgtattcttttatgtcaataacagagttatactcaccaaactcattttttgttttgttggggttgtgtgggtcttccatccattgtccatctacaataaacctgtattggtaaacatcaggtttcatttgtaaggttagttcccaacccgtagacgttttatgcattttaaaaagagattcattccatttgttaaaagaaccagctaaaattacatgtttagcttctttaaatcctaataatttaaaatgcgcgttaccatcttcactagggtaagcagtgtacatatttaagttgtaaacaccatttagttttacaccatttttagttgctttggtaatatttagggcttttttagagggttctgcccaatacgaattgtttattacaaatttaaattcatatgaaaacgcatcggtaaaatcagaaatactctttttaagttgataaatatattcattaacgcgtttcattttccaatggtctctagaccacaggttaaactcaccagcaaccaccacattttcaatatcaaaatcttgaaaatctaatacctgtccggtaaattcctgagtatatttagagtagtctctaacgtcaaacgtaaaaattacagaatcaccttcaattttatagcctttaaaatcatccttttgactatatgaagtaaaacttactaaagcaattatagcataagtaatatgtagaattaactttttcaatggtagtttaatggataatttataaagtataatgtctcttttttataattaataataactcttttttgagcaaaaaactcatagcctaaaataccatctaagtgtgtaccaaaagcttcgttcattttgcttaaattagttaaaacggttagcataggcccaaaataaatagatttacttaatttaacacggtgcaatttccctgccaaaacctcaatacgcctgttactagctccggttaaagttaatcgctttttaggaataaaatactttagtacttttttgttaacactcttatttatttgattaaattctgctgccgtatctataccaaatcttaaagtctgattattaacactgccatttacaacaatagtatgattttttaaattgaaatctaaactatcaacaattttttctaaataaacgtttttatttaacttgtttcctatatcatcaacttttgttaatgtaatttggtttaaatacatgtctataaaaacctcgtaatcttttaaaatattgtaaccaataatacctagtattttaatttttttagttttttcaatatgggctaagttaataacgtctgatgttttattttctaatttaaaattatgtaatataaattcttttatttgtttttcataacggtcttctacagaatttaaaacacctgtagcagtttgtctttttctctggttttcatataaatcagaaaaatgaactttgttaagaatcatactttcagagcccgtatcaataataaaattacctttttggtttagtaattttgcttctacaactattaaatggtctactaatttaaatggaattctagtagtgtgtttgttaatagtttcggccttataaaatttaataggattaataacaccattattagctaaactaacattgatgttacatagaaaaaataatataatgtataactttggcatatattattaagactcatttattaatgaattgttacaaaacacgcttttttaattgttaattatgaattaaagtataacctaacaaacctcattaaatacttaaaaaaataatagttactttgtaagtgttaaacaataaattactatggcagaatttttaagaatttatgaagaaaaccctaacccaagggagattgataaagttgttgctattcttaaaaggggcggacttataatttaccctaccgatacggtttatggtttagggtgtgatattactaatattaaagccttagaacgtgtggctagaataaagggggtaaaactagaaaagtctaatttttcttttatttgtcatgacttaagtaatttaagtgattatgttaaacaaatagatacctcggtatttaaattattaaaacgaaacttaccaggagcctatacctttattcttccaggttctaaaaacttgcccaacccatttaaaaagaaaaaaacggtgggtattcgtgtgcctgataataatattgctttagaaattgtaaaagccttggggaatcctataatctcaacctcaattcacgatgatgacgaaattatagagtacactacagacccagaacttatttttgaaaaatgggctaataaagtagatgctgttattgatggcggatatggtgataatataccttctacagtagtagatttatctacagatgaacctgttattgtaagagaaggtaaaggagatttggagatattttaaaatgtaattcaacacctattttatattttttttcttacatttagagcgcctttaatgttattttattaataacagagcgatttctttatcgctttttaaaggtcatttaaaaagtacattttaatctttttaaattaaaaacaactaaaacatttataaaataaacaccttgaataaaagttgaggtggtttagatgttttactcgcaaattttatgatttaatagtttgcgctcatgaagccatttacaggaaaaagaaagcgacataagattaaatctatgccgctttaaatgttttcacaacggaataatccttattgtgaattgctttcagtggtgtaaagataaataaaaatttaaggatttcaaatgcggttttccgtaacaagattaaagaaatattagataaattttaccaacaaaacatataacaaatgaaaacagttttaggactagatctaggaaccaactctattgggtgggctttggtggaaatcaatcatgaaaacaatttggtgaaaattttaggacttggttctagaattataccaatggaggctaatgaggttaaagattttgaaagtaaaggaaaaattaacagtacagcagcacaacggactgaaaagagaggggtaagaagactaaatgaaaggtatttacttagaagagataggcttcatttagtacttaatttattagacgcacttccaaagcattatagtcttgatattgattttacaaatttaaaaggacagaaaagcggtcatttcaaaaaatatgcagaaccaaaaattgcatatttaccaaaaactaaaggtaaaaaagctgaatttttatttaagggttcgtacaaagaaatgcttgatgatattgggaaagaatatgttaaagatgaaaaaggcaagcgtattccttatgattggactttatattatctaaggcaaaaagcactttccaaaaaaattagtttagaagaattggcatgggtacttctgagctacaatcaaaaaaggggttatgaaaaaacagaagttgaagataaatctataaaagaaggagaaattgttgaagaattagatttaagagtaaaagatgttattccaaaaaaagataagaatgaaagacaatattatgaagtacatcttgaagggaatgataacttcatttattgtgagcgctcaaatcaacaaatgacctataaaggagacttaaaagaagttgtaaaaacatctaaaattgatgaggaaggaaatgtagataataaaaaaacagaatttaaaattgttgacatttatgaattaaaaatacaagatgtaaaatatgagaaagaaaataataaacataaatacactttaaattatgaaaacggttgggtagaagaaaagcctcctgttaacaaattcacttataaatatcaaaatgctcttaataaaccttatgattacatagtagaaaccgtttatgattataaagggaaaaataaagaaataagaggaaaagaaagattacttagagagccagattttagtgataattcatccgattggacattgctaaaaaagaaaacagaaaaagaagcccttaaatttaatatatcacaagggtataaaaataaagataatagtgctaataagtttatttcgcctaaaatatatagcgtactaaaaagtgatgctaaaacaggtaaacataccaaaatcattggagggatgttccaagtggtggatagggatttttaccgagaagaacttaatcaaattattgcaacacaaaaacaattttataaaaacttgcaagacaaaaaggttttcgaacaatgtgtgaaatcactataccctaaaaataaaaaacaccaagagaccttattgaaaaataaaaatgctattcaacatttattagttgaagatattttattataccaacgtcctttaaaaagtaagaaatctgaaatttcaaattgtaaatatgaaataaaatattggaaaactattgaaaataaagagggtaaaccgattgaagaaatagataaagaaacaggggaaataaaagtacgaaaagaacccatttataataaagttgtttcagcatcacatccatattttcaagaatttagaatatgggataaattacataatttaaagcttatagaagttgaaaaaattgatgaaacaacaggtaaaaaagtaacaaatgtagatgttactaaaacttacatcaaaagtgaagaagattatcaaaagctatttaaaaaattaaataatcagaaatcattaagtcaagaacaactcctaagattttgtaaagataatttcaatcttccatataataaaaaactaggaaattttgtttggaagtttccagaagatgatgaaataaaagggaatgaaacaagagtgagttttgctacgcgttttaaaagatgtggttttagtgaatatttaagttttttaactcaatcaaaagagcttgagctttggcattatttgtattctgtcaattataaagaaagaatttccaacaatcataaaagtttaaaaacattttttaataatttttttaaaggttatgatattgatgaagctgtaaaagaaaaaattattaatgattttgtaaactaccctaaatttgattcgaagtatagtgcttattccgaaaaggctttaaaaaaacttttgccactaatacggctaagcgaaccactaggaaaagataaatgggagaaagaacaatggtatataaaatggaaagaaagtcttttaaaccgaatagaaaaaatacttcaaaaattaaatctattagatttttcttcaaaagaaattgatttttcaaaagttgttgatacaagtgtagatgttcaaaacggagaattaccatttccaaaaggattgtttaatgcttttaaagaatttaaaaataaagaagattttaaaaggttaaacttaactcaagcatcttatttggtttatggacgacattcagaacttgctaaagcaaaatattgggtttctcctgatgatattagaaaacaacttcatcaagaattaaaacaacattcactaaataatccaatagcggagaaagtgcttttagaaatgatgcaagtggtagccgatgtttgggattattatggtagaggaaaacaaaatttcttttcaagaatacatcttgaagtaggaagagagctgaaaatgtcagcaaaaaataaggattcctattcaaaacaaatgtctggtaatcgtagtcaaaacaaacgaattcgacaagttttagaagagtttttagcaattaccccttataatgctattccaaataataaagaccattttgagcgcttaaaaattgtagaagatgctgctgtaacaagaaataattttgataaaaagttctttgaagagaatgaaaaattaaaaaatggaaatattaccaaaaaaaatattgaagatattcttaaaaaagcacatattactaaggaagattttgaaaaatataaactatggatagagcaagggtatcgttctctatattcggggcagataataaagttaactgatttatttaatggtaataaatacaatattgaccatatttttccacaagctttagtcactaataattctttaagtaataaagttgttgttgaggttgagttaaataaattaaaaagcaaccaaaccgctagggcttttattcaagcgagaaatggacaatcgtatctaggaatacctgtttgttctgaagaagaatatgtaaatgttataaatactcaattttctgggacaaaacgttttatccttctttctaaggatattccaaaagaatttactaatagtcaattaaataatgttaggcatattgctcgcaaagcaatggagctgctaagtcatatagtaagagaaaagggggaaattgaattccgctccaaaaatgttttgccagttacaggaaaaataacaacagaattgaaacgagcatggaaattagaccaagtttggactgaattagtagcaccacgttatatgcgtttaaataaacttattcaacctgagttatttagtgatgactctaaagaagataaatcttgtctttttggaagatggcaaatctcaaaatctggtcatcaatattttgattgtaatttagataaaagtattagagaaaaagatgaatcctatgatattaagcgtatagatcatagacatcacgctttagatgcattaatagtagctttgtgtacagaagatcacgtgaattatataaataatatcaacgcaaattcttcatcagataactatggtaaacagaaacaaattgaaaaatatcgtcaaacattaaagagaaaaataatgtttaccaaaaaagatactgaacagaatgaaagaaattggtttttcatgttaccaggtgaatatagggaaaaaggagatgtaaaaaattctcgtagagatacagttgtagagatgacgtatttatacaaaagttttgattcttttggtcaagattataaaaaaatgattttaacagctttacaatatactgttgttactttcaaacaaaaccttagagtaattaataaatctattaataggtacaataatactccaaataaaaataagtttgctgttcaaaataccaatctcggtcaaaaaactaattgggctatacgtagacaaatgagtaaagaaacaatttatggtaaacgtatagttaataatcaagaattaagagtagaaagagaatggttgaatgaaaaatttaaccgagcaaaaattaaaaaaattacagatagaggtattcagcaaatacttaataatcatctaatgcaatttgatactgttaaacttccatttgaagaagctgttaaatataaatatttggatgcagctatcgaaaaacatgaattagaggcaatagtaagtgatacaacaaatgattttaattcaatagaggatttaatagaatatttaaaagagaataaatttaaataccaaaaaacaaactattcaatacttaatgtgtttatagaaaaagtttcccaccgtgattttagagatgaaaaattagaaaatggcaaaaacagatacgaaattgatgagcatccagaaatggcatttacacctgaagccattgaaaaaatgaatgaacctaataatcttaaaaaacttaataaaggtaaagaccataaaccaatatataaagttcaaacattccaaggttttgggaaagaacgaactataagtgaagatgcgttatctgtaaaatcaaaacaatttgtagttacagcagctggatctaatctttatttagggttttatgaaagagtttatcaagatgataatggaaataaagtgagagaaagaaaatttaaagatattggtttaatcgatttaatagaaacattgaaacaagattcatccaatcgtttacatccattaccaaacaaaatttatgataaaaagaaaaatgaatttcaaagaatatttacactttctccattggatttagtttatatcccaacacctgaagaaatagaaaattcaactaaagttgattttcaaaatctatccacagaacaattagatagaatttataaatatgttgatggaggtgaagagatagctaattttgtaccatatagtgtttcaaaaccaatttggagatttcatggtaaaaaaaataaagaaatttataatgaattaaaaattgaaaataaaattaatatatctgaaaaagaccttatacaaaatgaatttggtcttggtagtcaacaaaataaaaatcaaaatatgattgatggtaagacacaagtaaaaaaatattgctggaaactcaaagttgaccgattaggaaacatatcaaaagcctaactcatgatcaaacgcaccttatttttcggcaatccagcctatttaagtacgcgtaacgagcagttggtggtaaattttccggaggatgataagcccgaagctactatccccatagaagatttgggctatgtggtgctggagcatccgcaaattacagtaaccaatggcttgcttatgaaactgttatacaataaaacggctgtgataacttgcgacagacaacatttgcccaacggctttttgcagcctttggtagggcatagtgagcagaccgagcggatgcggtatcaattaaacgccagtgtgccattaaaaaaacaattgtggcaacaaactgttatagccaaaattcataaccaagccaaccactttttagccaggggcaaaaatgcccttaggctaaaacgttatgccaatgcggttaccagtggcgatttgggcaatcaagaagccttggcagcagccttttactttcaaaacctgtttgatatcgaaggctttagtagaaaccaaaagggtatagcacccaacaatttgctcaattatggctatgccatattaagggcggtaacggccagagccttggtaagcagtggcttgttaccttcggtaggcattttccatagcaataaatacaacgccttttgtttagccgatgatgttatggaaccttatcgcccttttgtagatgctgtggtgtacgatattgtagaaactggttgccagattgaagaactgaacaaaaacattaaatcagacctcttaatgattccagccatggatgtggtaatagacggtaagcaaagccccttgatgaatgccatgagccgcaccacggcaagcctgtttgaatgttttgaaggcagccgtagaaaaatactgtacccagaattcataactttataaaaggggagaaggagtataatatgaaaacaaaaaatggaaacctatcttactcgattaaatcaatatagaacgatgtgggttttggtgtttttcgatttaccaacagaaacggtcaccgagcgcaaggttgcatcgcgctttaggaaacgcttgttggatgacggattcaatatgtttcagtttagcatttatatgcgattttgccctagtagggaaaatgccgcagtacatattaagcgcactaaaaacgcattgcccaaaaaaggcaaggtctgtatcatgcagattaccgataaacaatttggtatgatggaactgtttcacggtaaaaaagaagtagaacccgaaacacccaaccaacaattagagcttttctaagagttctattgagtctgtcaaaatcttccagagccttatcaattgtcatactaagcctacctagattgaacctgtcagactgagcctgtcgaaatcctgtcagactgagcttgtcgaaatcctgtcagactgagcctattcaaaccttctagtgttttgctttttgtcagactgagccagtcagactgagcctgtcgaagtcctgtcgaagtcctgtcgaagtccccatcaacccccttacatttcatctccagaaccattcactactcactattcactcctatagataccctatagataccctatggatatcctatggtaaccctattaaagcacacaaaaaatacaaaggccattttgaaaagaatattaaagaaatatttatttaaaaaacggaataataaatgttttaaaaaaacaaaactaaaaggaatatatattatttaaaggcccttcaaactccagatagattaatcctttagaacagagtcattaagaccgagccagtcagactgagcctgtcgaagtattgcctttaatcagactgagcctattcaaacctttagtgttttgctttttgtcagacagagccagtcagactgagcctgtcgaagtcctgtcgaagtcctgtcgaagtcctgtcgaagtcccaccaaagccccaatcaaaaccctaactagaaataaaaaagcaagcgttaagcttaaataacgttttactaggcattaaaaaagtaaaatctaacaatgcagttaaaaaacaggataccagcctattacggcaagtatcctgtgaatcatccataaatttaaagaactgaaagcaattcacaacaatacaacaccattttcttttttatcgaaacctgtgaatcatccataaatttaaagaactgaaagcaattcacaactagcctttaaaaatagcaaattcgctctttcctgtgaatcatccataaatttaaagaactgaaagcaattcacaacctccaacgctgtttaaacactgcaggtacacctgtgaatcatccataaatttaaagaactgaaagcaattcacaactctaaagctgcttgcaaatcggtttggtctcctgtgaatcatccataaatttaaagaactgaaagcaattcacaacgaactgtaataataacactaggagtagtgccctgtgaatcatccataaatttaaagaactgaaagcaattcacaacatacatatctaataataacctaagccctagcctgtgaatcatccataaatttaaagaactgaaagcaattcacaaccatctaattgtgcttttatttctgggttcacctgtgaatcatccataaatttaaagaactgaaagcaattcacaaccaaaaacaataacacattgtattataaaacctgtgaatcatccataaatttaaagaactgaaagcaattcacaacacattgattacctacagctcatggaagtttcctgtgaatcatccataaatttaaagaactgaaagcaattcacaacggaaaaacaattaatctgtttactgttgcacctgtgaatcatccataaatttaaagaactgaaagcaattcacaactcttctaagtctgggtttgtatcaccaccccctgtgaatcatccataaatttaaagaactgaaagcaattcacaactacaaaccaaaagaagaacaaataactactcctgtgaatcatccataaatttaaagaactgaaagcaattcacaactggtgttatttccattaatattcaatgtacctgtgaatcatccataaatttaaagaactgaaagcaattcacaactctggagtttgattgatattaatttctaaacctgtgaatcatccataaatttaaagaactgaaagcaattcacaactgataaagaaaatgataaatacattatagtcctgtgaatcatccataaatttaaagaactgaaagcaattcacaactgtttaatttttgatttatctaatttctttcctgtgaatcatccataaatttaaagaactgaaagcaattcacaacactacagattctattaactttaattggccgcctgtgaatcatccataaatttaaagaactgaaagcaattcacaacttgggcgaattgttgaacaacttaaacaaacctgtgaatcatccataaatttaaagaactgaaagcaattcacaacttgcttttatacttttcacattgggcgcacctgtgaatcatccataaatttaaagaactgaaagcaattcacaacatagataagtaagtaatttttaatttatatcctgtgaatcatccataaatttaaagaactgaaagcaattcacaaccatattcaatgtcatccacttctactgttccctgtgaatcatccataaatttaaagaactgaaagcaattcacaacttgagataattccctccaatacctagcaagcctgtgaatcatccataaatttaaagaactgaaagcaattcacaacgtatgtggtaaaaatgaaaatgataccttacctgtgaatcatccataaatttaaagaactgaaagcaattcacaacttttcattgcatgcacatttaatcattcctcctgtgaatcatccataaatttaaagaactgaaagcaattcacaacatatcaaaatctaaatgtataaaagtcggacctgtgaatcatccataaatttaaagaactgaaagcaattcacaacattaatcaaacttaaaagactaattactctcctgtgaatcatccataaatttaaagaactgaaagcaattcacaacagtacatacttaacacctacataaacatttcctgtgaatcatccataaatttaaagaactgaaagcaattcacaacggacgtaaaagcctttgcgctgaaagcaaacctgtgaatcatccataaatttaaagaactgaaagcaattcacaactaccagcaccgctaggagctgataagtttacctgtgaatcatccataaatttaaagaactgaaagcaattcacaacaataggtgagccttcaaaattttattggggcctgtgaatcatccataaatttaaagaactgaaagcaattcacaacataccgttgctataaagcacttatatacaacctgtgaatcatccataaatttaaagaactgaaagcaattcacaactgccgttacttctgtaccggcaaaattagacctgtgaatcatccataaatttaaagaactgaaagcaattcacaactaataattacggctattttactgaatattacctgtgaatcatccataaatttaaagaactgaaagcaattcacaacatattagggtctgtatcttggtcataaccccctgtgaatcatccataaatttaaagaactgaaagcaattcacaacataatagatatataaatgcacaaaataaagcctgtgaatcatccataaatttaaagaactgaaagcaattcacaacagggctacatttaacgataaaagaaactaccctgtgaatcatccataaatttaaagaactgaaagcaattcacaactaatttgtaaatcgcatatctcaatatagcctgtgaatcatccataaatttaaagaactgaaagcaattcacaaccaatagagtacccatcgccttttattatttcctgtgaatcatccataaatttaaagaactgaaagcaattcacaacaagttccactaataaactatctgtttttaacctgtgaatcatccataaatttaaagaactgaaagcaattcacaacacatcaaaaaagcaggtttaaaagagattgcctgtgaatcatccataaatttaaagaactgaaagcaattcacaacaggcacacctttaattccaaaaacccaattcctgtgaatcatccataaatttaaagaactgaaagcaattcacaactcactaagcagcatttgattaaagtaacttcctgtgaatcatccataaatttaaagaactgaaagcaattcacaaccaagttgctattgtagtgttgttttcatctcctgtgaatcatccataaatttaaagaactgaaagcaattcacaacgattggtaggttgtttaacttactgctaaccctgtgaatcatccataaatttaaagaactgaaagcaattcacaacaagccaggagcaggttgataaaatcgttagcctgtgaatcatccataaatttaaagaactgaaagcaattcacaacaagccaggagcaggttgataaaatcgttagcctgtgaatcatccataaatttaaagaactgaaagcaattcacaacgagggtgttgcaaagatggacgaccttaaacctgtgaatcatccataaatttaaagaactgaaagcaattcacaaccttttggggtgcgcgttaaaaagcctgtgcctgtgaatcatccataaatttaaagaactgaaagcaattcacaacagcgttaaacggtaatattacaagcggtgcctgtgaatcatccataaatttaaagaactgaaagcaattcacaacgaaatagatacaaggctttgcaatcgaacccctgtgaatcatccataaatttaaagaactgaaagcaattcacaacactcggatttagactattttagatgattatcctgtgaatcatccataaatttaaagaactgaaagcaattcacaacaagaactgcatcaattttttacaagacatccctgtgaatcatccataaatttaaagaactgaccgagcgcagcgaccgatgaacacattagtttaaaataggattggtgaataaagcaattcacaacggtcaatgacgtgttaaaaagattttaggcttgcgtatgcagtagtttcctaagatagtatgtcttcacgcacagttcgttctgaagcaaatatcatttcagataaatctatatgtatttcttttcattttttcaagcttttcgtttaaaccgttttgttttaagtgtttttcaaattctgtatgacatggcattataaattcaaactcaataaaaatagcttctggtgatgtttccagattatggttttcgatataataatttgctaactctattaaattcaatgttctatgattttgtatctttgtaattatgactgatttaagtaaaaatccatatttagattctaagggcaacgttgtttcaggaaaggaaattgaattcttgaactggaaccaagaaaccatgcaaaaaaataatccttatgctgataaggatggctcttcattaaaaggtaaattggaccaatattttgaatacctcgaaaaggtttccaagctatatcaagaagatttattaaagcttcctttgcacatccaagagaagttaaaaaacaattctcgtcaatttgcacagcgcatgcagattgaaagcacaggagaaagattttaaatttcttcaagcttgattttataatgtccatctgttcttattatttctattatcttaaatttcgagcccgaccttaataacacctccttttcatttgcaaatgctgataagtgctcaattaacttacctgatttgctttttataataaactgtacgtttccgctaaatgcttttttgataatgaacctgtgaatcatacataaatttaaagaactgactgagcgcagcgaccgatgaacacattagtttaaaatagaatcagtgaataaagcaattactcacggatttaattattgttttaagtgttcgtgaacttcctacgtcagtttcacaacggattaacgttatttcagtaagacttggtttgtggatgcctcataaatttaaagaactgaccgagcgcagcgaccgatgaacacattagtttaaaataagtgttagtgaataaagcaatttacaacatctcattttacttagtgtttagaatcgatcccacgcatcatctgggtttacagtaaaattaattaaaacaaaaattataacatgctattaaataaacggttaattgatatgattgttgatttaataatttaagcttaaaaaggggggaagaaaatcttgttttttcaaaagatatgtttaatatatcttgccagatttccttatctacgggaataccttctttaagatgtttatttcttaattctaaagttttttctcctgggtaatatgtgcgtttaccagtttccataggttccacatcatggctgtattggataatttcattgagtagtttttcttgaagatttgtgtcatggaataatttagggaaaatacttataaatatttgggaaactcctgtttcatatttgttttttccaatttcataggtggaatttcctactgataataatgttgctaacatatctaatgtcatggatagagcagatcctttccagtaaccaataggtaagcctctttcattatctaaaattttttcaggatcattagaaagcttatcattagcatcccaaccaccagggaatggtaatttttctccctttaatttgtagctattaatttttccaaaagcaaactgagacattgccatatctaaaactacgtgaccttcttttctgggaatggatataacaagaggattatttcctaatctgctttcttttcctccccaaggaggcatattaggttgggtattagtgaaagcaatagatatacatccgctattagccgcttgccatccataggttcctccgcgcatccaatggtttgtattgcgaagtgcaaccaatccaattccatgttcttttgaaagggttattgcccgctccatacattttgttgcgttaattattccagcaccaaaatgaccatcccatcgttcaatacaaccgaaggattctgacttttcggcttcagcttttacgttaatgatacctttttctacatatttaataaaatgctttactctattaattccatgagaattaattccgtctaaagtattttctgtatacactttagcaagtgttttggcttttttatctgaaaaatgatgcttcaaaaaaagagtatgtagtactttctccatttcatcgaatttaactttaataggttttgactttatggatttgtgtttaagcattttatatttattttatttatgataagtataataaaaaataaccttagaggtctatatcttttgttttttatagcgtaaatgtattaattcatttattttttagagaattgattatagtttcagtactaattttgtgtaatatattacagggttttacacaatcgtttttatatagttaattaataaaagattaaatcaaattaatagcaataatacagaggcaaacaaaaacacttgcaatgagtatgttaaatgcgggttttgaatctaaatctattaatacagcagcattaaagctcatacaaaatacggttataaggaaaagctctattaatctaattgttttgaaattacaattttgaagagttaccataactgctacacctcctaaacagctttgtcctaaaagtgctacggtttcatatccccactttttttttgaaaattctgttactaaattattataaagtttaggtaatttacttttgtgccctgaatggtttgttgaaatcatttttgaatttttcatttatgtaagggttttattttttttaattgttgttccttttccacatttttattgttatagagcaagtgttttttatgtagtgttgggaaattgtcttttaaagcaaacgaggtggttattaattattttctctatccgtagtttctctcctttaaaaatggtgttgtgtttaagtataacctgaataaattcagttaattaacctcagaaactataaagtgcttcttcaacatttctattatgaaatgttttgttttgtgctagtttggcggctatccacttggcttcgttaacaagttcaccttcaaagttctcatctaaagtcttgtagaataactcaatccaacgaacaaaatattgtctttccattgtaaagttatcatgaaaaggacatacatagccatagttagtatctagtaatattgattgccaaaaatgatacattttttttacctgtttagttctttcttctttagaattattcttgaaaatagatcttaataaatcatctttttctattttagcatgaaaggcatctaccaaaagctttatgtcttccaactgttgtatgtttcgtgtcatttgaggttttatttaagttttgatttaatactacatttcatagtaataataagcttataataaagctataccttactcatgtttttcttttatgtcttaaacagtttgttatagctttaagataatgaaggcttaattatacactttaagtaattaggtattaagacctttttgtcttaaataagattaaaatttttaaaaggacatatgttaatatattaatgcttttttaacttgaaaagatttactgatttgggttattagttttacggcatttcatagagtttttataagaacctaattttaagactttattgaagcacctgtaaaggacggtttgttttcttaataattcctttacgtatcacaaaatctccaaaagtttcctgtttctttttctctttagcataaatgcttattattggttctagttcattgagaatgttctcctctgaaagcatttctttatatagtgaatttaacctatctccattgtgac

SEQ ID NO: 4549 - DNA, 25424 bp, synthetic construct
  source 1..25424: mol_type = other DNA
  misc_feature 1..25424: note = Synthetic
ttctccgaagaccttgacacctacaatcattcccttggtagcaccttggggggtgaaaactgctcttttatgagaaacctttgggccagcaatgccggcaggaatccttccattggctggaacggtatcttcaattttgtcaataacatcatcttcaactggtcccaccggaccactgatggtggcgattacaaggctaaatacaatatcatcaacaactattataaaccagggcccgtgacggatctgagcaggtcggtaagctaccgaatcctcaaaccagaagccggaagaagtgacttggattccatggttttcggaagggcatacgtcgaaggaaacatcgtagaaggcaatgaagaagtcactgggaacaattggaacggtggcgtgcagatggaaggaaaagatggccagctgatgacctatcaggaagcaaagcattacttccctcgaatgaaatccgagaagccttttccgatgccgcacttgacaattatgcctactgaagaggctgtcgagtttgtcacggaaaatgcaggtgccaccttgcctaaaagggatccggtagaccaacgaatcatccgtaccgtcaaaacaggaaaacccgaatatgtaaaaggcctcgatccggaatccttttaccagtttgaacacagaaggcttccaagagatgcttataagaaaggaattatcaccgatatcagccaagtaggcggctatcccgtatacaatggctccccgtatcaggacactgataaggacggtatgcccgacgagtgggaaaataaatacggcctagatcctaatgatcctaccgatgccaatagcgacctcaatggtgacggctataccaatatcgaaaaatacatcaacggaattaaccctaaactaaacgttgattggaccaatctatctaacaatgaagacactttggccaaaaatggactttcagtggataaataaaggttaatgatttcaacaagtcctaaaagagcccggttatgctgggctctttgtatttttacctccgccaaaatcgggaataacggcgcctattgttaaccacttatcactgaattaaaacaattaataaactctttttcattttaataagcgaattatctaatttgctttatgatcaactacttttatttaggaactaccgtttttgttttatacttcctttccctgacaggctatgcccaggatgctccatctggcgaatttcttcttcagaaggtctataatgacaaaatccccttcccgcaagaaacctccacaggagggcaatatgaagtaggcggtacctttcacgtcgatgggacgccatttttggtttcatctgagtacggcgagggctcagtgaccattaacggtgagcaatttgaccacgttttgctcaatttcgatgtggtaaaagaccaactgatcacctaccatccccgaaacttccagcagatcattttggacaacagaaaagtacaggcattccagcttaaaaatggaagaagatttatccagctaccggatataccggggtactcttggcatttcaacggctactatgaagtcctttgggacgaccaagtcaccatcatatccaaacattataaggaagaagagatcaaaagagattttggttcctcagataaatcatttgaatttgaaaatcacgaagatttcttcgtaaagaccgcggatggctatcatcgcattacgcgtaaaaaacatattgaggagtccatgggaattcccaaaaaacaagtcaacaaaattatccgtaaagagggattacgctttaaaaaacagctacgtcaagcactgatagcactgggcaatttttacacttcccaatcaaccaactattaatctatgaggaacaatctacagcagttacttttatgcacggcccttaccctgctttccctccaggcacatggacaggatgtgcagaaggaaaccatttcgggcttattcccaggtgtccgcttttcccaatttgtcaacactgtggaaaacaaaacccactaccgattcttctatcaagacgctgatgtggacaccttgtctgtaaacatcagtgccaaagaaaatgagttagaggatgtcttggatctgattttcgaaaaaactccccttcattactctattgacgaccaacagcgtgtttttatccatcaaatggagcaattccacaccgcattatccaaagatttctttgacccggaacagtctgccgatagccttgcccacacacaggacgaacgcgacctggacagggcctatacgggcaataagctttggatcatcggggaggctgatggtcaggataaccgggatgtcgccacactcagtgggaggatcttcagcctaaagaacggtgaaccgatcatcggcgcagtggtgttcgaaaaacaacaatacaccagggcggtaacagatgaaaatggacgttttagcatcaccttgccaaaaggaaggcacaccctccacgtgcagcatctgggacagtatcaggagcagcgtcaagtggagctattgggtgatggaagcttgttaatgcaaatcgacgaaagcatcgtttcgctggatgaagtcatcgtaagctctgaccgattgtccaatatcaaccgtacagaaatgggcgtggaaacgatgtccatagcgtccatgaaaaggctcccttccgtcatgggtgaagtggatgtcatcaagagtatcctcaccctgcctggcgtaaaaaccgtcggtgaatccagtgtaggatttaatgtccgaggtggtgctgccgatcaaaacctgattttactgaataattccactatctataatccttcccacctttttggatttttctcctccttcaatggtgatatggtggaagaaatagaactgcacaaggccggcatgcccgcccagtatggcggcaggttatcatctgtcctggacgtaaaagggaactacggtaaccgggaaaaattccacggaaagggagggatcggactgctcaccagcagattgacttttgatggcccaattagtgataaaaccaccttcttggtcagtggaagggccacttatagcgactggctcctcaatctggtcaatgagaaatccgacctcaatgctgccagtgcttctttctatgaccttaaccttaacctcaaacattattttaatgataaaaacgaactgagtttttcttcctactggagccaagatgactttaactttgtcgcagacaccctgttcaactacagcaaccgcaatgcaaacctcaactggaagcattattataatgatcggcttgaaagtgaaattatcgtgggcatcgatcaatatgaatttggtatcgaaggatatgaaaatccactgaacgcctatacttttgattttgacatagtgcaatacaacttcaaggcgcatttcacttatgagcacaatgatcagcatacctttcattttggcatggataatatctattatgatatgaatccaggtgatatggtccctttgaccgacgaatccatcataataccagaaacagtaaatagggaaaaggcgctggagacggctttttatctgggagaccgctttgagatcaacgataagctgaccgcagactatggtgtacgatatgtgatctataattttctgggaccaaatcaactctacacctatgcagatggactgcccaaaagcgaagcgacgatcactggagaagagttttatgaaaacaacgaagtcatctctacctattcagctcctgaaataagggtgtctgggcggtatatcattgataatttcacttccatcaaggcaggataccatactacaaggcaatacattcacttactttcaaatacctcttcagccacgcctacagatacatggaagttaagtgatccctatatcaggccccagcaaggcaatcagttttcattgggcttctataaggaccttcttctaaaagatgacaaattagaagcatccgtggaagtgtattaccgcggactcaaaaacctcattgactacagaagtggtgcagaattgctcctgaacaatgacatcgagcaagatgtgctcaataccgacgggcgagcctatggtctggagtttcaggtgaaaaaatccacgggcaggttaaatggatggctgagttataccttctccagatcagcgctgcaaaccgctggtgatgaacctgctgagaaagtcaatggaggcagttggtatcctagtaattttgaccaaccccatgctgtaatgctcgccatgaactatgaactttccaaacgtgccaatgtctcgttaaacaccaattacagcacaggaaggccgataacgcttcctgtcgcaaaattctactataatggagcggaacaagtttacttctccgacagaaatgcctacaggatcccagattatttcagaattgacctgtccatgaacttggaaggcaatcataaagtggacaaacctgcgcacgcctcatggtcacttggggtgtacaacctgctcggaagaagcaacccctactcggtgtattatacacctgtcaatggtaacctcaggggctaccaactatcaatatacgcccagcctattccgtacattacctataatttcaaattctaattggacatgaagataaaccaactcctctattcgctcatcatctcctcgttactgctgaacagttgtcgtgagccctatgatcccgagatcaaccaagaagacctgggtattttagtagtggaagggcatatcgaaactggaggtgaggccaccgtgatcaaactcagcacgacagggtcattaaatgatgttctgacctcatatatccctgtctccaatgcccaagtatttatcgaaagccaatctggagagacttttccactccccagtactgaagaaggcatctacagcgaggcgcattccctctccaatgatcaacagtacaggctgaacattgaagtgccggatcaaggactataccaaagcgattggctgacaccgctcattagtccggagattgaagaagtggggatcaagcgagccgaagatgagcggtcatccgcagaagtatatatctccacacatggtgatgatgaggttcggttttttgcatgggaatatgaagagacgtgggtattcaatcctgaactgatcacctttttgaaatatgatccagcgctggactcgatcgtttaccgggacagccctgaagaacggatcgatcgctgctggcgtaccgaatattccaacaccatcaatatcgcctcttcagcacaataccaagacgaatacatttatgaaaaagtactccaaaacgtcccctttggatcagataaattcacccgtaggtattctatcaacgtacatcaacgggccatctccaaggaagcatttacgttttatgaaatattggacaaaaacaccaatgacatgggagatatcttcagtccgctgccttctaacctgagcacaaacgtacattttcagggcaatggtaatcacaaggccatcggtatggtcacggcgggtgcatccacctccagaagggtctactttgacaggtcggacattggctattggatcgtttctaatcctttttatgcaggctgtgaattgaatagcgacactgtctttttagcagaggtgaccgcaatattttcgagtggcaggactgtaccaatcacttctgtagaaggaatgggctccggaggcatcattggctatcgtagcggaagtagaagatgtgctgactgcacccttaggggcactaatattcaacctgacttttgggaaaattaatttgatgatgagattatttttactgtttttattcggaatattgggatccaacttgctagcgcaacaaacccagcaagtccccttactgccaaaagagatcgtctacgttcacagtggtcaagcgatagctgtggctggagaacggttgccgctgtccatcagcattaccatggaccaagcacctaccaagtcgaattttgcgtatgcggatttgatcagccgatcgggaaaacgctttggtggtgctgtaattccactggaaaatggcaaagcggatgcctatctgaccgtgcctgagaatacaccttcagaccattaccttctaagggtttattcacgctatgccgcatccctaaatgatgctgcccagtaccatcaagaactgattactgtgatcaacccggcagtttctccctcaccaaaaagtccaggaaaatcacttgatggtaatggggactccaacacctcgtccaataccattgccattcaacctgaaagtacacaactcacacttggagagcagtcaagcctgacattgtccgccagtccaaacagccaagtatccatttccatcagcagaaaaaatcctttccttgatggccaacgaattatccaaacatcccctgcaatagacaaagaagccaatactgccgaccttttaccggaactgcgcggccacatcataaaaggtaggctgacagaaaaaaaagctgatactaccaagctatacttcctttctgcccacggtgaccaatcagccctgtatctgggaacggcaaataaacagggggaaatcttttttgacctgggagccctgaaacactacgaatttctgctgctccaatcggatgtggattcagtaccttttggcctgaacttggaactgccttttgcagaagctcctgctggggaaacattggattttccgcaactggaaataagaccagaacataaaacactattggacaatttggtattaagtgccagcaccaccacatacttctacaagccaacacaaaaaagcctgcaacccatagtcaccggctatgctcctgatcgtggctacaacctggatgattataaccgttttgaggatttggccactacactaaaagaatatatgcctacggcattggtccgaaaaaataaaggaaaatatttctttaagctgaccaatatccctgagcattcggtctttgacggcaatccactgattctcgtggacgggatgcccgtcttcgacagtgacaaacttgcccaatttagccctgaaaacatcaaaagggccgaaatcatcaatcgccgcttctatatcctcagctatggctttgatggaatcctgagcttcacctcatacgacaatgattttggggagtaccccattccagaacatgcactttacttagaatatccacaaatccaacagcctgtaaactggcaattcaatccaggcaaaaagagcgaacactttcccgatttcaggtccatattactatatcaagaaaatgttcagttggacaataatggaaaaacaacccttcggttttctgcttcccagataccgggagtgtatgaagtcaaggtaagccaaatcaccccagatggacgacaggtctgggcaacgatggaattggaagtatccgattaagtaaactgtagtaagcggtattgggtatttatcatttagtatgtggtggtattatgtacgacgtatgttgagtgaggaagtggtggggtttggcttagtagaaatcccaccacttttttactatccacgaacagtccagccttcaaacattaaaacctccaacctctaataccctgcagcccaatcatcaccccgtggatcaccagctccttccagtttgccgtctatgcctaccaaaatagcatccacacggccgatgcttcccctctctttgatttggtgccccattttctcaagtgcttttttggtgaatggatccagggcatccctttcaggaaagataaaattgggcttccactggtgatgcacccttccagcggtcaccgcatcggtcatgttcatctgatggtccagtacgttcaagaccacctgatatacagaagtgatgatcgtgcttccaccgggtgttccgaccaccattttaagctttccatctttttccacaatggtaggtgtcatggcactgagcatccgcttttcaggttggatggcattggctttacctccaagcagaccatagacatttgggacgccaggcttactgctgaaatcatccatctcattgttcatcaaaaagcccgctccggaaacgaacaccttggatccataacctgagttgatggtagtagtaacggacacggcatggccattggcatctacgattgagtaatgggtggtctcctcgctttccttatggtttagttgcatggcaagtaccttttcactgtccgtggctttattaggatcaatttgtcttacacgcttggaaatgtattcatcatccaacaattcctcctggggcacgtcccaaaaatcagcatctcccaagtgctttgcccgatccgcatagacccttcgctccatctcggtcatcagatgaatggtttcaggagtatgaaaacccaattcaccaataggaaaatgttcggacatttttaacaactgcatcaaagcaatgcctccactgcttggtggtcccatgctgtaaaccgtcgctcccctgtattttccagtgactggctcacgccacttcgcttcgtatttggccatatcttccagttcgatgatgccattcccggctttcatctctgccaccagtagtgctgctgtcttacctttataaaacccatcgcgtccttcatcctgaatgcgtttgatggtggctgccaagtctttttggaccaataggtctccttcttcccatttgccatccaacttcactaagggaatcactgtactgtcccggttatgttcgatgaatgtgttacggtaccggttgtagttattggcttgctttgcagtaacgggaaagccacttcgggcaagtttataggcaggttgcaacagtttttttaggggcatcgtgccatagcgggcatgggcagtgagcataccgtccaccgaaccgggcacaccggaagccattggcccggccaggctcaaaccatcaatgatatcgccattttcgtcttggtacatttcttcgtaagcggccatcggcgctttttcacgaaaatcaagtgaaaccacttccccgtccggctggcgatacatcataaatcccccgccgcccaggttcccagcagcaggatagaccacggccaatgcaaaatgcacggccaccatcgcgtcaatggcatttcccccttgctccaacacctccactcctactctagtggcctctggatgagcagataccaccatggccttgtcaccatggacggtttttccttcctggtaatcttttcttccgattttggcacagcttgaaatataggccaccaccaaaaataagctgatcactctcaagtaaattcgtttttcagccaactgctgcagtaatttcaagttcataaaggggacttggttttagtttatttgtacgccaattactattatgtaagctaaggcacgtcatacctccgtaatacccacaaaatatcagcaaaaaaagcggatattttgtttccattggtcaaaaaaataggggaaccttacaccatatactaccaaaacttaaaaaatactccattttgggtattttataagaaaaccaaaaccattattttgaggatgaataaaaagaaaagataaatcaataacataaaaaaaggcgagttgccccgccttgaatgttttcacaacggaataatccttattgtgaattgctttcagaaaggcaagatacaaattggaccataataaccaaactacttctcatgaaaattgatagaaaagaatttttaaaggcatacgaaaatattgttttgccgaatttgatggatgccgaagccaaattagaaaggcgagtcacgcataaccaatcactttataaagtcaacgttggcatttggacagacttggttgtgaatccccctacagcaagtgaccttcccctaagtgatcagcccgctgatgatacagatgacattaatagaagaagaacaatctatgatattaaagtaagataggatgaaaagaatattaggacttgatttaggaacaaacagtattggctgggcaatggttgaaataaaccacaaaaaaggaactctaaaaattttagggctaggctcacggatattaccaatggatgccacagaaattaaggactttgaaagcagtggtaaaataaaaagtaccgcagcacaaagaacagaaaaaagaggttcaagacgtttaaatgagcgctatttactaaggagagatagattgcatttgattcttgacttgcttgatgcacttcctaaacactataaacttgaaattgattttaccaattcaaaaggtgagaagtgcggacagtttaagccaaacaaagaaccaaaacttgcctatttgcctaagcaaaagggtaaaaaagcagaattcctctttatggattcatataaagaaatgcttgatgatattggaaatgaagaaataaaaaatgagaacggtaagcggattccttacgattggactttgtattatttgcgacaaaaagcactttccgagaaaatagctttagaagaactggcttggattcttttaagctacaatcaaaagagaggctatgaaaaaactgaagtagaggataaatccacaaaggaaggtgaaatagttgaggaacttgatttacgagtaaaagaagttatttctaagagaactgaagaaggaaagcaattctatgaagttcatttagacggaaatgacagttttatttataatgagtattcggatattcaaatgacctttaaagatgatttaaaagaggtaataaaaacatctaaagttgacgaacagggtaatacagatgataaaaaatcagaatttaaggtcgttgatatttatcctctaaagataatgaaggttaattataaaaaagagagcaggaaacataagtacacattgaaatatcataatggttgggaagaaaataaacctcccagggagaactatactttcaattacaacaatgcaattaataagttctacgactatattatagaaacagtttatgataatactggaaaccttaaaactcaacaaggaaaagagagaaaactaagagaaccggatttaaacgataattcaagtgattggactttaatgaaaaagaaaacagaaaaagaagcattgaaatttaatagtttgaatggctatttggatgaaagagataatgtaaaaaattacatatctcccaagatatacaatgttttaaaaaacgatgccaaaactggcaatcgtaccaaaatcattggtggaatatttcaagtggtggatagaaccttttattgtgaagaactcaaccaaatcatttgtacacaaaagaagtttcactccagtctagaagataaaaaagtgtttgaacaatgtgtaaaaacattatatcccaaaaataaaagccaccaagagtctttattaaaaaacaaagatgccattcagcatttattggtagatgatgttttgctgtatcaaagaccattgaaaagcaagaaatcagagattgccaactgtaaatatgagatacgctattggaaaaatattgaagataaaaacggcaatcctattgaaaacgttgatttagaaacaggagagttgaaagtaaaaaaggagcctgtttatattaaagtggtttctgcatcacatccttattttcaggaattcaggatttgggataaactgcataatttaaggttgattcaacttgaaaaggaagttgatggaaggttattaaccaatcaggatgttacgaaagagttttttaaaagtgaaaaagaatatcaagagctttttgaaatgttgaacaaccgaaaatctttaaatcaagaccaattccttacttattgtaaaaagaaatttaatattgattaccagaaaaaagacagtaattacgcttggaattttccagatgatgaagaaataaaaggtaacgaaacgagggtgagttttgtcacacgttttaagcgatggggatttaaggaatatgccgattttcttacgcaagaaaaagaaaaggagttatggcattatttgtattcagtcagctataaagaacgaacggcaaatgacaataagagtgcctctacttttttcaataactattttaaagatttcaacattgacaatgaaattaaagaaaaaatcatcaaggactttattaattatccaatgtacacttcaagaaattgtgcatattctgaaaaagcactaaaaaaattaattccaataattcaaaaaggcaataaagacaaaaaatatacttgggaaaatgaggtttggcataagaagtggaaatcgacacttgaaaaaagaaagtcagaaatactaaacagactaagtaagataaattttgagctacaggatgatgagaaagttgattattccaaagtggtcgtaactaatgttgatttacaaaaaggtgaaattccatttccaaaaggcttgttcaatacttttagggaatttgaaaaagtagaagcttttaaagacctaaaccttacacaagcctcgtatttggtttatggtcgtcattcggaattgccacaagccaaatattggacatcgcctgaaaaaatcagaaaacagcttcaccaagaactaaaacaacactctttaaataatcctgttgccgaaaaagtcatattggaaatgatgcaggtagtggctgatatatgggattattatggagaaagggaagaagggtcagacaaccctaacaaactgtttgaccgtattcatttggaagtcggaagagaattgaaaaaatctgccaaagaaaaagaagctgaatccaaacgaatgtcaggaaatcgtgcccaaaacaaacgaatccgacaagtgttagaggaatttttaatgcataatccatacaatgctaatccaaataacaaagaccattttgagcgattgaaaattgtcgaggaaggtgcggaagatagaaataatttggacaagaatttttttgaagagaatgaagaactgagaaaagaaaatatcactaaaaaagatattgaaactattctcaaaaagccacaaattactataggtgattttgagaaatataaactttggatagaacagggataccgttctccttattcgggacagataataaagataacagagttgtttgatggtaaaaaatacaacatcgaccatattttcccccaagcatctataacgaataattcattgagcaataaagttgttgttgaagtagaattaaataagctgaaaagtaataaaactgcaagagtctttattcaatcccaaaatgggcagccttacttaggtattcctgtctgtacagaagaagattatataagtattgttaaaacccaattctcaggcacaaaacgatacattctactttctaaagacattccaaaaggatttatcaacagtcaaatgaataatgctcgccacattgcccgaaaagcaatggagttgttaagccacattgtgagagaaccaggagaagtagaattccgctccaaaaatgtacttccggttacaggtagggttacaactgaactaaaaagagcttggaagcttgaccaagtttggagagagttagttgctccacgattcattcggatgaatgaattaactcaatccaatttattcggagactggcagatttcaaaaaacgggcaagagtattttgattgtaatctggacgaaagtattcgggaaaaagatgagtcttatgatatcaaacgtattgaccatcgccaccacgctttagatgctttaattgtagcattgtgtacggaagaacattttcactatttaagcaacatcaatgccgataaaaaattgaatgattttggtaagcagaaaaagttagaggactacagattgaaactaaaacgaaaaattaagtttacaataaaagatgacgaaacagatgaaaaaaactggcgttttatgttaccgggagaagtccgtaaagcagacacggaaaattccaggagggactctgttttagaaatggattaccaacacaaagagttcttttcgtttgggcaaaactataaaaaaatgattcttacgactttgcagggcactatagtcacgttcaaacaaaacctacgggtcattaacaatagagtaaattattaccaagcagaaccaaacacaaaaaagagaaaaatacaagaacccaagacacaaaaagagattgtaaattcaaacaataaatacaattggggaatccgaagaagtttaggggaagcgacttactatggaaagaaaatagtaaacggggaagacaaggcaacaatcagaaaagatttggatacattctttaacagtgagaaaattaagactatttcagatagtgcaggtcgtgtaaaatctattctattgaaccagttaaagcgtttcgacactattaaacttccttttgaaaacgctgttaattaccttgattttctatttgagaaacaagaattcggagctattataagcgataatgaaaatgaatttcaatctattgatgatttaatagcccatttacgagaaaacaaattcaaatataaaaatacagattattcagagttgaatgtttttatagatggaatttccgaacgggattttagaaacgaaaaacagtttgaaggtaaaatcaaagaacaccctgatattgcatttacacccgaagcgattggggaaatgaataaacctgaaaatctccgaaaattgaacaatggaaaagaccacaagccaatacataaagtaaaggtttcacgaggttttggaaaacgtagagccttaaatgaagaaaatgagaattcgattaaatcaaaacagtatgtggtaaatgatgcagggtcgaacctttatcttggcttttatgctcgaacctatcaagaggacaacggcaataaactggtagaaagaaaatttaaggatgttggtcttattgaattaattgaaacactaaaacaagatgtgactaaacgattaaatcccctaccaaataaaatttatgatgacaaattaaacgaatacagttgggaatttacattatcgcccttggacttagtatatgtaccaactgatgaagaaattgaaaatcctggaaaagttgattttaataatctaacaaatgaacaggtagataggatatataaatatgttgatggtaatagagatatagccaactttgtcccttactctagttcaaaacccatttggagattccatggaaaaaagaacaaggaaatctttaaagaattaaatgacaatgataaaattaatatttctgaaaaaaagttgatccagaatgaatttggacttggtagtcagcaaaataagaatcaaaatatgattgatggtaaaacccagataaaaaaaatatgctggaaactaaaagtggacaggttagggaatatttcaaaagattaaaaaatgatcaagcgcactcttttcttcggcaatcccgcctacctcagcaccaaaaatgagcaactggtcgtctgctttcctgatgaccagcctaagaaaagtgtacccatagaggacattggcatggtggtgctggaacatccccagctcaccatcaccaatggtcttatgggaaaattggtcaataataaagtggcaatcgtctcctgcaatggtcagcaccttcccgatggcatactcctccccttgcacggacacacggagcagaccgaacggatcagacaccaattaggtgccagccaaccgctcaaaaagaacctttggcagcaaactgtcgctgctaaaatcagcaatcagggcgcactgttggccgagcgggaaatccccgtccaaaaactcaaacatttggcaaaatccgtacagtccggtgataccggaaataatgaggcccaggcggcagcctattattggcaacatatctttgacattccggattttaaccgggagcaaaaaggtatccctcccaataacctgctgaactacggctatgccattttacgaggaatcatcgcccgggcgctggtcagttccggtctgctgcccatggtgggcatctggcaccgtaataaatacaacgcttactgcctggcagatgatatcatggagccataccggccatttgtggacatggtggtaaggcatatcgtcgaaaccgacgatcagtatgaggagctgaatatccatctcaaaaaggaattgctttccattcctgcgttggatgtccggatagatgggcaaaaaagccctttaatggtggccgccagcaggacgaccaattcgctgtttgagtgttttgccggcattagcagaaagatcatttatcccgaatatggatgaacgcttttattccagacttaaccaataccggagtttgtgggtactagtattctttgacctgcccaccgacaccaaaaaagatcggaaaatcgccagtggctttagaaagaagctgctggacgacggattttccatgttccagttttcgatctacatgcgcttttgtgccagtcgcgaaaatgccgatgtccatatcaaaagggtcagaaagaacctgcctcccaagggaaaagtgggcatcatgtgcatcacggacaagcagtttggcatgatggaactcttctatggtactaaagtggccgaaaaagaaacgccaagccagcaattggagcttttttagactttaaaatttagctattgtattataagggggcaaggggaaagttggggataattttttatggaacactgatcacactgatagggcagatttttatggatcaatggatattctggatgatactgacccctctccggggatattgacccctctaaaagttggtttggtcctgtgaatccaatggtatgacaattttacattttttttcttagactttcacctttaagttcgattctgtatgatgagtgtaccaatctgtcaagaatagcgtcggcaattgtttcttctccaatcacctcataccagctggatacgggcaattggcttgcgatgatggtggatttcttcccgtgccggtcctcaatgagctccataaagtccatctgatgctgtttttccagatgtgtgagcccaaaatcatccatgatgagcaggtcggcttttgccaacttgtcaaagaacttgatagcggtgccttccagccttaccatcttggttttgagcatcagtttctgggtattaaaataggcggccttgaacccttggatacaggcctggtgtcccagtgcggatgcgaggtaacttttaccacagccggtggcccctgttatcagcaccgattcccctttggtgatgtagtctccggtggacagggatgccagcaccatatcgtccaaccccctggttttatcaagcttgagttcttccagggaggccttatacctgaatccggcattggactccagccttctgaacctcctgttgtccctttcctgctcctcggcctggagcatcatctcaaggccttctgtcaacgtgaggttttgggttttgcgggtttccttcagggctgtccatgttttggacatgccgtgcagtttaagcctggtcatttgtgcttcgatctgattcatattcattaagtgttaaaattggagtttctgttggtcgtaatattccttgccccggacattgtcgtgtttgggcagggctttttgtgtagtatcgggctgttcataggccatgttgttttcaaggatgttcctgataaacccataagaatagacctggtgatccatggctattttgcaggccctgtcaaaggtatccgggtcggacttcctgcttaaggccagtaagccatcacaggttctgtaaagctgctcgggataccggttctgctcaaacagcaaggatacatattgataaagaactgctgattttttacgggcaagctcccggtagtattcagggctcctatccctgtaatgcctgtgctgggaacacagatggtcttcaacggtagaatagccgcccttggtgcttctggcatggacggctacctttttaccttcatggtacacatagaacatagacctggtgtagactaccttcactttcttgccaataagggtatacgggacactgtaatattgcttgtcccttgccaggtaaacatggttgttttttgccacagtcagcaaggcatggtaccgtagctcaaaccggtcctcgggaagttttcccaacaggggtttttcatcggccaaaaacttctcttcccggcagtagggcttgcgctgcatccgtgtctggttatgtgccctgatccgcattttaatggcctggttgagtgcataaaggtcaaagaactgcatgttcctcagcttggcatatactctggagtagagcatgttgacctggttctcgaccagggccttgtcctgaggctttctgacccttgccggcaggacagccgtaccgtaatgattggcaaagtcttccagtgcccggttgatatccggttcgtacttgtcggccttgttcactgctgacttcaggttgtcagggaccagcagggaagggactccgcccaaatgttccaggcagcaggccagggcatggagaaaatcagctatacgctggctgggcacggccatggcaaaagcatagtccgaacagggcaggcaggccacaaaaaactggcaggaaatgacttctccggtttcccggtctatgtagtcaatcgttttgccggcaaaatcaatataaagcttttccccgggctgatgatcaagtaccatagttggttttgatcgggcaagatcatgctggtcaaggtgatggcagaactgtgagtagctgtaaccatccggatgggactgtctgtattcttcccataaaagtgccctggtaaccccggtacgcttcagctctttacgaaaatattcaagacgcattttaaaatgatcgtaccggggatccttataggaagggttgccaggatggaaacgggaatggatctccggctcttcaagggcgagcagatcatctatggttaggctcgtacctgtctgccccagcagcttttccagcttgaccaggtaggcttttacggtattcttgctcatgccaagcattcgggcaatggtcttgatccctttgccctgcttgttgagaatgatcaattgttttatctgactcattggttttggttttcctgccattggatcacggttagtggtatataaatcatccgctaaaaaaccaaaaccagcattatgagggggcaatatgttccggaatctgacaacagaggggtcaatatgctccggaattattgctgaaatattactttagggggtcagcatccgccggaatggcagttgaaaacagccgcttaagccacttttcaacctccggttcattcccggatcatggggtcaacatgctccggaatatccagatcaagcaatatttctgggggcgggagaagatttatattcatttggtatgtcgccacgaagtcgccaagacacgaagtttttttgtaggcggattccaaatttcatggaaaacaaacagctttgggtcttggaatctttgtggcaaaaaaacaaaaaagaaatcctattaaaataaagggattcatgccctcaactttttcgcttgcctcctttttagcacattttgagggccaagcaatatttctggaagatgagagatttccaggtggttttggtaagcatatttctctttcatttagcaataggaatgtgtagattataaaatcagtataaatccgtcattgcgaatgcagagcaacggagtgaagcaatctcgttttcttaatacgggattgccacgttcccgatagctcgggacaggctatacttcctcgcaaggacggtattttaaatcgcgtttattataaaaaatcagcgcaaatcttattaatctgcatcatttgcgtgctatcgaaaccaaccctaatccccccaacttttccgcttgatccatttttattgctgtcaccaagggtgcgggagcaaaaggaatctccgcatcaataaattttggagcgaatcaggtaatgggccatatacacttcaaacaacagaaatttacaataaatatttccgcatcgctcacaaaatttctctatcaaaacaggctcatttttcaatcccaaaaaaccacataaacaacagcataccaaccacttgaagtggggtatgctgtgattaccattgcaaggtataagtctgaaagcaattcacaactaattgggaattaatactgaaaccaatggtgctgtgattaccattgcaaggtataagtctgaaagcaattcacaaccgatattgttttcatcttttaaatgattcagctgtgattaccattgcaaggtataagtctgaaagcaattcacaacgccgctaacactttcaattcatatggacatgctgtgattaccattgcaaggtataagtctgaaagcaattcacaactgatattgttttcatcttttaaatgattctgctgtgattaccattgcaaggtataagtctgaaagcaattcacaactacgccagaaatggtaaaatggcatcgtgcgctgtgattaccattgcaaggtataagtctgaaagcaattcacaacaacagggagttatgataatgttttctttgagctgtgattaccattgcaaggtataagtctgaaagcaattcacaacaaggagtttatagaggttgattggcaacaggctgtgattaccattgcaaggtataagtctgaaagcaattcacaacgcatgtgtttcaaaagatacatgttaggaggctgtgattaccattgcaaggtataagtctgaaagcaattcacaactgctgaatttttcaatctgactcactgatagctgtgattaccattgcaaggtataagtctgaaagcaattcacaacatggcgctactatcgcatatactctcaagtgctgtgattaccattgcaaggtataagtctgaaagcaattcacaacagtagctctatttttcttctgattctatcggctgtgattaccattgcaaggtataagtctgaaagcaattcacaacacacaactggaaaaagagtatccatccgatcaacccatataggtcaagctaggaatatttaagttttttatttaggtcggtactgcttccagttggaagggaggagctgataaaggtctttttgtttatggctttgtattctttcaaagacatctttgagccattcaaactcgttaacattgttctttttgcagctggccataaaggaatacatggctgcggtcatctctgcggcttggtgcgatccggcaaaaaggaaggcttttctgccgattgccaagggccggacagcattttccacaagattattatccagctccatctgtccgtgaagcgtataggcacttaaccccgcccacctggagcgggcatagtctatagccttgcccagcgggcttcccggcctgtacctgtattggttttcctccaaccacttcccaagtctttccagtacgggcacggcatggattttcctttcccgcgtccgcccctcccagtccagggcttcttccctcatccgttgttcgagtgcatagagctgctgtatctcatccagaacatggtttgcctgctcggcataatccttgaccgcatcgacaaagtaccttcgcgcatgggccatacagaaagtcaaatggatatcaggatggttcccatagagagaatcatagactttccacccatcggtctggatgatacccttaaaatcagtaagcatttctttggggccggatctgtcccttccctttctgtaatcaaagagcaccaatctgtccaccggggcatggtatagccacatgtatcctttatggataccgtttttatggtccctgtccaggacttttatcggggtctcatcgacttggaggtacttttgactgatgaccaccagactgagtagctcccagagaggcctgagctgttcccaacctctcattacccagtctgaggcgcttgaggcaggtatccgtacgcccattttactgtacttgtcaatctgcctgtgcaggggcatcccgtagacatatttgtcgacagtaagctgggcgattaccgattcggaaggtatacctttttcaattaccctgtccggcaaggtgccgatgatgatcccttcaccgtttggcctggcatattttgggcgtatataccgctttacatagaaacaggcaggaacaacctccaatacctcggtaatctcctcaccgatcctcacacagccttcggtagattcggccggttcgatcacgatctcttctctttcaagttcttcgggaaggctcatacggcccgtacccttggcccttttcttcggtgcaggcttctgttcctgcacggataccgattctgagagctcctcctgtactgctttggtggtgcccagttcaaaaatccccagctggttctggtcggtactgcccgtccgtttctcgcttttggtgccaaaaatatacctgcggagtttgtccagttccgactgtaggtcggcgatggcgtcttctttttcggacacggtcaacaaggcttcttcatacagttttttgtagtcggttcccttgttttccatagcgtaaaaataagctaaaaaagtggctatacagctatgtaggagctgtttttttacgtcaaaaacaattgtttttttaccccctttttgagctgtcatagcgccttctgtagctcaccgaatcgagcattaccccctgtaagagcagggtcagctgaccgcccgagatcatgtttcccgcaagcttgggccgctcaaaagtgccctgttccagctttttgatatacagggcaaaaccgtccctgtcccattggagaagccgcacctggttggaccgcttgcctatgaagatgaagatgtccccgttcatcggatcaaacccaagttcattttgcaccaggccggccagcgagttgatcccaaagcgcatgtcggtcggctgaccgtaaagaaaataccggaccgagttggacaaggccagcattactcggtcagctgcctgagtatcgctggatcaggcaggccataaaactccaaaacgacccccgaaggataacatatccttgccgcaggattttggccagtccgcggggatatctccagtaggtcaaagccagcgtgtcccggagatacctccatccgtccaatcttcctggcccaataataaaaggtgctgcgcgaaaggtcccgtgattcggcaaacttggcctttgtctgtcccgaggatttccattcctcatacagtacgtagtaatcttcgctgcttaaacttttcatcctgcaacattaacactttgcaacatgataggaaatatggacttgctcggatggatacgaaaaagaaacactgaaaaatgctgtgattaccattgcaaggtataagtctgaaagcaattcacaactttttaaatgtttaaagtttaaaaattgtagctgtgattaccattgcaaggtataagtctgaaagcaattcacaactgccgaaatcttaaccgttcccgcatcgttgctgtgattaccattgcaaggtataagtctgaaagcaattcacaacgacgcgttgaataaattaaattctagttttgctgtgattaccattgcaaggtataagtctgaaagcaattcacaacataggctcctgctgtgggctggatgccctcgctgtgattaccattgcaaggtataagtattcgtggactttggctttccgctgacgccaaacatacattagggtatttctatggattggtccctgtggattttccgccttccaaagatttcactgatgcggaaatcaaacaagctgtgaagccttctaaaaaatgcttgcttcatggggtggcatccttgatactcccaatagcttacccattagtgagaaatacagccttatcataggattacttgaagaaacatttaccccaatagacaatggcgtctttgtgtttgattggtgtaccgggcacgcgcctgattgccaactgggaaaatattgcaagtgtttggaattttggaaaggggaacagtaaataattgaaatttcccttgaaggtcaaaacgttagaaaatccctgttatttccgcgcatacctatccactgcaaacgcgtccatctttagctctcccagctttccgattttgaggtcggccaagagcttaccggtggcaggtgccaggctgacccccatcatactgtgccctgctccaaaggctacattttcccagcccggtgcttttccaatatacggcaatccatccggagagcatgggcgcatgcccttccaaatgctatcctgtgccggaaattcagctttaaattccggataataagcttttatcgattcgaaaataccttggacacgacggatgttcaccatgtccacatgattggaaatttccatagtgcccccaaaacggacctttccgccatagggactttgggaaaccctggcttctgtcaggatacttgcctgcttcagctctggcgtattgggcagctcgaaactgtatccctttcctcccatcatcggcaacctgaaacccagcatttttgcaacctcacctgaccaagagcctgcacagaccatcagatgatcgcaatcaatctttcctccttcagttatgacagccttgatttttctcccattcttttcgaccccagtgatggtaacattactttttagcatgaccccttgttcttggaggtgtgttttgagcagccggtagagatcccttggggaaagatgggcatcatcagggaaatacaccccacccctgacatccacttcttggttgggctccaatttcccaatatcctctttgctaaggatttccgcattgagaccactttctcgggccaggttcgccagtgctgcctcatccttttcgccttccttggttttatacagcatcaacaacccacggtcttgtaattttatggcctcatttccatgttccgctacaaaatccaggtaaagttgcttgctgtacaggctgattcccttgaggtaaggaatcgattgctgtacatgtttggcattggaatggcggtaaaactgcaggcaccaatcaatcaaccgtctatccaatcgcggctggatataaaaagggctcttggacgaaaacatccaggaaacccccttagagatcatgccaggtgatgccaagggcacaatatggctgggcacgatcattccggcattgcccgtagagcagttttcctccatgtctcccttgtccaccacgatcacttcctctccttgctgctggagaaaataagccgtaaagagccctaccacgccccctcctattaccaccgttggtttcatattgttttgtcgaattgttttattgtcga

SEQ ID NO: 4550 - DNA, 25343 bp, synthetic construct
  misc_feature 1..25343: note = Synthetic
  source 1..25343: mol_type = other DNA
agaatcgtgctggggacttacatctacatcatgaaaaacctctaacacttcatattctgaaaaggcaccttctgtaattgggaaatattcaaaaccaaaatccacgatctccgactccttacaagcgagcattgcaaaaagtatagcactcaagagaattgtcttattcattagattttctttacaattacagctcttctaaattaaatcatttattaggattaatcccttctttctttaatttttcaagatattctgaaagctcgtccccttctagctgtgttccatctttaaaataaatacgaccaagctcttttccagactcatcataggttacccaccatccatgcttcgttttgtttttccagcgttctttgatcatgatttttccattcggatgattctttaaaattacaccgtctggttttccatcataatatttcccttctgctttaacaattccatcaggaaaatattcgacaaaatcgccctgctgctttccattgacgtaatttgactttctcagtacaagtttaactctattgtcctcaacggcttcagcgccataataagtaatgcgctcaccatggagcacaccatttttatacgtttctgtataactgtaatgacctgaagttaaaaaatgtgtccatacactatctttttccttaccgcgataaattccgtgggcgattaactcactacttggatggtaaaaataagcctcagatcgatcgctgttttcatcgtgagttatgatagaacggattttgttatttggataataataaataaactttccaactggtttgtcatttttaaactgacctttgtagcgcaagccatcagagtcatcgtaagtttttgcccactccccttgctttcgcccttgcgcatccacttggttaatctgagaaaatgaaaaaacgctcaaactcaacatgagtgtcaaactaattaccgttgttctaagatttaagtacatctgcaaattcttttagattatttactttaatatccggcttaatatctactttttcggccgaatgaatgagaacagttttcatagctagattcattccaaatttcagatctgaagcggtatctcccaccattacggacttcgaaaaatctatttctgggaacatttctttcgcttctaaagccatggcactattgggttttctcctatccttttgagctccccttaaattgctagcaaaaaacacatgatcgatacttacattttcagacaacaatgaagaagtcatataatggtgtatttcctccagcgcagctagcgacatgctccctttgccaaccccttgttgattagtaacgacaataattctagaaaattgtttagctagttctttcaacccttcctttgcataaggtaaaaaattgaaatcttccacagaagtaatgtacccctcaaaattgcgttcattaattaccccgtcacgatctaaaaaaagcgtccaagaagcatctattttaagttcactcatttatatttccgtttcaataagataagcatttctagaagaagagttcctgccgatcagctcagcgataaaacccgcaagaaaaaattgactaccgataatcatggctgtcaaagcaatataaaactcagttctttgagcgattaaaggtgaaggatgatcagagaagagacttactattttgtcaattcctaagtataatgcaaatgcaaatcctataacgaaaagcaaagttcctattgctccaaaaaagtgcattggttttttaccaaactttcctataaaaaccacagaaagcaaatctaaaggaccattcataaaacggttcaatccaaattttgtagtaccaaatttacgcgcttgatgctgtactactttttcgccaattttattaaaccctgcatatttggccaatgctggaatatacctgtgcatatctccataaatctctatactttttacgactatagatcgataggcttttaatccacaattgaagtcatgtagataaatcccagttaattttcgtgctgtccaattgtataatttagtaggaatggtcttagataaagggtcaaatctttttttcttccaccctgaaatcatatcaaaatcttcctcctttatcatgcggatcatttctggaatctcttctggcgagtcctgtaaatccgcatccatcgtaatcacgaaatctccaaccactgcttcaaaccctttctgaagtgcggcagatttaccataatttctttgaaatttaattcctctcacacctgggtctttgagttgaaggttttctacaacctgccatgagccatccttacttccatcatcaacaaagataatttcataagtaaagttgtgtttttgcattacagatacaatccattcatgcagttctggtagtgattctacttcgttataaagtggaacaacaatagatatttcgatttttttatccatgagtgaacaaatataaaaatttcttcttcttcaaagtaaaatcattagataacttaaaataagatatggttatcctatgccataacaattctacataatacaagtaagtatataaaaaatgcctatccgatactttaccagtaaatacatctaatcaatgatgtgattaagcggtgaaccggcaagatccttcgcaaatttctattttcaacaaattgaaaaagaaattttcttcaggatgacattaggccaggggcatatctcaaagtagaggaaaaaacaaaagcgcgagagcgcttttgttttttcctctactttgccccaccaatccccaaaactgccatcctgaccattgttgaaaattatgattttcaacaatggaaggatcttgtcaatttttagagaaaaccgctttctactgtaatttattaaactgctggtaaagttcccgacaagcgttatgtaaaaaaacaagactttaaagttaaatcaatatttaactttaatcaaaaagagatctcagagtcgtttaactccttcggatgacaggtgttatacattattgattggggaaagtcgctaaagcaactttcctcccctaaccaacctatcgattgtcatccctaaaataccgcgtcttgaggaatctcttttgttgaatggatcaattttcaataagtcacattaaactaaactcaaagttttaaattggaattagtggtaaccctaagtggaaccaacaaataagatgaatgatttccataaaggttaaaaaatgacatatttaaatttttcatcagcactttaatacgtagcaagagtaaattccaaaaaaacaatatatcttgcagcctattaaacaataatttacaattgtcactcttatgaaaaacttcattcttacccccttatttacttgcctaatcttcactacatcagtttgggcacagtttgaaaacgccatcagcaaccaagtaatggtgcgcatgcaaaaaggacagaacccgaagaccataatgaacagcctacctgtacattttgaattgaccattgaaagcttactctctcaacatgctgacatttggctgttcaatttcaatgacgaacaaacaaatctgagcgaggttttatcattattagaaagacagccacccattttatatgttcaagcgaatagaaaagttgaattaagagctacacctaacgatccacttttcggaaatcaatggcaccataacaacatcgattcgcaattagcttgggacattaccacaggtggaaccacacccaatggtaaagaaatcgtagtagccttaatagaaagtgcagatttaataaaccacagtgacttacaagccaatcaatgggtaaatacaggcgaaataccaaacaatggaattgatgacgatggaaatggatatgtagatgactacaacggatggaatgtttcgagtaatgacgataatattggagcaggctcacatggaacaagttgtgccggaatgatgggagccaaaggaaacaacgatcttggtgtaactggaataaattgggaccttaaaatcatggatatcgctggatatgctaacccttttactgaagccaatattgtcgcatcctatgactacgctctaaacgcacgtttactttggaatcaaaccaatggtgctcgaggagcttttgttgttgccaccagttcctcttggggaattgacggtggaaatccagcaaattacccaatttggtgcagtttttatgatgatttaggtcaggccggaattctcaatgttggcgctaccacaaaccaaaatcaagatgtagatacttttggagatgtgccaactacttgtgcaagtgattatatggtaagtgttaccgcaaccaacagctctgatgttattgattttgctggatatggtgaccaaacaatcgatttagcagctccgggttctaacatttatactaccgcacagaacaactcttattcttctacatcaggtacttcttttgcttgtccgctaaccgcaggattaattggattaatgtacagtataccgtgttctagtcttgaacaagcagcaatgacaaatccacaagccacgacagacatggtaagacaagctttgtttaacggcgttgatcagacaccacatttacaatcaaaaacaattactggaggaagaataaatgctaaaaactctattgatcttttaatgacttctatatgtagttcatgtatgcctccaaatattattaacacagaaacagtatatgattatagtgcagatatttctttcaatgaaacagatccactcaacgattacagggtgaatattcaagtggctggttcaggaaattggtcaaattacaccattacagatactagccatactttcactggattaacaagctgtacaacttatgaatacactgtttcttcaatttgtgatggtgaaataagcaacacttcaataatcaatacattcacaacttcaggatgtggcagctgtgttgatttaccttattgtgcgacaggaacaaatgcaaatccaacatctacatttacagttcattctcctgcatctattagtggtagctacacttaccaagcaacgagtaattggggtggaaatgtagaaaatggttatgtttttggagaattagttttggtggacgacggatccgcaaattcttcagaaggctgtaatctattgatcaacaataccgaaattaatggaaatattgccgttgttcaaagaggaagttgcaactttactgttaaagcaatgaacgcccaaaatgcaggtgctactgccctaatcgtgatcaacaatgttgcaggaacgatggatatggggggaacaaataacaatgttactattcccgcagtaatgatttctcaatcggatggaaatactttattggcaagtatcaataatggagaacaaccactagctttattaggagttcaaaatgaatggatagaagaatttcaaatcgctggaaatacatttacaagtggtgatgatgatggatatggctttaattcaaattcatttgttttatcgtcaggacaaaactattctttcacattaacacctggatttgacggtcaagctttagatcaatacagtagaatttgggtagacttagaccaaaacggtattttcaatagttcagaattactttatgaccaaggaaatgcaaattcaggaactgtaaatgatataatctctattccagccaatgcattacttggaaaaacaagaatgagagttcaaatggcttatcaaggttttggttcttcagcattacccaatgtctgtggtaattttacttctggcgaaattgaagattattgtatagaaattaaaacaaatgtttcttgtaatttcactgttacgtccacttttagtaatccaacatgtaacgaaattcaagatggagcaatcacactaaatgtttccggtggaactccaggatacacctacacttggaataacggaatgacgaatgccagcatagccaatctcaacacgaataattattccgtaatcatcgaagatctttctggatgcgacactactctgttcttcccattggtttatgacacacaattatcattaatcgaaactataaatccgccgtcatgtccgggcagtcttgacggttcaattacggcgattgcttcaggaggaaccaactttagttatcaatggaataacggaccaaactcaagtacttggaacaatgtaggggctggaaatcatcaagtaacagcgacagataacaatggttgcaaaatcacaaaaggatatactattttagatcctatcgtagctgaacctctcccaaatttcactactgacaatttctatttaatgatagaattcaataacaattctcaaaatgcaatttcttatgaatgggattttgacgatggaaatacatctactgattttgaaccaacacacacatatattaatgaaggtgtttacaatgtttgcctaacagcatttggaagttgtgatacgattgttagctgtaaatctatcactgtagagaaaaatgatgttggtttgaataatgaaatcctcgaagctaaggttaatatttaccctaatccagctgttgatctcgttaccatagcaaaaggtatgaatgatgttgcagaggcggtgatttatgcagctagtggacaaattatgggagaaattacactcctagatgaatcaactcaagtagctattcaaaactggaattcaggagtttactttattcatttcaaaaatgataatggagagtttatattctctaaaagactatgtgtggtgaagtaaaagatttaattattaatgtttaaggtttaatgattgacatgtttgcgctggacggtttacgatgggttcatatgcggtacttgggattggtggtcggattttgaaatttccgaatgctatctcgttttaataatgataatagacggtttacaaaccgtccctacattatatcttcgattggtggttatcgtttgatttttttgaattcgattacgcttgtatgatgatatcggctggtttaaaaatcgttcatacctgtttacgattgatggtttgcttttaattcttccaaaaagaaaaagaggaataaatgcgttacatttattcctctttttgctaaaccatgctaaaactataaaaccagattattttatttacactaaaataaccttgtggcaaatttaaggatttatttctcatctgaaagtaaaaataaaaaaattaacatttatttttaaagatattcagcattccttaaatagaaaaaacattttcttctttttacttgtcattgactattgtaaactctatttttggcgacattaaccaaagtagaaaatctcgcgaacatgagcgtattagtaaataaagaatcaaaagttatagtccaaggtttcacaggaagtgaaggaacattccacgcaggtcaaatgattgaatttggaaccaacgttgtaggaggtgttacacctggaaaaggaggacaaaagcacttagacaaaccagtttttaacacagttcaagaggccgttgacaagactgctgctgatgtatctatcatttttgttccgccagcatttgctgccgatgcaattatggaagctgctaatgcaggaattaaagtgattatctgtattactgaaggtattccagttaacgacatgatcaaagcaaaagaatatatctctgctttcgatacacgtttagtaggacctaactgcccaggagttattactgcgggagaagcaaaagtgggtattatgccaggttttgttttccaaaaaggatctgtaggtatcgtatctaagtcaggtactttaacttatgaagctgctgatcaagtagtgaaagcaggattaggaattacaactgcaattggaattggtggtgacccaattattggaactacaaccaaagatgctgttgaattattaatgaacgatcctgaaacaaaaggaatcgtgatgattggtgagatcggtggtaacttggaagcaaacgctgcaagatggatcaaagaaaatggtacaaaaccagtagttggatttatcgcaggtgaaactgcgccagcgggtcgtacaatgggacacgcaggtgcaatcgttggtggtgacgaagatactgcacaagctaaaaaagcaattatgaaagaatgtggaattcacgtagttgactctccagcaaaaattggtgagaaaatggctgaattgttgaaataacattccatatataatatttaaaagggagtcgaaaggctcctttttttttgttttagtatttaattggtcaaagctgatcaagaaaatgttcaattagtgaacaagaatctctatccaataatttaaacgttgtaaataacacctctcccttttggagggagatacagagggaggacaatcaattcaattaactctgaagaaaatgatttaaacctaagaattattgaatacgttgttgctgctttcgacaagagaaatcaccgtgatctcagcatttataaattaaccttaaaatctccgatcactgaataagccgcatatatatgtgcaaggacgaattacaaacctaacgaagccatctcataaccaaagggaataatcgtccctaccttgtatcttcgattaatgtttatccgattaatgtttgaccgattggttgaatattggaatttttaaatccttgaattaatcttcgaatgtcaatgcatgcggacgatttacaaatcgcccctacgacattgtatctctgattattgtttatccagatatttaaatttttgaattcttaaaaattgtttatatattgatatgaatcaaaaaaacataaatgaatctaaaagacaaaataattttaattacaggaggaaattctgggttaggcaaggcaacagcgcaattatgcgttgaaaaaggtgcaagcgtcatcatcacaggaagagatcacgaaaaaacgaaatctgtagcaaaagaaattggcgcaactccttttaaatgtgatgttacgaaagatgaagaaattgatgctttatacgctttcatagagaaagaattcaatggattagacgttttggtaaacaatgccggaattggaattaagaaaaccctcgttgaattaaccagagaagaattaagacaagtttatgaagtaaatgtttttggagcagcaatggtcgcacaaggcgcagctaaaattttcatcaagcaaaatgaaggaaatattgttaacatcgcctccacggcttcattgaaaggttatccgactggttcaatttattctacttcaaaattcgcgctcagaggaatgacacaatgttggcaaggagaattacgtcaaaacaatattcgcgtaattcaagttaacccaagcgaagtacccacagcatttggtgatgaagagcacagaaccgaaagaccgttggaagataacaaattaactcccgaagacattgccattacgatagtgaactctttagaaatggacaaaagagcctacattccagaagttacagtccacgctacaaatcccttttagaattgaagagcatttctaagcagctcctcccctatttttcactaattaaaattaaaagtcagataataaaaattgtctggcttttgttttggccaccttttccgcctccgccctttagtttatttgctctttttgccagtcaatgtgttttgcgtgtgcttcacaaggtcgcaagcgcaaaaaacttgtctgaatcaaaaatagctgcacaatgctacgggactttgtcggggtggggatcgatggtaaagtttagagcaaaaaaatgccccgaagaaagtcgaggcagcttaaatgttttcacaacggaataatccttattgtgaattgatttcaaattgatgattcaaatataactatatatccgcgaaatccaaaatagtttgagaattttggttaaattggtgttttctaatttaacaaaccaaaattatcactatgaaaagagtattaggattagacttaggaaccaacagtattggatgggctttggttgaaattgaccatgaaaatggtacagtcaaaatagttggtataggatcaagaataattccaatggatgccggagaaataaaagattttgaaagtggaagcaaaataaaaagcactgctgcccaaagaactgagcagcgaggacctagaagactaaacgaaagatacttattgagaagagataggctacatatagttcttaatttaatagacacactacctaaacattacaagcttgaaattgacttcaaaagtgataacggaaataaatctgggaaatttcacaaaaacaaagagccgaaattagcttatctccccaaacaagaaggtaaaaaagcatcattcctcttcatggattcttataaagaaatgttagaagaaattaatgacgacgaagttgaaaatataaaagggaaacgaattccatatgactggacattatactatctgagacaaaaagcactctctaaaaaagttaatttggaagagctttcatgggttcttttaagttataatcaaaaaagaggatatgaaaaaacagaagttgaagataaatcaacaaaagataacgaaataatagaggagttagatttaagtgtaaaagaagttattccaaaaactgataaagaaggtaaaaccttttttgaagttcacctagaaggtaatgacagttttatttacaatgaattttctgatgttcaaatgacatttaaaggtgatttgaaggaattgataaaaacgtctaaagttaattcgaagggcgttatagaggataagaaaacagaatttacaattattgatatttactctttacaaatagagaatgttaagtatgaaaaagatgatgggaagcataaatacacacttacctatcagaatggttggaaggaaataaaacaacctaaaaactttacttttaaatataaaaatgtactatataaaccatttgattatatcattgaaacagtctataacaataaaggacaagttaaaccacaattaaaaaaagacagaaaattacgagaaccagatttaagcgacaattcaagcgattggactttacttaaaaagaaaacagaaaaagaggcgttaacatttaatataaaccaaggttataagaaagaggatggcagtgcaaagaattatatttccccgagtatctataacattttaaaaagtgatgctaggacaggtgaaagaactaaaataattggaggaatgtttcaagtggttgacagaaacttttaccgagaagaactaaagcagattatcactacgcaaaaacaatttcataataaattagaagacaaaaaagtttttgaacagtgcgtcaagactctatatccaaaaaacaaaaatcatcaaaacactttacttaaaaataaaaatgccatacaacagctattagtagaagatattttgctatatcaaagacctttaaaaagcaaaaaatctgaaatttcaaactgcaattatgaaatacgatactggaaaaacgctgaagacaaaaagggtaatctaattgaagaggttgatattaaaacaggtgagattaaaactaaaaaagaacctatttacaataaagtagtttctgctactcatccctattttcaggaatttagaatatgggataaactccacaacctaaaacttatccaactagagaaagaagttaatggaaaaaaattgactaatcaggatataaccaaagaatatttaaaaagtgaaaaggaatatcaaatgctttttgatgaattaaataatcgaaaatctttaaaccaagatcagctactctcgttttgtaaaaaatcttttaatctcgattacaagaaaaaggatagtaattacacatggaatttccctgaagacgacgaaataaagggcaacgaaacaaaagttagttttgcaactcgttttataagatgtggttttaaagatcatactgaattccttactcaggagaaagaagttgatttatggcattatttatattcagtgagctacaaagaaaaaacagcggacgcaaacaaaagtgcaaaaaccttttttaatcgatttttagaaaatagtgatactacagacgaagttagagagaaaattatcagtgattttgtaaatttcccgaaatttgcgtcaaaatattgctcttattcagaaaaggctttaaagaagatattacctctaatcagattagggaaacagaaccaaatagacaaatgggaaaaggaaccttggtatacgaaatggaacgaaaagctttataaaagaaaaaaggagatattagagaaacttaatatggttgatttcaatgaagaaaaatctgacttttctaaagtaataaatacaagtattgacatacaacaaggtgaactcccttttccaaaaggactattcaatacatttaaagattttgaacaaatagaagactttaaaaaacttaatcttacgcaagcttcatatctaatttacggacgacattcagaattagctcaagcaaaatattggttctctcctgatcaaattagaaaagagttacatcaagaactaaaacaacactctctaaataatcctgtggcagaaaaagtaatattggagatgatgcaagttgtcgcagatatatgggattattatggaaaaggaaaggaaagctttttctcaaaaattcatttagaggttggcagagaactgaaaaaatcaatcaaagaaaaagagagcgattctaatcgcatgtctgataatcgtaagcagaacaaaagaattcgtcaagttttagaagagtttttaaagaacaacacatataatgcgaaccctaataataaagaccatttcgaacgattaaaaattgtagaagaaagtgctgaacacactaaaaacacgaacaaagatttctttaaagacaagtcatataacaagaaagaaattgaagatatcctaaaaaaacagtatataaacaaatcagattttgaaaaatataaactttggatagaacaagggtaccgttctccatattcgggacaaatgataaaaatcacagaactatttgatggaaacaaattcaacatcgaccatatattccctcaagcttccatcacaaacaattctttaagtaataaggttgtagtagaaaatagtttaaataatttaaaaagtgataggactggacgagaatttattcaaaatcaaaatggtcaatcttatttaggcactcctgtttgttccgaagatgaatacttaaacatcgtaaacactcaattctctggaacaaaaagatatattctactttctaaagaaattccaaaaggctttacaaacagtcaaatgaataatactcaacatatatctcgaaaagcgatggagttattaagtcatattgtaagagaaccgggggaagttgagttccgttctaagaatttattacctgttactggtagagttacttcagaacttaagcgagcttggaaacttaacgaagtatggggagaacttgtatcaccacgttttattagaatgaatgaactaacaaaatcaaacttgtttggtgaatggcaaacatccaaatcaggacacagatattttgattgtaatttagatgatagcattcgtgaaaaagatgattcttatgacattaaacggatcgatcatagacatcatgcgctagatgcactaattgtcgccttatgtacagaggaccatgttaattatatcaataacattaatgctaaagctaaatcggaagattacggaactcaaaagaaaattgaaaaatacagacaaacattaaaacgaaagataaagttcataaaaagagatgatgctaaagatgaaaacaattggtattatatgcttcctggcgaaactcgtaaattaggagttgaaaattctcgaagagattcagtcttagagaaaacgtatatatataaaatgcatgattcttttgattttgattacaaaaaaatgatcctaacagcattacaaggaactattgtgaccttcaagcaaaatcttagggttattaacaataccacaaactggtataataatacatctagtaagaacaagtttataaaacaaaacactgaaaatggacaaaagaaaaattggtccattcggagaagtttagggaaagattcattttatgggaagaaattattaagtggagaagaaaaaatagtaatccgaaaagatttggatatttcatttaatagtgcaaaaataagaactattaccgatataggaatccagaaaatattattgaatcatttaaaagagtataatactgttgaacttcaatttgaagaagcaatcaattactttgattttcttttgaaaaaacaagaatttgaagctattgtaaaagatgaagaaaatgagtttcaatccactcaagattttattgtacatctaagaaataatcaatttacttataaaaaagttaaatatgaaatgttaaatatctttattaatgaattatctgaggacgtattcaaaaatcgaaatgacagaaaaataacggagcatcctgaaattgcttttacaaatgaactaatcgaagaaatgaataagcccagtgaacttcaaaggctaaacaatggtaagagtcataaacctataaaaaaagtacgaatttctagaggctttgggaatcaaagagctataaatggtgatgatggagaatctgttaaatcaaaacagtatgtagtgaatgacgcaggctctaatctctaccttggtttctatgaaagaacttatataaatcatgaaggaaatgaaacgacagaaagaaaatttaaagatattggattgatggatttaatcgaatcattaaagcaagataaaaacaatcgcattaatcctttacccaataaaatttttgatgacagactaaatgaatttcagagaatatttacactctcaccattagacttagtttatgtcccaacaaataaggaaatcaataacttaaatgaagtggattttaaaaacctaacaaaagaacaagtaaataggatttataaatatgttgatggtagtataagtattgcaaacttcgttccctatgctatttcgaagccaatttggaggtttcacggaaaaaagaacaaagaaatatttaaagaattaaatgataagaacaaaataaatattgctgaaaaagaactgattcaaaatgagtttggacttggaagtcaacaaaataaaaaccaaaacatgatagacggtgtgactcaaataaaaaagatttgttggaaattaaaagttgatagactaggaaatatttctaaagcttaattaaaacaactccaattgttgatgtggagtctccttctccacttctttaacgccatggaataattccatcataccaaactgacgatcggtgacctgtaaaattcctattttcccttttttgggaagtaggagttttactcgtttggtatgtacatctgcattttccctgctcgcacaaaaacgtaaataaatggaaaattgaaacattgtaaaaccatcagttaataatgattttcggaacttaccagctgcctttcgttccaattttgtttctgtcggtaaatcaaaaaatacaaggatccacatagttctgtattgattaagtcgggttaaaaattgattttcactcataatgttgggtataaaatttttctagaaatcccagcaaaacactcatataaagaatgtgttgttctgctcatggctaccattaatggactcctcttgccatcaatagttacatctattgcaggaattatcaaaagctgctgtttaatatgacttgtgagttcttcaatatcatcattatcttgaactattgcataaaccacttcatccacaaaaggtcgataaggctccataatatcatctgctaaacaataggcgttatacttattggcatgatgtatccctaaagcgggtagcattccacttccaattaaagatcttgcacaaaccgctctcaaaatagcgtaaccataattcaataaattattgggtgcaatttccttctgaccacgataaaaaccaggaatatcaaatatccgatcccaataaaaagcagccgaatgactttctttatttgttgtgtcaccagataaaacctccttggaccattttctcaatttatcattttgcttacctaaaagtcccaacaagttagcttgatttgtaatttttgaaacaatggtttgctgccataagtatttctttaaaggaagagtagcttctaattgaaatctcaaccgctcattatattcagagtgtccgcttaatggagaaatcaaacttaaaggcaaatgttgctgattacaacaaacaattgcggcattttgataagtcaacttttcgattaaaccattggtaaatgtgatttgttgattttctagtaccatcattccaatatcctctataggcacagttctggtttcattgctttgcgtaagcttaacaacgagttggttattctttgtactcaaataagcaggattttcgaaaaacaaagttcttttaatcataagtctaagtattgattgacaaccttttactacgtaataaattcgataaggttacaatcttttaaattgagtatgttaacaaacgattaaaatagaaaccaaaaaccgatacttttaaaggaatctactaatcaaaaagagtagaaattttcatcctaaaaagtggctaaaacgcagaaagaccacccttttcagagcggtcttctgtgaatcatcacataaaagtatcaatttgaattcaattcacaacacttatgatgacttggtagcgttgaaacgttctgtgaatcatcacataaaagtatcaatttgaattcaattcacaacagtctgttataaatcgtttgaaccattccatctgtgaatcatcacataaaagtatcaatttgaattcaattcacaaccttaagccggtgcattctactattaggatatctgtgaatcatcacataaaagtatcaatttgaattcaattcacaacccaaagaaagaatttgcggaacgccaaacatctgtgaatcatcacataaaagtatcaatttgaattcaattcacaacaaaaaatgggagtgctggtattttggttatctgtgaatcatcacataaaagtatcaatttgaattcaattcacaaccatcattaagaatgaccgctttattgttactctgtgaatcatcacataaaagtatcaatttgaattcaattcacaacccacatagtgggcaataaattattatagcttctgtgaatcatcacataaaagtatcaatttgaattcaattcacaacaagagaaggtaacgaataaccgtgatagattctgtgaatcatcacataaaagtatcaatttgaattcaattcacaacattaggtatttttatactcacattataccatctgtgaatcatcacataaaagtatcaatttgaattcaattcacaacgctataatagaagataaatgctgaaggtcgtctgtgaatcatcacataaaagtatcaatttgaattcaattcacaacgatatttggtttgtgagttcaactgggaattctgtgaatcatcacataaaagtatcaatttgaattcaattcacaactttcggtatggttttttggcgaaagtctgatctgtgaatcatcacataaaagtatcaatttgaattcaattcacaacaggtatcttctcacggaaacttcttctttttctgtgaatcatcacataaaagtatcaatttgaattcaattcacaacaattccaccaaatccaattttgacaagctctctgtgaatcatcacataaaagtatcaatttgaattcaattcacaacaactccaataggcaaaatagagaagtctaatctgtgaatcatcacataaaagtatcaatttgaattcaattcacaacacttccaatgaaggaaagtattgttttgattctgtgaatcatcacataaaagtatcaatttgaattcaattcacaacaggagttaagtccttccgaaaaattactatactgtgaatcatcacataaaagtatcaatttgaattcaattcacaacaccaaagtgaatgaatccacatctaacatcactgtgaatcatcacataaaagtatcaatttgaattcaattcacaacttttaaaggatttaagaaataagatttatactgtgaatcatcacataaaagtatcaatttgaattcaattcacaactcatgtttggtatattattttgattccgttactgtgaatcatcacataaaagtatcaatttgaattcaattcacaacaaaaagtgtttttgctaaatttgttgtcttactgtgaatcatcacataaaagtatcaatttgaattcaattcacaacccaactagtgaagttgaaagttattgtagaactgtgaatcatcacataaaagtatcaatttgaattcaattcacaacaaaaacacgggtcgcacaggaaaagcaaaaactgtgaatcatcacataaaagtatcaatttgaattcaattcacaacaggaacttgaagaggtttttgagaaagactactgtgaatcatcacataaaagtatcaatttgaattcaattcacaacgcgaaacatgagtatttccgaattagcagaactgtgaatcatcacataaaagtatcaatttgaattcaattcacaacccatagcctattcttatagatttaacttttactgtgaatcatcacataaaagtatcaatttgaattcaattcacaactgacggctcgctatacaagaacctgataggactgtgaatcatcacataaaagtatcaatttgaattcaattcacaacaggaatttgaaagagacaacactcgtttagactgtgaatcatcacataaaagtatcaatttgaattcaattcacaacttataaaaaaggtttattagttccacgtgaactgtgaatcatcacataaaagtatcaatttgaattcaattcacaactttggtagtgaatagaaaaagtcttttatcactgtgaatcatcacataaaagtatcaatttgaattcaattcacaacctgcatatcgtcaaccgtaaccaattcaacactgtgaatcatcacataaaagtatcaatttgaattcaattcacaacaagaaaaacaataatcccgaagtcaaatcaactgtgaatcatcacataaaagtatcaatttgaattcaattcacaacatacgattgtcagatcgcctactctcgtccactgtgaatcatcacataaaagtatcaatttgaattcaattcacaactattcagacagatgtaggtgtagattgtaaactgtgaatcatcacataaaagtatcaatttgaattcaattcacaacggcagatacggcaacaattacgttgcctgaactgtgaatcatcacataaaagtatcaatttgaattcaattcacaacttaatatctgcgaacatgtcgggagttcccactgtgaatcatcacataaaagtatcaatttgaattcaattcacaacttagaactcattgaggttcctaaattattaactgtgaatcatcacataaaagtatcaatttgaattcaattcacaacaggaggaaattgataaggaaagagatgattactgtgaatcatcacataaaagtatcaatttgaattcaattcacaactaggcgagggcgtgatggtttactcagatgactgtgaatcatcacataaaagtatcaatttgaattcaattcacaacgtacaagtagcagggcaagcaagtaaaccactgtgaatcgaatcatcacataaaagtatcaatttaaaatattttcacaacctgcttggggaaaatcaatttcaaatcaataattatcatgtatctacctcttcactcacttcttcacaaagctcttaatgaccaattgatcatttaccattaattcaattacataaacacctttcgataaatcggcaagtggaattgtagtgtttaaaatgtcctttctttctataagcactcttcctgttgcatcataaatcgcataactgtattttgaaaataaattatagattctgatttcagtagttgcagggttaggtgctaatgaaatttcattgatttctaaatccgtcgaacctaaagtgtagtagtaatgatcatttgttgtaaacgaacagattccgttggttacttcgagcgcatatactccattaacaactggagtataaaattgacctattgcccccggaattaaagctccgtttaaataccattgaaatgtagaaccagacgggacattatcacaataaatgtttacgccacttctccaaatattagtatatggtacctgaaccatagacacttggatggtatcaaactgtaagcatccgttctgatcctcagtggtgagaataacttcggcatcatcattcacggttatactcgttgggtttccaccaggccagttccaattccatgtatgaatattacctgcaataataggatccgcagttagggtaacaaaatcatcactacaaaaaacagtatcagaggccaaaattgaaacagttgatggtgttgggtatccagtaattactactgtatcactctccatacatccaaacgaattaatggtttctaaccagtatgttcctccggtatttataattatggaatcatttatagcgccacttgaccatgcatagctataggttgagtctgagaaggttgaagacaacgttagctcatctccatcacaaataaaattttgagctaaactaatttcaggttgtacgtagcccttataagatatagctatggtgttattgacaaaataagcatcctcaattccattgggctcagaaatattaatagtaattaagtagtccgtattcggaacaaaatttcctaatcctagaaaaacagtatcacttagtcctggtgcgagtacatcattccaattataaatatttggaagcacaccgtttacactccaagttataatggcacttgtaacagtgtccgtataattatttgaaaagacaaataaaattgagtcattatctgtgcaattataattgctcggattaagcaaactgtctgcggataggtcaaaaattgtagaccaatcagtatcaaattcatcagcgccaatatcaggatgtgttatatttcgtgcttgtccatctatatctaaatttacttcaggcagaaccattccgttgctatccgctaaaaaagaattgctatgcaagtctgttgtactggtataaattggattaccataataagaattcagatctttattgtgttgagatttccaactactgtaagttaggctattactaaacatggatgtatcgccaaagaacaggttattatcagagtcaaattcttgaattccaatattagaaaaatagaaaaacacaccactcgaaccaattttttgaaaaatgttattcttaaattcaacattcgtattgtattccattgatatcgaatttgaataaatggaattgttatagattttcaagccattactcgcagacaattcaaaaggaaggtaagaagagctaatgaaattgttttttattacgttgttaactccgatatcacaagctttaattctgatggaacggacatttcctgacagtttattgttactgatttcaaaattttcacacgattgcatgtaaatatttgcatgtatagaagggtttgaattgtttatgtctaattcattttcactgattagaatgtttgtaggatggggcgaagcggtgttaaaagcagcaaaagaaattttagatgttccactgaatgagttttttaaaatctttacgttgtttacatcactccaaaaatcaattgccgagttattaaagctagatcctatgaccgataaactatccacaaaattaggatttatagaaccataaattccacctccattaaattcacaggtatcgacactcactaaattcacagaatctaagttaattcgagtgttaaacgaaatgtgtctaagagaaagactttcaacatttcggaaagtgatcaaattacttgagcttgtatggtttgcaattaccaggctggagtttaaagattcagattcgaatgtaatagagttagtaggtgaatttccctcaacaggtccaatatttccccaatcagtatgcgttccatccttcaatttaaaagttaccggtccacaaatacctctgttcaaactaattagtgcatcgttaatggatacaaaatcagcagtcgtatcaccgaccgtgtaaattccatcaagtttggtgtgaaagcgaccactaaaattattattcataggtattgaatcataatatccattaggtaaggcaattgaaatattaacatcagtaatgagattagtaaatgtataacttcctaggttgaaagaaatcgtttgttgtggcgctatgttttgataaacaataattgtatccaaagcctgattctcaatgtcaacataaactgtaaaactatctatttgctcgctcccattattgaatgcatcgaaaattaaattcacacttcctccagcgcaaattgcggtgtctatccatgaaggattttctaatgcaatatcatgttgtaattgaaagaattcataggcccccacgtctggtgtattcagatcgcgagaagaattaaggatgtctgtatcgatataactgataggtgttcccagattatccatactaagggcattcatgggatacaagaaatctgacgacgcaaaataaggtttaataaaagtagaattattatctattgaatagattaaagaaaattcagctaaagttgctgtccatagggttgaaccaccataggttactgtggcaaaattgtgatcattccagtagttattgaagtcacaatcaaaatggatattgttattcaatttataaatcaatttttcaccatcattaataagcatgttgtttttaataaaagcactatcaactccagaaagaagcaatagtgcctgagaattaggactattattaacagttgatagaaaaacggtattatgcataaattccaatttttgcaagttgcttatgtcaatagaactattcaagtaattaacgttgtgtacaatttgatgaattgaattattgaaaattttcaccgcaacatcatcattgactactgcagattctataaccatagtatgcccagcagtagacttcgtaataatgttattgtcaatagaaagtgaatcactttgataaaaaacagaaatagcaacaggtgaaaaagcactgtgactttgcaaacggttatgcgaaatttctatgtttttgtaattgttaatttctacacttataccataggaatcataaaactcatttcctttaaccataaaatgatttgaaacagcattcactccttgtaatgaatgcgcttttatcgaaccaccattaaaaatattattgcttatcatgacactgtctgaaaaaagattatccgtggcattatagatgtttacaaaagcagaatcaaatacattttgatcgaatattaaattcttggaaccttctgtaaaatcaatgctgccatttttaaaagtcaagttattaaattccacattatgtgtgctactgcaaacaatatcaacagaatctatggtaaccatttgaggattttgactctcagattgaacagtaaccctataattcatattactggccaaaatgctatcgatagaaatcgtttcataatatagtccattgcggatatttagaatgacatctccacataccccagaagtatcaagttgattaaacgcgtcacttaaagaattaaaatttggatttgcaccacctactgtataagttccttttaacttatttggaaaaagatgaacatttaaactatcatttgaagtattcatatctacggttccattaggtagttctgaccaaactgtaatatcaactgtaggataaaaatcattgaaggtggagataaacacattgtttaatgtttcaccaggaatcaaacttcctgtccaatataaactctgaattaaaactccattcgcttcaaaatgaatccaacaactggtcagattagttgtaccattatttaaaagatcaactgtaatgtcctccgaaaccaagcaagaatctaaattaatagcccctatcgcggtgatagcagcatcatccgggaaattttgatttgagtttaaaatgtattcagaagaagctttctcatctgtcatttcattacttatgtagccaccctcgatggaaaacaaatcttcatttgcgtgaaggcaagtattcgatagaaatacgacagtaaataagaaaattttaaaggttattaagttaagcttcattccaaagtatctaattaataagaagtgttatcgctaaattaagaaattaatagatgcaagagaaaaataaatatgattttaaccataataatctccgcccacctgttcatttttaagtttaagaattttatcgataaactttttattttgatcttcgttaattttaagtttcagaaattccccttgactatgaatgactagaagatcagttttaaaaatagaaaggtaatggtaaggaataacccaagtataatcgcttaatcgaatattaagaacaacgacaattccgttgggtcgcaaaccaatatttgcttgtacagcttgtttgcttttattcatggcagaaacaaataatttactgtactctattacctccattctagaggaaccaatgacacccacttttttaaagataatatctttaatgttaaaaggtttaccaacagcttgatttatttccttatcgacttctttatctttaaatgatgtgaggtaaagcatttgttcgcgattttaatgttagcagtttaacaataccaatagaccttttgtttggagaacaactaaataataagaaatttagatcttcttaaaattaatcaagaccacagcacaaagaataaccacaataccgagccattgaatagaagaaacatcctcacccaatataacagctgcacttagaactgaaaatggtatttctatacttgaaactatactccctaatccagttcctattgctggcattccctgtgcgaaaaatattgggggaatcattgaaccaaaaatagctaagaacaaaccatacttcaataaatcggaaaaatcaaatgattcaaaaatagaaatattccaaaatattaataccactataaaaccaccgt

SEQ ID NO: 4551 - DNA, 25331 bp, synthetic construct
  misc_feature 1..25331: note = Synthetic
  source 1..25331: mol_type = other DNA
cccaacaaacaagaaatcttaccgaaggaaaaatgggctatgataccgcaccaggtttttctaccaaaggtgattttgccttcttgtcgatggctcgtgacggttatgaagcagataaaaatgatttgattgtccgctctggagctgtcgaactgaatcttaccaaacattgggacggaacagttttgggatacaaatggagcgaagacggaacaaaaatctatttcaatgctccggttggtggaaccgttcaattatttgaagttggagtgaatttcaaaaccaaaaaccttcccatcgtcaaccaaattaccgatgggcaattcgatatagcatccgtaaacgaaatcgtgggcaacacggcaattgtcactcgtaccgatatgaatcatgcggcagaattgtttgcagtagacctaaaaaacggaaaactcaaacaattgaccaacgaaaatgcagccttatacaattcgatcgagaagtcgaacatcgaaaaaagaatcgtaaaaaccacagacggaaaagacatggtcgtttgggtaatctatccacccaacttcgataaaaacaaaaaatatcctgctctgttgtattgccaaggaggaccacaatcggctttatctcaattttattctacacgatggaattttcagttgatggcggcaaacggctatattgtggttgcgcctaatcgtcgcggaatgccagggcacggcgttgagtggaacgagcaaatctctaaagattggggcggacaagtgatgcaagattatttagcagcgatagacgacatcgcaaaagaggcttatgtagacgaaaatcgcttgggagctatcggagcgagttacggcggatattcggtgttttatttggcaggaattcatgagggaagattcaaaactttcatttcgcacaacggtgttttcaacctgaaatcgatgtacggcaacaccgaagaattgttctttaccaattgggacgccggtggtgcttggtgggaaatggacaacaaagccgcccaaaaaacctacaccaaattcgacccaagtgcagctgaaatggtgaacaaatggaatactccaatgctgatttttgttggaggaaatgattaccgagtgccgatggggcaagggcaagaagcgtttcaggttttgcaattgaaaggaatcaaaagccgtttcatttattttcctgacgaaaaccattgggtgctcaaagcgcagaattctctcatctggcataaagaattctacaaatggttggaagaaactttataaaaaaaatcagtttgataatgaaaacggagcagaaagttttttagttccgtttttttcataaacgtgcatcattcgaacgaaaattgtaatttcaggtgtcaaaaaatggtaggtttgtgttgatcaagttttaattaaatgaattcaaaattaaatcattgaaaacttccaaaagaaattttataaaaactacagtcgttttgcctttttcttttaaatttgactcgtattgcaatcgagaagattgattgcctttttagctaatcaaaaccactatatgagcaaagaaaacaatagaatatattttaccaacagcccttttcccaacggacacaaggttgtctatttcaattggagtatgcgattggacagccaattgaagttgtggatggatttgcatttggagtctgataattacgacgaagaagaagaatattttgacgatgtaaatctgattgatgaaccgtctgagcaagagagcgaaaaatcgctttggttcaattacaatcagtgcatcatgtcgagcacctattggaaaaataaaggaatagatctcaaccatatcactcacgagttggatttcaaccgattgcctatgcgtgagtttttggtcgatccacttccggtagatttggcaaaaccagaagagcttgcatttggtatttcgatgttgggcaatgatacgtgtgcaaatcacgatatttcttttctgaaaccttttgatgcagaagatttagcaacctacgacatcaaatggaaagggaaagttgccaacacttatttgggcgaagaaaacttcgactacgagttttatgtgtatatgaaaaacatccgcttttcgggtatcaacatcgacccgagtttggatgtcgaaaaagcatttgctcatatcaaagaaagatttgcgccaaatgccgatttgatggagttggtttgcgtagatgaaatcaacgattattataaagttatcatcaaacgataaaaaaaggcttctattttgaagccttttttcttatcgattatcttgtaatgcaaaaacttgttggagcagtggagtagtgcgttgcgaaatattgcctctgattccagcttctttttctgcaaccattctaaaaacaccagtgattgcctgctcggtaacataagcagtaaggtccggatttattttgttggtcgatatcgtattgtatttggtgatgatgttttcccaaacgcgatgggctccaactttctctaaagaatgctgtactttcggttgaaaagcactgaaaagttgaggagacgttttggattgaaggtaatttgtcgccgcattttgtccacccaaaaggattccgccagcatcttgaatggtcatccccgtaatggcgtttacaaaaatcggtttcgcctcgagtacagcgtcttctgcggcacgattcaataatttcaaaccttcctctacaaggctgccaagtcctaaattgcgcaaactgcgttctactccttgcaattctttgggaagtagaattttggcaagtggcgaattgtaaaaaccattggtttgtccgagttttgcgataccttgatctactcccaaatgcaaggcttccttcaatccagcagcaatggtcgtttggctgagtccgccaacattcgtccccgaggttccatatacgtttggtaattggttggcgatggtttgcatctcggcgcatccggtaaagaaaaggctgtttgccaaaagtatcggtaagattatttttttcatgtggtattattttattaatggaagtggatcatccgaacccaaaaatccaaattagaattcacttacaaaatgcaatttgactgacggatatttttctcgtgtcatctgaatggtaaaagccgaatctgccaaaaataccaactgatcgtatttatcgcgtgccaaataacgttgtttcacccgtttgaaatccaaaaattcttccgacttttcgttgtccacttctacccaacatgccttgtgtacagcaaaaggttcatagctggctttggctccatattcgtgctctaatcggtattggataacttcgtattgcaaagcgcccaccgttccgattactttacgattgttcatctctaaggtgaataattgagctactccttcgtccatcaactgatcgattcccttttcgagttgttttgctttcattggatcggcgttgttgatgtagcggaaatgttctggtgagaaagacggaacgcctttgaaattgaatttttctccttcggtaagagtgtcgcctattctgaaatttccagtatcgtgcaaacctacaatatcgccagcaaacgattcgtctacaatttcttttttgtctgcaaagaatgcgttgggtgaagcaaatttcatacttttgcccaggcgaacgtgcaagtaatttttgttgcgttcgaatttcccagaaacaattttcacgaaagcgagacggtctcgatgtttgggatccatgttcgcgtgtattttgaatacaaatccagaaaatttattttcgaatgggtctacctctcgcacatctgtttctttgggttgcggcattggcgcgatttcgacgaaagcatcgagcaactctcgaacaccaaaattatttagcgccgaaccaaaaaacaccggttgcaactcgccattcatgtacgcttcatggtcgaatgctggataaactccatcgatgaggtcgatttcgttgcgtaggttttcggcatacgattccccgatgatttcttccaattcgggtgaattcagatcgtcgatttggatagaatctgcaattttttgtttgttgtcgccagaaaacaagttgatgtttttctcccaaatgttataaatccctttgaaggttgcaccaataccaatgggccaagaaagtggtgtcaccctcagaccgagattttgttctacttcgtccatcaaatcaaaagcatctttcccctcgcggtccattttgttgatgaaaaccagcaatggaatattgcgcatacggcaaacttctaccagttttatggtttgctcttcgactccttttgccacatcgatcaccacaattgccgaatctacagcggtgagcgttctatacgtatcctctgcaaagtctttgtggcctggcgtgtcgaggatgttgattttcttgcctttgtattcgaatgctaaaaccgaagttgctaccgaaattccacgctgacgctcgatttccataaaatcggaggtcgctcctttttttattttgttgcttttaacggctccggcttcttgtatcgctccaccaaaaagaaggagtttctcggtgagtgtcgtttttcccgcatcggggtgggcgatgatgccaaacgttttacgcttttttatttcttgttctaatgacgccattttgttcttgaaaattacagattgcaaagataattgattccaacaaaatgtttggttttctttggaagaatagaatattattgtaaaatttacgttatctatttttcattttagacttaatatatgagaagatttttattgtggtggatgtttttttggtctatatgtacctttgggcaaaatcaacctacgattcatcatctggaaaatggttttgagttcaacaatttgcaactagatcaatatacagtttcttatcaggcagcttcatcatgtagttttggtccaacaaaattttataaatatttttctttcaaagcgggttttgatatgacttttgcatttgatttagagtcggataaaacggattttaaatttattctttggaagttagaagttgatgaacctccagaatctgtcttttacggaacgagtacgataacagcggatagaagcgtagagcatgatgagtcgaaaaaaataggtttaagggaaggtgaatctgatgggtgtgaaacttataataatggaaacggctatgcaaaagcttttatgggtgatgaattgttgcgcaaaggtgaaaccattgtaattgcggtctatggtaatagtgatcaagatccatttagtattagaatacatgctgctgtagaaaaagaaatcacttacaatactcattgtgaaggtgatccgtattcgatcgcaacgatcatcgaacagatcaaagatgaaacgaatttcgagaacatcaaaatttttaccgatttcgatcagtcaaccgaatataccgaaccagaggtgaccaccgctcaaaccttgtatgcatttgtacgcgacgataacgacgttgtgaaatacttataccacttgcattttacgtttacacctcgctatgaattcgatgataagctgaaacccaatgctactttgacagcttgtaaagccaaggtgcctttcgataaaaatcaatttcttgctgcagtattgactgatatagatttcgataattttgaaattttaaaagcgacctacaacgatggcaatggagaaaggaatattgatttgacgacacctttcgatgttccaaatccaagtgaagtaaagttgaaattgcgctacaaaggctcttctacattttgtacggccgaatctgattggattcctttaaaattagagaattcaattccgaaatttgatgatgaggctaaatttcaagctgataaatgcgaaggcgatgcaatgactatgacgcagttggaagagttgttgaaggtagatacatctctatatcaggtaaaacttactggatataacgcagggcaaccgataaattttggagcaaatccgactttcattttccaagtgaaaatggtaaataaagatgaaagttgcgaaagtgaaagtaaaacgtttacggtaaacaaaaccgatccgattgcgcttgtttcggcaaaactacatcaagaatgtttgaatgagttgacacaaagtgatgtagaccaagccatagaaacaatattggatggaactacagcgactttgacgttttttgacgatgctgataaaaaaatcgaagaaagcggattgttggcgtatattcagaccaaaaagcaaggaacattacaagtcgttggcgaattggatggatattgtaataccactgtaaacctcactttcgacttagtagagagcagtgtcgtaatcccaactattatcaatccattgaaatccacttgtttggctgctgaagaagaatttgatgtttcagaaagcgatttgaaaaatcatttggatacaatcttcgaagcgaatcatgaatatgtttttatcgataatcctgttgtaacggtcaatccgaatactgaaataaccatccgttttaaagtacgaaaatcaggcgaaaaatgttggtcggatgaggttctggttgaaatcatttcggtgaacaaaccaggttttgaaatagcgatttcagaccaaattgccagttgcgataaccaatttgaggtaacaagccaatggctgaaagagaaaattgaggaaaatgtattgaattatacaatttatatcaacaaacaggaattcattattccgaaacaagttttaaccttagatttctctagttctgatgaaattcgcattccgatcgaaatcagaaatccaaacgatgcaacttgtaaaattgggggcgaatttaccataaaacaagctgcacaattcacagatgaggttaccaatactcaactatatttagaccaaaattcaattacattttgtgagggcgaactacccgaaacttgggtacaagaacggttagactatatcaaaacgcaacatccggatgttgagtttagtaaaacagcgatgcaaattgcccaagaaatgacagcgaacaatggaaaaatcgctttcgaaatttctcgagcagcagaatgtgggagcataaccttgtacatgccttataccaaagtagatttgccaactgtggcgttggacgatttacctaaagtttgtgctggtgaattgttgaccatcgatttgtctgatttggattcgagttttacctattacgtagaagatgatgctggagtgcgtatagatccagaaaacggcgcattcgaattgccagccgaccgatatactttatatgcagaaaatgcaagcggttgtaaatcgaatccgtatcatttcacaatcgaaacttatccagaacctaaaataaaatcgataagcatcgaaaatggaaacctgactgtggtagccgaaggcaatggcggaaaattggagtattcgttggatggcgagcattggcaatctagcaatacgtttcgcaatattcaaaaaggcatgaactataccgtttgggtaagagaaaacggttgtggaggcgtttcggtttcgaatatttatgtattgaatctgcccaattttatttcaccaaacggcgacggacgcaacgatgtatggcaaccgattgggcattttgtaaatgataaagtgattcgttttcaggtgtttgaccgttatggaaaaagtattttgaaaaaagaaggaatcgatgatgtgcttttttgggacggaaaacaaaacggaagttctttgccttctggagattattggtactcgattgattatccaacatcaaatgataacatgatcgaaataaatattaagtattcaggtaatattacagttaaaaataaatagtattttagcttcgttaaaaatgtttatgaagaaaacactctttttgctgtcattaacctttgggttgttgagtattacgtcgattgcacagcaaacgatgccttattacaatcattatttggtgagcgataaaatgttgatcaatccctctcatgccggtcaaaatccagagtacatcagcatcaatgccagcaaccgcaaccaatgggacgatttaccaaacagtccgaaaacccaaactttgagcgcccacgcaacggttatcgatcgattggcagtcggaacctattttttcaatgatcgaaatggagcttcgaaaatgagcggattcaatctcacagcggcttatcatattccgatacaagacggcagaggttatgaccaagagcaggatgtggtttcttttggagtcggaacaagtcgtttttcccaatccttcgatttatctgatattattgtaaacgatccaaatgaccctttgctgaatgaagatcgcttcaattcgtggatgatgaatctgggcgtgtctttcaaatatgctaacttttttggtggagtttcggtgctcgacattccaattgataacaatttttattatatcaacaatttcgaacctttgcccacaacttattatttgaatcttggttttgattggtatttgaccgagggtataaaactgcaaccctctctggtgtacagtaccaatgccaatcgatacagcggattggatgcgaatctgatcgcccacctcggttttggtgatcaagaacaaggggtcgatgttggggtgtcttacaaacaagggatgtctaaagattataaagatccgttgtttatttctccagtcgtaaaagtgaaaatcggtgcaatacgagcaggaatgtcctatgatattggcttgtcagattttcaggtcgatggacgaaagcaaggatttttgttcagtcttggggtagatttggcaaatccattgaatccagattggcgataaatgaaatcgcgaataaaaacatacagtggctacccaattcgggtagtttttttttatttagaatcgagcaatccaggctgaaacaagttgcggtagatgggagcgtattgggtaaacgtatccattatttttaaataaagtcgattatcaaaatcgctgttcatatcttttgtgataaaggcatagtggataaaatcatcaattttaagagccggaattttgagttctttggtaaaaaaatcctcaccaaaatagttgcgcaaatgtcgatgttttgcaatattcgattcgtatttcatcaattcttgtctttttttcaaattgcccgttaatgcatcataaatgcggccaacatctaatcgcgtgagtgaaatatcacccccgagcaaaccaaatttcaaatcgcttgtatcttttatcgggttgatatcggggttcacgcccagttttttatacaattctgtaagattgtctttgcgttttccggccgtcacatctttggtgagaattccagtcaaatttgcagatatcaacgcctcttgtagttcgataatattgatgctcaggtgaactacaaacttaggctgttggtagatttgcggcgtaattttgattcgtcgattctcgtaataatccgacttaaactccagcacatcatctacactggcaagaattgaaaaattcccagaaaaattacttataacggttttcttggtcgtgagattcgttacataaactccctctgcgacatccccgtctggatccaaaatgatattcccatgaatccatttttcggtcgtttgttgagccaaaacatggaggtttgccaataaggtgaatatgatcaagcttaagcgataaatcatgcgttttagtaattatcctacgaatgtatttcgaaaatctaagaaatgaaattctttggtaaaagtttaaggattttaagattttgttgttgccgtaaaaattttttggcacaaaaaaaacctcctgattaatggacaagaggtgacccaaatgttttcacaacggaataatccttattgtgaattcctttcagccacaaatataacaattaatgatatgaactttagcattttttattaattttaacaatctattcaataaacaataatgaaaacaattttaggactagatttaggtaccaactcgatcgggtgggctttggttgaaattaaccaccaaaataaaactgtaaaaattatcggcttagggtctcgaattttaccgatggacgctggagaaattggtgattttgaacgaagtggtaaaatcaaaagtactgctgctcaacgaactgaaaagcgaggcccaagaagattaaatgaacgttatttacttcgtagagatcgtttgcacttagttcttgatttgttggatgctcttccgaagcattacaaattggaaatagacttctccaatgacaaaggtgaaaaaagtggtaagttcaagaaaaataaagagccaaaactggcttatcttccaaaacaaataggaaaaaaagctgaatttcttttcaaagaaagctatcaggaaatgcttgatgagcttagcatagagaataaaaagaaaagcagaattccttatgattggactttgtattttttacggcaaaaagcactttcagaaaaaattagtttggaggaattagcttgggtattactgagctataatcagaaaagaggatatgagaagacagatagtttggatgaatttgatgatttgtcagaaaaacttaatgattttggcattaccaagtctattcaagaagtggttgatacaagcaaaatagagattgaaccactaatattgaaagttgttgaagtatctaagtcggaagacaaatggggtgtttttttcaatgtcgttctggaaaatggctattcatataaagaatattctacggaacaagttactgaattaaatgacaaaattgatgaagtcaaaattgtagaaagactcaccattctaaatgaagaaggaactgatatagatgatagtaaaactatttacagaattgaggatattttcgagttgaaagtaaaaaacatttctccaaaagacacaaaggataagtacttaaaagagtacagtaatggttggaaagtcgatacaaactatgctgattttaacaaatttcaaaaagcagaaaatgaaattaaagaggaagtttttctaacaagactatacaacaataaaggagcactggttaagccttcaaagaaaagtgaatcactcaacctgaatatttctaatgacccatttactgaattcaaattacttgacccaaacaaggcaagcaattggaagctattaaagaaaatgaccgaaaaagaagcattacaatttaatagtttgaatggttatgttgataaaaacggtaatgtgaaaaattacatttcacctaaaatatacaatgttctgaaaaacgatgctaaaacgggaaatcgcacaaagattatcggtggaatgtttcaggtggtggatagagatttctatcgagaggaattgaagcaaattatttccacgcaacaagcttttcatacgagtttgagagataaagaaatatttgaacagtgtgttaaaatgctttacccaaaaaataaaaaacatcaagatgctttgttgaaaaacaaagatgccattcagcatttattagttgaagatattctgatgtatcaaagacctttaaaaagcaagaagtctgaaatagcagattgcaaatacgaagttcaatattggaaaactgttgaggataaatatggcaatccaatacaagaagttgataaagaaacgggagagcttaaagacaaaaaagagcctatttacatcaaggttgtttcggcttcgcatccttattttcaggaatttaggatttgggataaattgcataatctacgattgatacaacttgaaaaagagattgatggtaaaaagttaaccaaccaagacgttaccaaagaatatttcaaatctgaaaaagaatatcaagagctttttgaagagttaaacaatcgaaaatctttaaatcaagcacagtttttagcatattgcaaaaagaagtttaaaatcgattataagcctaaagaaagcaattacgcttggaattttcctgaggatgaagaatttaaaggaaacgaaactcgcgtaagctttgctactcgtttcaagcgctgtggttttactaactacgctgcctttctcacacaagaaaaagaaagggaattatggcattatctgtattcggtaagctacaaagagcgtactgaaagcaacaataagagcataaccacgtttttcactaactatttcaaaggatttgaaattgccgatgaaatcaaagaaaaaatcattgttgactttgcaaattatccgaagtttccttcaagatattccgcctattctgaaaaagccttgaaaaaactattgccattaattcgtttaggaaagctggaatatgaagatgcttgggcgaaagaaagttggtaccaaaaatggcaaaaatccaatgaggacagaaaagaagaaattttaaaaagaataaaaaacatcgattatgacactgataaagtcgattacgagaaagtagtaaatactaatgtcgattaccaaaaaggagaattgccatttccgaaaggcttgtttaatgtttttagagatttccaaagtacagatgattttcaacagttgaatttgacacaagcatcctatttggtttatggaagacattcagagttagctcaagcgaagtattggacttctccagaagatattcgaaatcaactccatcaagagttaaaacaacactcattaaacaatcctgttgcagaaaaagtgattttggaaatgatgcaggtagttgctgacatttgggattactatggaaatggaacaccaaatttcttttcaaaaattcatttagaagtaggaagagaacttaagaagtctgccaaggagaaagaagcggaaacgaaacgaatgtctggtaataaggcgcaaaacaaaagattgcggcaaattttagaagaatacctgtcgcatagcccattcaaagctaatcccagaaatcctgaccatttcgaaagattgaaaatagctgaagaaggtgctgagcataccaagaataatgacagaaaattcttcgacgaaaataaggtgctaaaagatgctaagatttctaaaaaagatatcgaggatattctgaaaaaatcacacataaccaaagcagatttcgaaaaatataaactttggattgaacaaggatatcgctctccgtattccggtcaaatcataaagctaacggagttatttgatggttcgaaatacaatgtggatcacatttttccacaatcatctataactaataattcgctcagtaataaagtagtagtagaagtaaatcttaataaattaaaggacaatagaactgccagagaatttattcaagctcagcaaggacaatcctatttaggtattcctgtttgtacggatgatgagtatgtgagtattgtcaaaacacagttttcaggaactaaaaggctgatattgctgtctaaagaaatcccgaaaggatttataagtagtcaacttaacagtgcccgccatatcgcaagaaaagcgatggaattgttgagccatattgtaagagagccaggagaagtcgagttccgctctaaaaatgtacttcctgttacgggaatggtgactacagaattaaaacgggcttggaaattagacgaagtttggacagagttagttgcgccaagatatatacgtctaaatgaattgacccaatccaacttatttggaagttggcagacctccaaaaatggtaatcgatatttcgattgtaatttggatgaaactattcgtgcgaaagacgaaacatacgatattaagcgtattgatcatcgtcatcacgccttggatgcactgatagtagcattatgtacagaagatcacgttaattacatcaacaatattaacgctgacgccaagtctgacaattatggaaagcaaaaacagatagaaaagaacagacaaacgctgaaacgaaaaataaaatttaccaaacgagatgatgagcgagatgaaaacaactggtattatatgttgcctggagaaacacggcgagaagatgcagacaattcccggagggatactgtggttgaaatgaactatcaattcaaagaagatgcaacttttggtcaagattataaaaagatgattttgactgctttgcaaagaacgataactacattcaagcaaaatctacgtgtaatcaataagagggtgaattattataaaaacggtccaaattcttttgcacgacaaaatacagataacgggcagaaagaaaattgggcaattcgtcggagtttagggaaagataccttttatggaaaaacaactataaatggtgttgataaaatcacgttgcgcacagcattagatacctctttcgatagtaaaaaaataaattcgatttcagatactgtcggacgaacaaaaactattttgctcaatcacctaaaacaatttgatactgttgaacttccttttgacgaagctattttacactttggagctttgttagaaaaacaggaacttgaagcaattgtatctgatgcagaaaatgaaattggtacaattgaagaattgtttggacacttgaaggcaaataattttcagtttaaaaaacgtgattattctaagctgaatgtttttgttgaaatggtttctgacaataatttgagaaaacgctatgaggatgatataaaagaacatccggagattgcgtttacccctgaagctatcgaagaaatgaataaacctgaaaatttgataaaactcaacgataataaacctcataatccaattaacaaagtgaaaattacaagaggttttggtaatcaacgagctttgaatgaagaagataaagattcagtcaaatcgaagcaatttgtagtaaatgatggaggcaccaacatttatcttgcagtttatgaattgattgatagatcgaaagagtcaaaaagcaatccaagaagaatttttaaaggaattagtctttttgatgtaatagaatatcaaacatctacaaacactaataatattccggtagatgaaaaagtttttaatgatactggtgaagagtatagattattgttcacgttgactcaaaatgatatcattaaggtagataatgctggagttgacttaacatttgcctttaatcgatttacgggcaatgatatttattttagaccaataaaccacgcatcagagattgataaatgtgaagttgatttgaaaataaattctaaaactagcaaattgagtgggtcgcaaaccaatgaaactacaagttttaatggacaacaaataaagaatgtctgcattaaactcaatgtagatagactaggtaacatttcaaaagcttaacccatgctcaaacgtaccatttatatcggtaatgcttcgtatttgaagttcagagataaccgattaactattgaggatccgaatacaaaagaaatcaaaggatctattccgatagaagacatcggttttgtggttttagaccattaccaaattacgatcagtcagcagcttattatagcattgcaacaaaacaatgtggctttaattagttgtgatgaaacccatctgccgttaggcttaatgttacctatcagtggacatgttgaacatagtgaacgattgaaacatcaaatcaattgctccgaacctttacgcaagcaattatggaaacaaactgtagaagcaaaaatttatcaacaaaaagaagtgttacggttaaacaatttaccacatgaccgtatgattacgtatatgaattcggtaaaatctggcgatagtaccaatatggaaggcattgctgcacaatattattggtctaccttgtttgatgattttattcgcgatcgaaaaggtgatgcgcccaataatttcctcaatttcggctacgctgttttacgaagtatggtagctcgagcgattgtcagcagtgggttgcatccaacaataggcatctttcacaaaaacaaatacaatgcttattgtttagccgatgatttgatggagccttatcgtccgtatgtggatctattggtagtcgaatggatgcaaaaacctttttcgccatacctattagacaaaaatgccaagactcatttgctacagattgccacccgagatgtaaccatcaacggcttacaacgtccgctaatgacagctttgagcattacaagcagttcgctgtacaagtgctacaccggcgaaaatagagtgctacaatatccgatgttgtcatgagttttagtcggtacaatgcttatcgtatcatgtgggtattagttttttttgatctaccgaccgaaaccaaaaagcatcgagcttacgccacacgatttaggaaaaatttgctggatgacggatttaatatgtttcagttttcgatttatattcggcattgtccgagtaaagaaaatgccgatgtgcatataaaaagagtgaaaaaaagtttacccccagaagggaaagtcggaattttgtgtattacggataaacaatttggacaaatggaattgttttttgctcaaaaagagaccgatttgcccaatgttccccaacagttagaattgttttaggaaataaaaaaatgcttgtagaataaaaccttcaagcattttttacttttttttggtttgtagattgctttttattacgctttaaatcaacactttagaatgaggttgcgattctaaagcgtaaatttacaaaatttgaaaggaattcacaacatgaaatcatgatgttgttgtggcaattttgttgcgattctaaagcgtaaatttacaaaatttgaaaggaattcacaactcgattcgtcttgttgacggcgtacgcctagttgcgattctaaagcgtaaatttacaaaatttgaaaggaattcacaacgaattactttagaaaacgcaatgcgcggtagttgcgattctaaagcgtaaatttacaaaatttgaaaggaattcacaacacccgtttggcgattcattccactgccatcgttgcgattctaaagcgtaaatttacaaaatttgaaaggaattcacaacaggttctgcaaaagaatacatcaatgaaacgttgcgattctaaagcgtaaatttacaaaatttgaaaggaattcacaacagtatggcggttcaaattgcccagccaaaggttgcgattctaaagcgtaaatttacaaaatttgaaaggaattcacaaccaactccgctattatgtctatgtccagtaggttgcgattctaaagcgtaaatttacaaaatttgaaaggaattcacaacgttttggtttttccattacttcaaggctttgttgcgattctaaagcgtaaatttacaaaatttgaaaggaattcacaaccgcggagatccgcgccccccagggcacgatgttgcgattctaaagcgtaaatttacaaaatttgaaaggaattcacaacataaggttgatactttcaatagtcttcaaggttgcgattctaaagcgtaaatttacaaaatttgaaaggaattcacaactaagcgcgcgcgtcttgaagatcattatcagttgcgattctaaatcgtaaatttacaaaatttgaaaggaattcacaacattgtggtttaccgtaaaacgaacgcaaagttgcgattctaaagcgtaaatttacaaaatttgaaatcaattcacaacattggaaggagatattgtgaatgatgaattgtggtgattctactgagtaaatctacaaaaatttgaaatcaattcacaacaaacgaagtattaaaaaacaaaaaaccctcgtggtgattctactgagtaaatctacaaaaatttgaaatcaattcacaacagttataagaacaatgggaaaaagaactgtgtggtgattctactgagtaaatctacaaaaatttgaaatcaattcacaacagctttatttttaggaaacctttagaggctgtggtgattctactgagtaaatctacaaaaatttgaaatcaattcacaacccaagacgattgggaaatggagagatgaaggtggtgattctactgagtaaatctacaaaaatttgaaatcaattcacaacccatccaagcacaaaaatattttaccgtcagttgcgattctaaagcgtaaatttacaaaatttgaattaagcgaagcgaatcactgaataccttaaacaaataaacactcatgaggtaaaggaattcacaaccccagcattggcgtagtttcttggcgtgtcgttgcgattctaaagcgtaaatttacaaaatttgaattaagcgaagcgaatcactgaataccttaaacaaataaacactcatgaggtaaaggaattcacaacacgtcacctgtcattatttctcctcctcaagttgcgattctaaagcgtaaatttacaaaatttgaattaagcgaagcgaatcactgaataccttaaacaaataaacactcatgaggtaaaggaattcgcaactcgttgaagtatttagcttcgtcaccgaatgttgcgattctaaagcgtaaatctacaaaatttgaattaagcgaagcgaatcactgaataccttaaacaaataaacactcatgaggtaaaggattccacaattaatggagaataaaaggggaggagtgtggctagtcaaaatccaaactagatggctaaaatttgcccgaaaatcttacgttacagagggaataaattaccaaaagattttctgtaaaattttagaattataaaaaaaatagaggtgaaaagactttttgctttcacctctattgcagtaaaccttaataattgatgatgaggattaatttgttaaaggctttttttcttcaattcggtaggttgcagtattggtgtaggtgcgtccaaacatgtccctaactctcacttctatcgtatgctcgcccaatccaagattgttggggagttttttgtaccaaagatgtgaactttttacggggttagacggtcttctacccatgagcaattcgttagcattatcccaacgctgaacttgataatagaatcgaggatcgttctgaatggttttgtccattttctgccattttccatttccaaaacgaatttcaacctcgtctttttcacttcccataaaaatattggcaaacaccaaagaagtgttccatcctttatttgcaattacttttggggtataaatatccattttataatccaaaggtttgccagcaactttataatccaattcgtatcgattgtctttcaccgtaagataagcatagccgcgtggtgtgccgtctctcatggtagaaactgggacgccttcttcgttgagctcgccagaataccaatcgccagaggttgttcccacattgtattcgtgcaaaggttgagcgcccttccagcctttttctttgtcgtagaactgatgcatctggtaatgagtgtgggcagaaagcatcagaatgttgggataatcttttagaatttcgaggagttgctgtcgactttcattatcgaaatggtcttcgccttctaagaaaatcggaatatgaaaagacagtacgatcaatttatctttcgaaaccgtttttagatcgttttttataaacgctaattgatctggtgtaaatccgcctaaatatcctttaccgcctctaggatttgggtataaaatattatctaaaatcaggaaatgcgcattggcatagttgaatgcataggtggtagggccaaaatttttctcgaaggtttcatcagaaagttcgtctgtcgtcgcctcgtaattcatatcatgatttcccatcacattgtaccacggaagcgccaatgcactcatctgtttcttatactttggttgcaacaaaagatcgtctccaaccaaatctcccaagctgataccaaacgaaacgccttgtttgtgttgctgcgcatcttctacaatagctttttgaaaaaacaccaattcttcgtcggtataagtctgcggatctccaaaaacaaaagccgtgaacgtggtgttttcttgctgtggaatgagcgggaaatcgacagattttggtaaaactggtgtaggttctacacccgaatacttgaagtttttgggcgagccttttggtttatgggtataataaaacttaggcaaaaaataagaatccaaaggcgttttgtatcgactgggcttgatgacaaagacatgattatcgtcttttatgctaagcgtatatcgacctttggcgtcggtaagaacgacatccatcccgttggaaaccgccacattttctaagcctttttcgtttttgtctaatcgtccattctgattaatatcttcgaaaacgattccttttatcgtttgttgtgcgctgagttgtatactcaccaaaacactaagtccaaaaattatttttctcattttaatttaattttatttagtttgccaccatactttcgagttgatatcatctccgcccatagcggcagctgcccgatcgtaattatctttattgtaaatctttacagatgccggatacaataacctcgaaggaacaattccgttgtttcttcccgctggaattttaggtaaaacagggaagccagttctgcgatattcgaaccattgctgataatctacaaagtataaagacaaatatttctgaagcatgattcgctctaaagtcccattgtagcgtgtcgcatcattttcgaaataatcagctggcgtttctgcctctgtaagatattctatagctgcttttacggcgtttttataatggttttctgcgttgtctaaatatcctttatacgccaattctgcctttataaattcagtttccgaataggtaaaaaaaacaattttcatcggtgcctctgcctgaattctcaacaagcccgaaggagaataatcaaaagcttcggagccatcgtaccccgctggaatccctctgtatccgatagcgctgttgtcttctaacgatctggcttgggtcgcgattttgctgattctcgggtctttggcttcgaccaattggtctattataaaagaagccattgctctcgcgttgttgaaatcttgcggtcgagcccaaggcgatacattgggtgaaatgcccgtaacttgcaaaaccgcattatctagattagacgtcatgatagggtattgctgtggattgttgatgatattgagcatttttgtataggcattggtttctgccttaccagaaatacgcatcagcaaacgcaggtgcaaagagttggtgaatttttgccattttacaagatcattaccaaacaacaagtcggcaacgtagggcaacggtttattggtgtcgtaaagtgaatttgctgtttctaaatcttctaacaatgtttgataaatatctttttgagaatcgaatttggcttgcgtgatgccttcttctgcacgaaaagcctcggagaacggaacatcgccaaaaatatcggtaagatttgcgaatgcaaaagctcttagtgtaagcgaaatggcttcgtaattgggttggttgagttctttacttctgatcagcatttcgttgatgtttgtagaccaacgataagctgcattccagctagaattacccgttccgtctgtgatatcgtaacgatgaacaccgccagctgtaacatctggaaatgggacgtgtacttgcatgagggggctggtgatatcgtagtttttggtcgcattgttgcttgccaaattgtacaaaacaggattgataagcgaacctggtgtaacctcagaaaccaaattcggattgatattcgtctcgtcgaaatcttcggtacaggctgctagtccagagcaaagtacagtgagtaatgtgattttataaaaaagttttttcattttagtttagtttttttgagttttacaaagatgcttttagggtaaatccgatagaggctgtagaaggcatttgacccatttctacgccaggtattatggtagatccttctatagaagcggtttctggatcgtacaatggaaagtctgaccataccgctaagtttttaccaaataccgacaagctgaggttttctacccctgtattcttcaataattttttaggtaaattataagtgaaattcacctcgcgtaacttcaaataagatgcatcaaacgagttggattctacgttcgcacggcgataatattttgcataataatctgttatttttacttcttctgtgtttggcgaatagctaccgtctgggttttgtaccactccttcaccaatgataaaacctgtatctcttcctggtaaagtgtcttttagtttcccttgttccatcattttatgataagattgcgagtaaactattccgccatattgcccatctaaggtgatgctgaggttgaagtttttatatttgaaattattggtcagtccggcacgccattttggggctgcatctccgatgtattgaatatcgtcagggtaggccggtataccattttcgtacacaatgtttccttggtcatccctcacaaaaccgtatccgtagagggctgttgtggtacctccgatttttcctattacgctcacggcaccagaagtcgccaaaggtttttcgtctacaccatcggtaagcgagaggattttattttcgtttatagcccagttcccgatgagttgccaactgaaatctgcattttggatgggttttagattcagcatcacttctacacctcgatttcttacctctccaccgttgataatagcagaagtgaatccggttacctgatcagttggaacctgtatgatttggttcttggtgttggtctgataaagcgtgaggtctaaaccgagtctttttctgaacatcaacaactctatccctgtttcccagcttttagaaatttcgggtttcaggtttatgttatgaagagttgttggggtggtagaagaacccggaaaatcgttcgattggtaatatttattgatgctataaggctctgcatcgttcccaacttgtgcaaacgatagtctatatttcaggtaattgatcggatttgataatctgaaaatatcagacaagatgaaactcgtcgaaaccgaagggtagaagtaagaacgattgtcttttggcaaggtgctagaccaatcgtttcttgccgtaacatccacaaaaatctgatctctaaaccctaaactcaacatgctgtacaaactgtttaccttgaggtatttgtcgtatgtttttacaattgggctattcataccattagataacatatagacattggggatgaccaactcgtctacttgtgcgtctttgcgcaggtattgataatctcttttgtttccaccaaaatttaggttaaatgataaatcttctccaaatttatcttcgtaagaaagaaggaaatcggtattgatttctcttttttgtacatcttgccttttataatgcccgttcaaccaacgattcatatcatgaggtctattttgctctcttagctgattgtacatgttgagaccagaacgcaacatgaggttcagcttagaagtgagttggacatctgcctgaatattacctgtgatctgattgctttgtagcggatttgttgcatcgtacgcaatgacaaacggattgtctatataagaactaaaaggctgtatctgactgatgtattcttgtcctgtgtaccagcgatctctgtaccaatctaagtcaacgtttggattttggaagatcatgaaataagcaatagaaccattgttgtagcccgtgcccgggatattgtcgctcactttgttggtatagttgaccacagaggtaagttttaatctatcagaaactttgtaattggcgttgacagaagcggtatagctatcgaaaccagtattgggcattatccaatggttttttacatgtccaaaagaagctcgcatagcaccatcttttccgccaccagaaatcgagacattgttggtgtaggtaaccccagtgttccaaaacgattttctgttgtctttataaggtctccacaatgttcgttctgctcctcgtccttgcaagttaggatcgtattgataataaaattgtccttcgaatcttggtccaaaagcactacttgttccactcgtagcgttaccgtctgatgagtttccgtacgaataatatagctcaccatctttgtttctttgaagcgttccctgtccatattcgtactgataatctggccagtgattgatgacatccaacatcacagaagaacgaaaatctatgcccagttttttacctttgttaccagattttgtggtgatcataattgcaccattggcagcgcgcgaaccgtacaatgctgctgcagacggccctttgagaacggtaacactctctatatcattcgggttgagatccgaaatcgcattaccaaaatctatcggcgaatctgctcccatgtaagaagaatcgttaccagaagaggtcatttcgggattcatcggcacgccgtctatcacaatcagtgcataattcttatggagttcggtcgagttgttccctcgcaaaacaatgttctgcgaatttatgggacccgaaccagcagagatcaaatttagccctgcaactttccctttcagaccatcggaccagttgttgttttctgcattgttgagcgattcagaatcgatggtttgctgggcatatcccaattttttctcctctctttttatccccaaagcggtaacaacaaccgcgtccaaacctatactttggctgagtttgactgaaagcgaattgttgtcgccagcattcacctgataattgtctataaaaaagggttcatgactcagatgctcgatttcgatatcgtatttttcatcagacaaaagtccttctaccacaaacatccctttgtcgtcggtggttgcggtaaacgaaatagatgcgtctgaatcggatatgatctgcacacttgcaccagaaattgcattccctttctcgtcttgcacaattcctttaatcttagaattctcttgtgccatcgcttgcaagctgatgaaacacaaggataacagcgtaaaataacgtttcattatagatgagtaattttagttttttttatttcaaaagtttttttttctggataataaattatgctgtcagacaatttacattgctgattattaatattttatgtttttttagcttatttcttttctatataaatttgttggttttggatttggtattgaagatcgtttaactcacaaattatatccaatattttataaagctcttccgacgaatcgaatcgggcagtaaacgtaagtccgtcaggaatattccccagctgaattttggtctgatgatattcctctaatcgatagaatacc

SEQ ID NO: 4552 - DNA, 20269 bp, synthetic construct
  variation 818: note = note, n is a, c, g, or t
  variation 1033: note = note, n is a, c, g, or t
  variation 566: note = note, n is a, c, g, or t
  variation 416: note = note, n is a, c, g, or t
  variation 638: note = note, n is a, c, g, or t
  variation 539: note = note, n is a, c, g, or t
  variation 743: note = note, n is a, c, g, or t
  variation 880: note = note, n is a, c, g, or t
  variation 635: note = note, n is a, c, g, or t
  variation 552: note = note, n is a, c, g, or t
  variation 1147: note = note, n is a, c, g, or t
  variation 562: note = note, n is a, c, g, or t
  variation 605: note = note, n is a, c, g, or t
  variation 1237: note = note, n is a, c, g, or t
  variation 773: note = note, n is a, c, g, or t
  variation 1244: note = note, n is a, c, g, or t
  variation 395: note = note, n is a, c, g, or t
  variation 404: note = note, n is a, c, g, or t
  variation 719: note = note, n is a, c, g, or t
  variation 650: note = note, n is a, c, g, or t
  variation 710: note = note, n is a, c, g, or t
  variation 602: note = note, n is a, c, g, or t
  source 1..20269: mol_type = other DNA
  misc_feature 1..20269: note = note, Synthetic
  variation 1306: note = note, n is a, c, g, or t
  variation 1318: note = note, n is a, c, g, or t
  variation 1135: note = note, n is a, c, g, or t
  variation 1315: note = note, n is a, c, g, or t
  variation 722: note = note, n is a, c, g, or t
  variation 1195: note = note, n is a, c, g, or t
ccgcttgggagcactcatttttagcttggccaacaccgtcttcggtgtgttgatgcgcgtattctcttgttgtgcggctaatgcattgtgttccggcaaaaacgtcccgaaaggcaaatgaaacaacgagtgcaacgtaacgccattggcattgatagccgcaattccggttggagcggcaaccactgcttttttataggtagtttgaatcaaatggcgcaacaaagtggtttttcccgttccggcctttccggtaaggaaaacattgttgtgtgttccgttgataaaatcgagtaaaagttgtgctttttgatcgaaatgaattgccatttgctgttttcaggtttggcctgaaaaagtacaaataaaacgctgctcggaaggtatgggcttangaaatgctnacttcaagtccngctgcacgaaaggcttgaagcatgtgacgcgtattgtgataaataaccacgcgcaaggtatcgcccaagcgtaatttgatcatttttgaaatggaaatggctgttttgatgcgggttaaatcnttctgttgtgctntttccaacanttgnagcaactctttttgttgtgcaatgaattttgaaatnacngcattgtctaaagccgaagactgaaaaacnggnttggttgatttnaaggtcttcatcttattgagcttttctttgggcaacatggtattcgcaaaataattgccnaaccaactnctnttaaactgggtgtttttgggnaatgaactgttgttcatttgttgggttatntcaggaatgtaaaagtctccgtaatagttcaaatgctccagacantccaatgcgttccaggcattttcatgtggtttttgcaacaattgttgaggaactaagagtancaattgttctgcgcgctgcaagttggtttgcgtttgttgggtaaggtcttgaagaagtgaagtcgtagccgttttcatgtcaattaatttttagcaaaagtcagcagcatcgcaaaaaattatcttgattgagatcaagatttcttcaacctngagagtgtttcaggagccatgcgtaaataatgcgcaatgtatttgtgtggaatttcctgaaaaacttttggactacgctgcaaaaccctttcatagcgtttntgtggagaagcngtcaataaatccagttcgcgttccatttgctgatacaccaactcttgnagaatttgcacccacaattggcctaatgcttcatcactttcnaacactnttacaaagcgttctttggagatgatttttacttcgcattgcttcaatgcctgaatgtaatanggagaaggngcnttggtaatgtaggcttccaaatcggtaacaaatgagccagcataaccaaagcgaatggtgtgctcagtagcctcatcgtcccaacaaatgcgtaaactgcccgatgaaacatagaacaagcgttgatctgcggtgtctttatgcttgatgatttccatgcgtttgagcaccgttttactgttccaggtaaattcgggatggagctctattgaatcgtgtaactgctgaatggggttgctcatattgcgtgcattttcatcttcgaaaatagccattgacaataaaatgacggtttgtaaacaatcggtttgtgaaatccgttttactttcacaaaaacaaataaaattatggcaactgtaacattaaaaggaaatacaataaacactgtaggcgaattaccagaagtaggaagcgctgctcctgattttacattggtaaaaggcgatttgtcaaaggtgtctttaagcgattttaaaggtcaaaaattagtcttgaacatttttccaagtgttgatactggaacttgtgcgatgtcggtaagaacatttaacgaaaaagctgcgggtttagaaaatactaaagtgttgtgcatttcgcgtgatttgccctttgctcaaaatcgtttttgtggtgcagaaggcattgaaaacgccattacactttctgactttggaacaggaaagtttggagaggattatggtttaacaattaaagaggggccaatggaatatttacattctcgcgtggtggttgtagttgatgaagaagggaaagtcgtttatagacaacaagtacctgaaattacagaagaaccggattatgaaaaagcgttagcggctctataatcgaaaaagcataagacaaagtcagggaatacgtgaaggttaaccaaatcgcggaagcgagaaatcgaagcgtgttccctgatttttatcagaatgaatactgatttttcctcctaataattctacaactttcttcacagtagtaaggccaattccagagccttgttttccgtagcgatcttccttattaatggtttcaaacagttcgaatattcgaacttgatcttctttagcaatacctgggccattgtcttttacatagaagtgcaaaaagtgttggtcttcttgtatgccaatttctatttcgggaacatttttgtcgttgtatttaatggcatttactacaaggttaagcagtacttgttctagcgcagaaatattcacctttatgtttgaaaggtctgtgttccagtttaattgaaaagaggacttgtttcctataagctgttcaaatttttctctaaattcccagagatcaacattcgttggagtaattttttcgagtttactgctcttactgtaggccaataatccttcaaccatatcgcccaaccggtctgcagattgcttaatcatactgagaaattctttctcgttatcgtccattttattctccatgcgctcgttcaataaatcggcaaggagcgaaatgtttcccaatggacttttgatatcgtgggcagcagttgttgcaaacttttctaaatcttgattggtcgattttagctcatcgttaaccgtttctaatcggtcttttttacgccttaattcaagcaatgtaatcacttgatctgagaggattttaagcgtttcaacctgctcttttgtaagctgtttgggtttgttgtctatcacgcacaaggttcctagtggaagcccgtcttcattgaccaaaggaactccggcataaaaggtcacatttgggtcacctgttaccagcggattatcgtgaaaacgctcatctttcgtagcatcaggaacaacaagcgtattgtctatgtctaaaatggcatgggcacaaaaagcatacatgcgtggcgtttctgtagctcccaatccttgagcagatttaaaccactgtctatcctcatcaattaagcttaccaaagcaataggcgtttggcaaatttgcgaagcaattttggtgatgttatcgtatgtttcctccggaagtgtgtcaaggattttataagactttaaagcctttaaccgctcttcttcttgagggtgtttttctggggttttcatgtgctaataggtcaattgattgaaattcaaagtaaaggatatcgtggggaataggtagaagttatacggatatttctattaaatcgtatagtgtacccttggcaaagccgcttctgcatccaattttagctgatctcttagcttcaatttcaattggtgagaggcattgggctcaccatgatttaacaacactttacctggtcttgttttgaaaccagagagccaatcgagtaaatcgttttgatcgctatgagcagaaaggctattcatttgtttgacttcggcccttacgcgataccattctccaaaaaatttaatttcatgtgcatgttctgccaatgatctaccgcgcgttcccatggcttgaaaaccagctaaaagaacagtgttctttggattatcaaggtgacgttcaaaatagtgcagaatacgcccaccagttaccattccacttccggccaatacaattttaggcgaagtactggcgaccaattcttgagattgttcataagacgtaatgaggtaaacttcgtcttgaatcagctgaatagcttcttttgaaagcgtatgccactctggaaaatcaaaaaacacttttgtagcttcaaccgccatagggctatccagaaaaatattgagattgggaatttcgccagctactttgagttgagtgagcaagtataaaatttcttgggcgcgctctaccgcaaaggtgggcacgaataaaatgcctcctttttgatgcgtatgattaaccacatctttcaaaatatcttttgggttttcttcggggtgtaaccgatctccataagttgattccaataccaccaaatctgcattgtgcatgcgtttgggcgggtagaggagtagcggtttctgttgcccgatatcgccagagaaaacaagcgttttatctccagcaaaaatctcaacaatggctccacccaatatgtgtccagagtggtgaaattgaaatttaaaatgaggagtaataaatactacttcagaatttttgtgtgcaacaaacagcggctttaccttttttgcatcttcaatggtataaagcggcaatgcttttttgtgtttagaatatccgcgcttgttggcttcagcagcttcttcttcttgaattttaccgctgtcttctaatataatctgcgttaaagccacagtaggatccgtagcatgaatagctccattaaaaccttgtttgaccaaacgtggcaaataccccgaatgatcgaggtgggcatgtgtaagaataatctcatcaatttcatgcgctggaacaggtaaatcttgccaattctcttcgcgtaaatgctttaacccttggaataaaccacagtctatcaatactttttttccgtcaaaagagagcaatgtttttgatccggtaactgttccggcagcaccgtaaaaaataagatctggttggtttgttttcatgttcgaaagttacaattaagtgcgatgctggtttactgaaaagaacttgaagagaagaaaatgagcgtgaaaagtcatccaaacaattttaaaaattggaaatcatcaataagtttcgtcaatttgttgagcatcaaactaaacctaaatccatgaaatcactttacattctgattttctttgtttcagtaacagcctttgcacaagctcaaaaatttgctccaattggtgccaaatgggtgtattcgatgacgtatcaattctatccgaacaacaattatgttgaagtcaactgtattggtgatacacttattgaaggaaaaaattgtcaaattataacctctcctcaaggagacggtttgtacaatgtatctataacagataaatacgtttactccaatagcgataccatctttatttacgatacggcattacatgaatttggtgtctttcaggtgtttaatgcccaagtaggagacgagtgggcgtttatttatacaaataactctacggattacaattctggtagcattccagacaccatgcactttcatgttgattccaataccgttgcttatgttaacggagacacgcaacgtgtggtgcatacaacaacagagctccattgttcgaatggaggaacgcctactttttttcaattatttaattcattcaatgaacgcattggtgatgttaattttcctttttatgtcgatggatgtttaggaatatcagacttgccatttatacgaggtttgcgttgttattcagatgctgaaattggctcctacgaaacgggaatagttgactcttgctattatgtatacaatggaacttcagtagaagaaatcaatgctgaaaatgcaattaacgtttggccaaatcctgctcatgaaatgttgaatgtagagttagtagaaggcgttgaagcattgcgtttaatcaatagcaacggtcaggaagtcttggttcagcaagtctcaaaaagtacatcaactcaaacccttcaactgaacctttcagctttgccagcagggatttatcagttggtggcaaccagtaatcaaaaagtgttggcacgcacagtagtgaaagattgatgcgtagagtcggagttgtcatccaataatttgcgaatattgcagcaaaccttatcgttaactgttaagcgataagatgaatttgcacattccatgttattcaactccatagaatttgccgtatttcttcccctcgtttttgggctgtattggtgggtatttaaccgcaaccaaacactaagaaatgcctttctattggtagtaagctatgtgttttacggctggtgggattggcgctttttattgctcattgcttttagctcattggtcgattatagtgtaggcctgttcctttccaaaacagaaaaccaacaacagcgaaaaatccttttaggcattagccttttcaccaacctagggctattgggctttttcaaatactacaacttcttcatcgaaagttttgctgaagccttcaccgtgttggggcaaccgattcaagcaagtagattagcgataattctaccagtaggcattagtttttacacctttcaaacccttagttactccattgatgtctaccgcaaaaaacttgagcccacaactaacttttgggcatttttcgcatttgtgagcttttttccacaactcgtagcgggacccatagagcgtgctactcagctattgccacagtttttcactcctaagaaatttgagtacaacacagctgtagatggaatgcgtcaaatcttgtgggggctgttcaaaaaagtagtcatagccgacagttgtgccgtttatgtcgattgggcatttgcagatgccgcccaccttccgggaagtaatttgtggatagcagcagttttgtttgcctttcagatttatggcgacttttcggggtattcagacatcgctattggaacagcgaaactctttggctttcgcctgatgcagaactttgcctatccctatttctctcgagacattgccgagttttggcgcaggtggcacatttcattaaccacttggtttcgcgattatgtttacatccccttaggaggaagcaggggcaatcgctggcaaactgtgcgcaatacattggtgatatttgttgtgagtggtttctggcacggagccaactggacattcattgtttggggattgttgaatgcgctgtactttttaccactcattttgcaacagaaaaaccgcaggtatttagaagctccagcgctcaattcctggaaaacaccagtacaaattgcagttacatttttccttaccattatcgcgtgggtgtttttcagagcagataccataacacaagccatgcagattttgcaccaactattttcaacttcagtgtttaccctgcaacgctttgaaggcgaattcaacgtgctgatcacttttgtgatgatagcactcctcttggttgtagaatggagaggaagaacgcggcagtatgctttagaaggattacaatttcaacctgcagcatggaaacgtaaagccgtttacttggcgttgattttcgccataggcatgtttatggaaaccacagaaaccccattcatctattttcagttctaatgaaaaagtggatcagaaatagcgtgttgttctttttgctggtagcagtagcctatccggtgttggtgattttgtggggagaactcctcccggttaacggattcaagaagaacctcatttatgtgcaacaaggtggcggttttacgggaaaacgcttgcaagaagtgaaaaacacatcagaggttgatgtattgtttctaggctcatcggttgcttaccgcggattggatacacgtttttacacctcaaaagggttgaaggttttcaacctgggaaccagctcgcaaacgccattagaaacacagttgctgttagaccgttaccttcaacaacttcaacctaaattggtggtgtacgctgtttctcccgaagcattttctggtgatggagtagagtcggctttagatttaattgcgaacgatagcattcaaaaagacatgtactcattagcgctgaggttgaacaacatgaaagtgtacaatacgctcatttatgcgcaatacaaacagctcatgggcaatcatttgcaacaacatcccgattcggtaaatgaagtagaccgttacattttgggtggatttacagaacgaaaaatggagcatttgaacccaccgatttgggatacaatggcatggacatttcaacccgaacaaattgaaagcttcgataccattttagcagcatttgcaacagaagaaattcctgtaatcttggtgcatcctcctttaagcccttcgttttacaaggcacacaccaacaatgcagcatttgatcgtttaatggaaaaacggggtacttatcaaaactataacacgatactttcgttgaaagacacgttgcatttttacgatgaactgcacctcaatcaagatggcgttgaattgttcaatcaacacctctatcaaagcaaggcatttcaacaactgctgaagtaaaggttgtattcccaactatttttctaattttacgtctatccctttattcctctgtttatttgaaagtatcggtttgcccgatgctatgattgtatgaacttacccgttgtggtacctaaatggatgtcaaatgaacagaaaagatttcttaaaaggcatgggcttagccggagtaggcctttcacttcccacatcaaaattatggagtaaacctttgtcaggaggagatacaacctcagacagttgtgtgttaattccttcagaaacagaaggtccgtttcctttagacctaacggagaattctgctttttttcgtcaggatgtgcgcgaagatagagatggagttcagttcaatttaaagctaaaaatcatcggtcaatccaattgtgaacccatgcaaaatgtgcgagtaaacatttggcattgcgacaaagacggactttactcgggttacgacaacaacatgaatccgggtcaggccggattgacctatttgcgcggataccaaatgacagatgccaacggagaagtggagtttaccacaatttttccgggatggtatgacgggcgaattacgcacattcactttcaggtatatgtaagctcatcgtattcagtggtgtcacaattgtcgttcgatccggataccaagaacagcatttacactgataattcatcgatttacaccaatggtgtagacccgatgacctttgcacaagacaacatcttttcagatggttacgattaccaaattgccacattaacagaaaacagttcaaccggtggttgggaaagctacttggaagttaccgttcaaggagaaggaactgttggcgtagggcacatcgaaaaacaaaatgccaaacagttttcattaggacaaaactatccgaacccttttgtgggcgaaaccactattccggtgagtttaaatcaagcatcagatgtaagcgtagacctttacgatatgatgggacgcaaagttgcttcagttgcaccacagagcttttcgtcaggcgaacagtcgattacattaaacatggaaaaattaggcttaccaactgccaattacctgtatcagataaaggttgaaaattctaacggatcatatgttgacagtaaaatgatgacagcctctcgctaaacctaaacctatcctccctggttcatttttacttgtgttagaacagaaaagcaattgtttctttcctatggatcgaagcagttgctttttgttttgtataagcttttctcaagagtttcaattctttctcagcaacatttaagcattcatttcatatgctgtttttttctaaaagattactttagaagagaacaaaaccattgtgcaaaaattgcatcacgctaaaacgcatagtttacatcaaatccttggcgagaatccaataggataagtgcttttcgcacagttgttttgggaaaataatgggcataaaaaaacctcctgattatggacaagaggtaacccaaatgttttcacaacggaataatccttattgtgaatcgcttcaaattgttaaacgaatataagaaaactaagctacaaatagatgaaaagaattttaggactggatttgggcaccaattcgattgggtgggcgctgattgaaatcgatcatgaaaagggaatcgtaaaaataatgggattaggttctcgtattttaccaatggatgccggagaagtaaaaaaatataaagaaggaggcaaaattgatagtactgcagctcaaagaactgaaaaaaggggggcaagaagattaaatgaaagataccttttaaggagagatagactcaacttagttcttaatttgctcaatacacttcccgaacattacaaattggaaattgatttcactaataaaaaaggtgaaaagtgtggacagtttaaggccaatagggaacccaaattggcttatctgcccaagcaaaaaggtgagaaagcgaagtttctctttatggattcttataaagaaatgcttgatgacataaatgataatggcgttgaaaatgtaaaaggaaaacgtattccttatgattggacactttattatttgcgaaataaagcattttcagaagaaatcactttagaagaattggcatgggtgcttttgagttataatcaaaaaagagggtatgaaaagacagaggtagaggataaatcaacaaaggaaaacgagatagttgaggaacttgatttacgggtaaaagaggtgattccccaggttgacgaggaaggtaagcacttttacaaagttcatttagacggcaatgataattttgtttatagtgaatacactgatattcagatgacatttaaagatgacttaaaagaaattatcaaaacctccaaagtagatgagcagggcaatattgataacaaaaaaacagagttcacgattgttgatatttaccctttggaaataaaggaagttcattatgaaaaagatgatggaaaacacaaatacactttaatctatcaaaatggctggcacgagataaaacagccaaagaattacaccttcaggtataaaaatgcgctggataaaccttttgactacatagtagaaacggtttatgactcaaaaggccaactgaaaaagcagcaggggaaagaaagaaaattgcgagagcctgatttaagcgatacctcaagtgattggactttgcttaaaaagaaaacggaaaaagaagcattgacttttaacattgaactaggttataagaataatgacggaagtgccaaaaactacatatcccccaaaatctatcatgttctaaagagtgatgccaaaagtaaaactggaaaacgtaccaagataatcggaggaatgtttcaggttgtggacagggatttctaccgtgaggaactcaaccaaattattgctacacaaaagcaatttcatacgagcttagaggataaacaagtgtttgagcaatgtatcaaaacattgtatcccaaaaataaaaaccatcaagaaactttgttgaaaaacaaagatgccattcagcatttgttggttgaagatgtcctgctgtatcaaagaccactaaaaagcaagaaatctgagatagctaactgtaagtacgaaatccgttattggaaagatgttgttaataaggataccggtgaaatatttgaaaaagaagagcctgtttacatcaaagtggtttctgcctcacatccttattttcaggaattcaggatttgggataagctacataatttaaggttaattcaacttgaaaagaaaattgaaggaaaatcgctaacgaatcaagacgttacaaaagaatacttccaaagcaaaaaagattatcaagagctttttgaagaattgaataaccgaaagtctttgaaccaagaccagtttctcagctattgcaaaaagaagtttaagattgatcataaaaaaaatgacagcaattatgcttggaatttcccggaggatgaggaaataaaaggcaatgagacccgagtaagttttgccactcgttttaagcggtgtggatttaccgaatatgctgattttctcactcaggaaaaagaaagggaactatggcactatttgtattcggtgagttacaaagagcggacgaataacgacaacaaaagcggaattacctttttcaataactattttggagattttgatattgatgaaaccgtcaaggaaaaaatcgtcaatgattttgtgaactacccgcaattcccatcaagatattgtgcttattcggaaaaagccctaaaaaaattgttgccgctgattcggttaagagaggagaaagaaacagacaaatgggtaaccgaacaatggtacagaaagtggaaagaggggcttattatccgcgaagaagaaatacttcaaaagctaaaaggaattgattttggtgcggaaaatattgactattccgaagcagttgatacaaatgttgatttgaagaaaggggaaatcccgtttcccaaaggtttgtttaatgctttcagaggtattaaaaagcctgaagattttaacaaactcaaccttacccaagcttcctatttggtgtatggtcgtcattcggaattggcatttgccaaacaatgggaatcccccaaacaaattagagacgaattgcaccaagaattaaaacaacattcgctaaacaatccgattgccgaaaaagtactgctcgaaatgatgcaggtggtggctgatatatgggattattatggcagtggcattgagaaattctttaccaaaataaaccttgaagttggcagggaacttaaaaaatcagccaaagaaaaagaatctgaatccaaacggatgtcgggaaaccgagcacaaaacaagcgaatccgtcaggtattagaagagtttttggcacataatccatataatgctaacccgaaaaaccctgaccattttgagcgattgaaaattatagaggaaggtgcagaacacacgaaaaataccgataaagaattctttaaagacaagtcatacagtaaaaacgatatagaaactattctcaaaaaagcacatatcaccaaagcagattttgagaaatacaagctttggatagaacaagggtatcgttctccatattcagggcaaatgatacaaataacagaattgtttgatggtgcgaaatacaatattgaccacatttttcctcaagcctctatcacgaataattcattgagcaacaaagtggttgttgaggttgaattaaacaaactgaaaagtgataaaacggctagggctttcattcaatcccaaaaaggacagccttatttaggtattccggtgtgtacagaagatgagtttgtaaggattgtgaaaacacagttttcgggaacgaaacgctacatacttctttccaaagacattcctaaagggtttacgaatagccaaatgaacaacgctcgtcatattgcccgaaaggctatggaattgttgagccatattgtgagagaaaagggagaagtggaattccgttccaaaaacgtacttccggttacggggatggtaaccactgaactgaaacgagcttggaagctagatcaagtttggagagaattagtatcgccaagatatattcgtttgaataaacttattcagccggaattatttaatgaagataaagaagaagacaagtcatatttgtttggtagttggcaaaaagcgaaatcagggcaagattattttgattgcaatctggacgatagcattcgggaaaaagacgagtcttataacatcaagcgaattgaccaccgccatcacgctttagatgctttaattgtagccctgtgtacagaagaacatgtgcattatttgaacaatgtcaacgcaaataaaacaactgaaaattttggagagcagaagaagttggaaaactaccgactaaagctaaagcaaaaaattatgtggtcaaaacctaaaaaggaaaacccaaaagaaaacgattggtatttaatgtttcctggcgaaaaaaggcaagataattatgaaaactctcgcagggattctgtcatagaaatgacttatcactttaaagaatttgactcatttaatagtgattacaaaaagatgattttgacggcacttcaacagacgattgtaacattcaaacaaaatttaagggtaattaataaaaccgtaaatcgctataataacacacctaatagaaacaagtttgaactgcaaaagggtaatgaagttggaaataaagtcaattgggctattcggaggagcttggggaaaggcacgttctacggaaggattgatgttggaaaacgggaaaagaaacaattattaaaaaatatcgacttcttttttaattatcctgatgcaatagtggataaaaatttaagaagccaaattgaatctattaaaattgaaacaaattcattagaaaagtttgaacaaaaactgaaagctaaattcaagaatgagaaagtaatgtgtattgcttttcaggctgcaagtaggttcaatagcgaattgaacattacctttaataaagaaaaaataaagtccataactgatactggtattcagaaaattctaaaacgacatttagaacaatttgatactgtcgaactcccttttgaagaggctttggaatattacgatgcagtattagagaaacatgagttagaggccattgtaaacaatagcgaaacagaattcaagtctgttgatgaacttaaacaatatctaaaagcgaatgattttaaatatgaaaagacgaattattcaaaactaaatgtattcatagcacaagtttcagaaagggatttccgaaatgaagaacagttcaaggtcaaattaaaagaacatcctgaaattgcttttacacctgaagaaattgataaaatgaacactcctgaaaatttgagaaagcttaatgtgaataataaaggagaagaaaaaaatcatgccccaattagaaaagtgagaacttattctgggtttggaagtgagaaaagagtgagtaataacgaaaactccaataagtatagtcaatttgtaagagtagataaaggaaccaatttctatatagcagtatatcaaatagttgattcttcaaatgtgagtggaaaaaatcccaaaagggtttttagagaaattagtttatttgacttaatagattttcagagttcaacaaaaacaaatgatttacctgttgaaaaacaggtttttagtgaagacggagtgaagtatcagtttttattcactttaacacaaaatgacacggttgaagttagtacgaatgaggctaaattgatttatgcatttaatagatttacggggaatgaactctactttaggccaataaatcactcatcggagatatataaaaatgaagtggatttaaaaccaattaatcctaaaacaggtaaaaatccaggatctcaggtaaatgaaacaactagcgttaacggagaacagataaaaaatatttgttggaaactcaaagtagatcgattgggaaacatttctaaggtgtgaaccaataaaccagacaggtttctaaaacctgtctggttttttctcttcggtttaagtaaacaatcaaaaaccacctccaaagtttcaaactttggaggtggttcaatagcattcaattttcaaccatgcaaaataaacaacaactagagcctgaagggatgtaccacatctacaatcgcgccaatggccatgagcagcttttcttgcatgcagagaattaccgtttctttttagaaaaataccagcactacatttctcccattgctcaaacgaggttctacaactcttccaaagtttggaactttggaagagttgtaaaagcagaataaagactcgaaatagatggagaaatattttgaacatttaaattagatcagtctggttttctcttgatcaatagatggattaaacatgcaggataaaaaagcacaactagagcctgaagggatgtaccacatctacaatcgcgccaatggtcatgagcagcttttcttgcatgcagagaattaccgtttctttttagaaaaataccagcactatatttttcccattgctcaaacctattgctattgtctaatgcccaatcattttcattttgtagtgaagataaggagtgaggaggaattgctaggttttagtaaagcgattagaacgacaactcttccaaagttccaaactttggaagagttaaaaggaaatgaagaactaaaagagcaaaacttatccaaggcaatttctaagcagttttcaaaactctttagttcctacacacaggcttttaataaagtcaatcaccgaaaaggaagccttttcatgaagaatttcaaccggaagaaaatctccgattccaactacctcctcaaactcattcattacatccatcacaacccagtagaagctaggctagcaacaacaccaaaagattggaaatacacttcctatgctgcattcatttccaatgaacctactcaacttgaaagagcagaagtgctagcgttgttcaatgaccgcgataatttcatctattgccatcaagagcttccccaattgacgggaatcgaactgttctaagcacgctatacattaagtcaggattaatttttaaaggaatacagccttttttcagttgaaaaagaataatttgaagacgaacaaacccaactttttctgaaccgaagatgatagattatgattaaacgcacgctctattttggaactcctgcctacctcaaaaaagaaaagcagcaactaaaagttgaatttccggaagaagataaagaacccaaaaccgttccgattgaagatgtcggcatgctgattctcgatcatccgagggtaactgttacccaagctttactgagtgctttaatggacaacaatgccgctttattgagttgtgacgatcgccaccttcccggaggactgtttatgcccatgacggccaaccatgtctataccgaaaaattgcgctatcaattagaggcttctgaacctttgcgcaaaaacttgtggcaacaaaccgtaaaagccaagatcttaaatcaggctgcggtattgtccatttacaatcaaccggtagaaaacatgcactattgggcggggcaggtcaaaagtggagatcctgataattacgaagggagagctgcggccaattattggaagcgaattatggacgatcccgaattcagaagaggtagagaagagcctgctcccaataacttattgaattacggctatgccgttttgcgggcaattgtcgcccgaagtttggtgtctagtggcatgttaccggccattgggattcaccacagcaacaaatacaatcctttttgtttggccgatgacattatggaaccttaccgtccatatgtcgatttggtggtactagacattcaggagcgattcgaagaggctgagcttgaacagttgaccaaagacgtgaaaagggaattactgatcattcctacattagacattgaaattgaaggaaagaaaagtcctttaatggtggggatgcagcgaacgacagcaagtttgatgcaatgttttgagggtgtgaaacgcaaaattgcttatccactgctataatgaataaccttttccaaaggttcaaacgttggaaaagatggccaatagatatgaaatcaacagaacgttttaacgcttatcgcatcatgtgggtatttgtctattacgatttgccaaccgacaccaaaaaagaccgtaggcaagcggctttgtttcgcaaacgattgttagaagatgggtttaccatgatgcaatattcgatctatacacggcattgcgccagtcgcgaaaatgcagaagtgcacatcaaacgcgtaaaacgctctttaccaccgcgaggagaagtgattgtttttcagttgaccgacaaacaatttggcatgatggagtttttcaaaggaaaaacagaagccgaaaagcccgatacgcctcagcaattggaattgttttagcctcttttttgaaattctaagtttggttgtaacctgttgaaaatgaaaaaggtcaggcacggtatgttgtgtctgaccaaggtacaattcaatttgaaagcgattcacaactagctctacaaattcgccaatcacatcaagttgtgtctgaccaaggtacaattcaatttgaaagcgattcacaacccggcacaccttggtatttcgacacatacggttgtgtctgaccaaggtacaattcaatttgaaagcgattcacaactgtaatcttcgaaagaatcgaaagaaacaagttgtgtctgaccaaggtacaattcaatttgaaagcgattcacaaccgcgcatggcgttgaatacagcttctctctgttgtgtctgaccaaggtacaattcaatttgaaagcgattcacaacttgggcgtctagcagcaatatcttgcttcagttgtgtctgaccaaggtacaattcaatttgaaagcgattcacaacgcacaaacgcctttaatatgctaaccatgtgttgtgtctgaccaaggtacaattcaatttgaaagcgattcacaacgtatatcaaaaggtatgtagctggcattgtgttgtgtctgaccaaggtacaattcaatttgaaagcgattcacaacagcgtgttataaagtcagcgccttcaaaagttgtgtctgaccaaggtacaattcaatttgaaagcgattcacaacggaagaacacagaggctgttgactcattgggttgtgtctgaccaaggtacaattcaatttgaaagcgattcacaacgaattaatcgagctctagtataattgttccgttgtgtctgaccaaggtacaattcaatttgaaagcgattcacaacaaagctgcaacgcgaacattacgacatctgttgtgtctgaccaaggtacaattcaatttgaaagcgattcacaacaaatgtgaatgtgatatttaatcgttgcttgttgtgtctgaccaaggtacaattcaatttgaaagcgattcacaacttcttgattccattttagcccaatcatcaggttgtgtctgaccaaggtacaattcaatttgaaagcgattcacaacatcggcatcaaacttgtctttattttttacgttgtgtctgaccaaggtacaattcaatttgaaagcgattcacaacagaaggttacaccgatgtgatttccatgcagttgtgtctgaccaaggtacaattcaatttgaaagcgattcacaactaaactcctgaaaacctttagtcttcatgtgttgtgtctgaccaaggtacaattcaatttgaaagcgattcacaactatgctgcgtccagttgtagaaggtactcggttgtgtctgaccaaggtacaattcaatttgaaagcgattcacaactgaatggcgctcacacgctcattaacttctgttgtgtctgaccaaggtacaattcaatttgaaagcgattcacaacaagttgagccagcgcgccacattctatatggttgtgtctgaccaaggtacaattcaatttgaaagcgattcacaactttttattgttttcttgcgttttgtcttacgttgtgtctgaccaaggtacaattcaatttgaaagcgattcacaacagtttttgattgatgcgatcaaactttttagttgtgtctgaccaaggtacaattcaatttgaaagcgattcacaactaactcctcagttaattctctctttactttgttgtgtctgaccaaggtacaattcaatttgaaagcgattcacaacaacagattggaggatgtgttatgatgatttgttgtgtctgaccaaggtacaattcaatttgaaagcgattcacaacttcctatattctcatccaaaatagcttcttgttgtgtctgaccaaggtacaattcaatttgaaagcgattcacaactaatctttccgaatttatctcctgagtgtgttgtgtctgaccaaggtacaattcaatttgaaagcgattcacaactcaatttgtcttttacgctctgctacctttgttgtgtctgaccaaggtacaattcaatttgaaagcgattcacaactgtacctactatatgcaagactttttaagagttgtgtctgaccaaggtacaattcaatttgaaagcgattcacaactttgtggatttctacgtttttccattttcagttgtgtctgaccaaggtacaattcaatttattcacaggtttaattttttataaaaggagttcatgatccctctgggattgaaagcttgtgttttgatacaggtagcactttgcgcgaatgaggttatgatcaagttcttcaggtcaattta

SEQ ID NO: 4553 - DNA, 19257 bp, synthetic construct
  source 1..19257: mol_type = other DNA
  misc_feature 1..19257: note = Synthetic
gtcacgatttgaatattaaagagaatcatgatacctttgtcttagaactgaaaatagttttagatgctgaaaacaatcgcagttgatgatgaacctttggctttactgattttagaaaattattgtcataaaaatgctgaagtagaattggtgaaaactttcacgaatctgaaagatgctgccaaatatttacgtcagtttcctgtcgatttcttgttgttagacatccagatttctcgcaccaacggaatggaattttataaaaacttggaggacaaaattccagttatttttacaacagctttttcagaatatgcagtcgatggttttaatgtttcggctgttgattatcttctaaaacctttcgattatgagcgtttttcagaggctgttcagaaagtaaaaaaaatgtatcaagaagtaggaaacgaagagcaaagttttttgagtattcgcgccgattataaattgcataaaatagcttttcaagatattatttacatcgaaggtttggatgattatgtgaaaattaatttaatagatcaaaccaaaattgttgcaaaaatctcgatgaaatctctattagagaaattaccttctcatctatttgtgcgaacgcatcgttcttatattgtgcaaattaatcgagtaaattctgttcagaataaaactttatttcttgatgaaatagaaatcccgataggggatacttataaaaatcaagtgatgcaatattttaaattttaggttttgaagcaagtcaaacaatcatataatttattagaaaaagtttttttttcgaatatttttttggtttttattgttgtgtttttgagcttagaatcgcaaattaaacaaggatttccgttaaattcattttctttctacggtttggtttcttgcctaactttacttttctatttgtatgcttatcgagtttctccgaaactaaaatcttctgataatccaagaacagaattttacataaaatatagaaaatctattcaggtttttgctgtttttttaggtttttcagctattattttcagcttaaatttattatcaaaaataatctcaaatattcatttgatttcttaccgagtttatttgattttatttttatcaaccatcttagcattagcttattacaacaatcggtttggaatttctcttagaaaaattacttggttaaaaccatttctaattggttggacttgggcaatttcgactgtacttttaccattgttttttttgattttagaaactggtaatgattataaaatagattctaaattctactttcttttcatacaaacttttatgtattgttcggtgaatgcgattctttttgacctgaaagattttgaagatgataccaatagaaaactcaaaacttttgttgtgaaatatggttatcatttcacactttattatatcattttacctttgttgtttttaggttttttaagttttcttattttcggaatttggtatggattgcctttacatcgaattatttttatgttgattccgattcttttgttagcagtttttacttttttattacgtaaaccaaaaccgatcttattttatttgatatttattgacggaatggtttttctaaaagcagttttcggaattttaagtgttgtactttttgaataaaaaaatcctctaaaattaagaggatttaatgatttattttctgaggtaaatgttcccgaattgggatgttaaattggtttttggtgtttgtccagaatttgctgttaaatgcgtcttgaatagttctgaattttttccatcaaaaggaattttcatattcgtaaatatttgtccgaaacccgtttctacaattagttcgcccgaaatattttcttttaatgtggcatcaattccaccataagttgcttttacattaagtggcgcatcaaaattggtaatttctactaaaccataaaccgattctagattggttttataattttctggaattttgatttctaattcaatctctatacttgttcctaaattcacattttctggcttcaaattatgctctttacaatacaatttgtagtcattcatagaagcgaaagtcaatttctctgaaccattttttatagtaactttctgtggtaaactttcatgatttttaatcattccttctaaagagaaaacttttgcatcagatgattcttttaattcgaatgcatcattgttttttccgtcgttaatatttactgttccagtaatcaagatttcatcatttttccaagttgtgatcttgattagtttaggaaaatcaaactttaaagaaatttcttgatctttcttaactttatatacttgtttgatgttgttctgagcaaatactagatttgtcataagaacaatggtgaagattgctaactttttcattttgcgcgtaaatagattttatcatgatctgcttttaaactaacattgattccgcctccatttatttttccacttaattgattattgtattgagttaaatcgttttgtttatcaaaatcaatattcaattctggcgcaattaaaatatcaccgtaagatgtattcatttttatgtttgctttgacatcttttggtaaagttgtatctacatgaccataaatagaaacgatagaaataggacttttcatattcttgttaaatacaacatcaacatcaccatgtaaggttttgatggttgctggacctgtgcaattttctattttaatcgagttgaaaacaacagagatttctaactcattttctaagtttttcaaagaaaaatcattaccaaattgcgattgataatttatagaaacaaccattcctttaggaaccaaaattttcacattttcagaatctacattttttatctgatttacttcaaccgttccgtttttatctacaacactaattcctaaacctgtgttgtcttctaaacccatcgagttaattgcttttaaacctttggcacgttcatcttctttttctggttttccttccaaagaaaaaacgatttcatttccgtcatatccttcaatctgtgcttgtcctagattgagttgtaatttgcctgtatttttctttaccttaaaactttttgtaaccaaagtttcagattcattttttgttttagtttgctgtgcttgcaaagtcatcgtcagaaacgaaaacatgattaaaattgtctttttcatatcttttgttttttaattatacatcatcgcaacgtatgcttcatcttttacgtaagcccaagttgttgggtcgtttgtcaatgacaataatttttgttgaacttctttgttatttatcgaattgtccattttagcaagaaggttgatcaattctacttgcactacaggatcgtcttgttttataaatgtttctataattttttcagcaacttttggttgatctgcttgcgtagccagtaattctactgcggctaatcgtacattgctattgttatcttcacttgcgctataagccaataaatcaattatttgttgatctaattctgtttggtttccagcgattataattccattcaatcggttacttgcagattctgtatcctttattaatcgaataatagtttgtttttcagaatcttctataattgttgtttttacgattgatttttctgattttttttcaattaaatcattggttttagatttgattttactttgattattaattgaattttgagtgattttcaaatcatttttatgtaatttagaatctatactaggttttttatttattaactgattttcattcttaattgtagtttttttgctttgatgttgaacaatttctacagaatcaggtttattattagtcaaataaataaatgttcctaaaccaaaaactaatagtacagaagccgcaatcgaccacgattttatggtaaaagtgtttgttacttttttagtttctttttgttgttttaattgttcgagaattttattagataactctttacgaggttctaaattatcaaatgcttctctgttatttttaacaaaatctttcaatggatcattcatgatgcaagttttgtgttaaggtttgttgtattttcttttttgctcgatggtattgacttcttactgcaacattactcatacctaataatttggcaatttcctcttgcgataagtcttcaaaaagataaaggtttacaattgttcttgtttctgttggtaaatctttaattgctttttgtaaatcatctattttatattctaatgtttgtttttctactaattcttcatcagaattatcaattaaaattgttttttctacatcagaaaaatagattttatttttcctcaaatatgaaatcgaacgattgattgcgagtctttttagccaagcttcaaaactgttaattgtttgtaatttttctaaatcagagaaaacagaaataaacacatcttgtaaaatatcttctgcttcgccagaatctaaaatcaatcgactaatcgaattataaactgtttttgcataacgatgatacaactctgtaaaagcagtttcttcgcctttttggcaacgctctataagttctaaatcagctattttaacagtaaaagttttcaattattaatgatcttctatttatcagacgcaaagtagaaaattatgttgcacaattttttagaatttttttaagaaatattgatttaaacaattttttgatttagaaataggaagattatagaagtgatattataaaaaaagcttctaatttagaagctttaaaatgtttatttaatttattttcttagcgcatttattcgcgctttgttccgaccatcaagtaaagaaacgcatgcccaaattgcagcaggaagccaaccgataatagtaatttgtaatataaaacataaaattccatgtaagattttacctcttaataaaaatgaaagccatggaaaaattattgcaattaggatcatttattttagattaattttcttcaaatattagaaaaaaaattgaattacaatattttgtttgatgttttgatttctataagaattgatgtttttactacttttttaataagattttattgttctttataaaaattcacatcaaatgcttctgtgagattttgaggttcttttctttttttatggttaagttcgtgtcgttttttggacgaagtaacatatgctaattgacgagaacgctgaagatttccgattggcgcattttctttaatcgttctgaaaggtgtgaaagaaagattttccatcacttcaaaatttccatcttctggcacttcttgtttgggaatggtaatttttgctacagtttgaaaaggcgattcttcttgcgaccattcctgtgtgagatcattaattggcattctttctaaatcgcgacacaactgaatttgcaattcaaaagtcagatcattttttgcgatttctctgataatgccttttctgtaaggccagttttcactttcaggatcaatttctttttcagtgattttatctttggtttcttgcgttggagcaatacgaactttcgccatgtattcgccatgtcgaacagcgcccatgctgtaaaattcatgcaaaaaactgttgattgaaggaatcttttggaaagtcaataaggctttcaattctttaagtgtttctcgatttggaaatgcctttttattttctgttacccaaagtgctgcaaattcagcttttccaagtgcgcctttttcaaagaaatcggtaatttgaagaaacaattttgaaatgaaaacatagtgttctgctgtattgcaaaagaatactggattattaatcaaattgaaatctacattgggtgaatcttcttcaccgggagctaattttttgccatctaaaccaaaaattttcaaagcaaacccttgtgcattgccacttaatttgtcgggtaatactcgtgaagaaccgttggaaaaccgaacgacagcttcatgtgttccgggtttttcataaatgccttgagccaattctgaaggtaaatcggatagaatttctatcgaagccttcaatgccgcataaccattggcatgcgcatcgcgtgtataatgttgaattttacttagatcttttgttttctcaatatactcgcgaatatctttggtgattgtcgccatatattcggcaaaattttctggaatttcttccaattctggactatattttatgggttggttattcatgatttcagaaattaaaaattacaattcgctcaaccatttcaaggccgataaactcggaatgaaacagtattcgcctcctttcactacattgaatgtttgcaaaccatgataacgctttaccaatggatcatgtggttgggtaaacaaaccatctttttgaacgccaattaaaggatctttttcggtgcctaaattttgagaattaccatcattagcccattgtttttgtaaaaattctagcgttcccatggcattggcactgatcccgataaaatattgtccacgttctttcccatcgtctttggtgatttcgggtggaacaatgccgccaaacgttacacttttacgaatgattcggtgtaatctttcatcttctaaaataaagtttttagaatcgcgaggattcatgcgtcgaatatgcgaaccaaatggacatttcttcccaaattcatcgtttttaaaactaaaatcgttgtttttgtttggatcatcaccaagttctttattgtctttttctggagctaaaaccaatggtgcaccgcttcgccatcttcccaccattttggcagctaaaagttcaccctcatctgtagaattggaattctcttgaatgaatttattgaattctgctacgttactttggtattttctaaataccatgaatgaaccattcttacctaaaacttctggttgaggaaaaggggaaattacgcctgcttcaccaggataacccaaaatgaattcacctgtctttataggtcggtcataacctggtggattatcgattccgcttccttcaacttcgggattgctaataccatctcgaaaaccaaaggcatttttaacttcttcagttgcaccaaaatcgtgactcaataaaatttcaatgtctttattttctgctaatttttcttgaaatgattttaatgcttcttgccaagtttcttctgaatgagaaatgacagcagctgcaatgtgaatctcctgtttgaagggtttgtcccaatttttaggatcgtttacacctgtatctgccaagaatttagcacgagcagccattccttctttaaaagattctggaaaggaatccagagaatctttaggtacacctaaggcttccaaacctttataggtaaaggttaagaaaacagttgaaccatcattattagcccaattttctgctgaattaatcaaaggaagtagggcatttattagtttttttccagcttcaggcgttttgattttcaaagcagccattgttccgtagtatggaacagggcgacttctcaagatcattgattgtatttcgttcaattcaatactgactttgtcaggattaaaaattctttttaaaaattcaaatggcataggcttaaagtttattcgcgtcgtcgattgctttattgattccgtttacaattttatcgtgtctgcgaatgtcgtttacagttaaatgtggaacaccaacgtaccaacctgttgcagtgatttgatgatcgagaataaattgtttaacagaaggatctttaattccaggccagcctttcacattactgaaaataatgtccatcagttctggaattttagttgcaaaatcatcaatataggcatcccaatccccatcataagcagtacagaacagtattttagtatcgttgtccagaagcacaattcgtaaatcgtgtaaggttcccacgttggttgctccgcccagatttccgttggcaatgtccataatttttttcagacgttcaccaccaccttcaattaaatcagcaatagcggtaagttcggaaacacgcccagagcgtaatccttttttaccagcagattcaatggaatggtcgtaaccatcgttagctgcttctttgaaatttgcaataattaagtcttttttcagaattaaatcatctagtagtcccatgatttttagattttttggttaaacaagtttgtaagtcaaaccattcattcaaaaattaaaccattgtctattaagaacatcatctattaatttcaaaaaaaagaaagaacatcaatgtgtagaattgaatttaacctgaaaaatatagtcgattttgtgaattaaagaggtgtttttaattgattctagttgatctattccttatattttattgagttaagtttaatttattgatttttaaatacttaataaccgttaatttatttataatgttctactttacccataagttacattttctaacccctaaaactccttaatgtgaaacataacgtattttctatagcagaattacagaaagtttatgatgagtatgtaaaaaaagaaggatggatatcgttgactctaacgaaggaagagttgatgaacgatcaggaagtagctgatttgtttgggatttctattagagcattacaaacctgccgacaaaaaggagagattaagtattttaaacttggtaatcggtattattacattcgaagtattattctattagatattttgaggcgttacaatgattgatctctttgttttaactaagaatctattctaataaaactagttttgtaggttacaatttagctttattagaatagaatttttttattaggtgtttatagaacctaaataaacagagttagaaacactgtcttgttctagagatctgaaatcgatccaaagatgtaatgttttacctaattgatgattggatagattgatgttgtaggtttcatcttgtctttgggctgcattttctataaaaaaagtattggtttcgtcctctatagccataagaatttgtaacatatctgtttctctttctggtgtcgttatcccattgttttgccaagtaatttctagtatttctggggaaggtaaactcatggtttgaggaatagccgcaagtaaattacctttagaaaaacttacttggttgtagttttgagtaatggtgaaattcgaataatctaatgcaaaactgttggttacgtttgtgaaagcttggttgtaacaagatctaagtcctacacgataaccaaaatgtttacaagcatacgcacggtattgtgccataaaatctattaccatcttcattctttgttggataagtaattgtttttgagaaggagcttttgttctctttcttggtctgatacgagagatttcgtttccgtttacattggctatgacgatacgtcctgtacgtcctgatgagcctgataataatgaatcataaattttacccattgtttaattttttatttgttagttatgtaaaattgaacattattatccttgctaatttttatttgcgctcgtttgcgttatttttctatgtcttgcattaatttgcgttgcttttcttcatttttcttcattgattatttgtaaggtgttgattaataatgaatattgatcttgataagatttgttttattaagtgttttatatgtattgtagtgaatttctctaagtaaattatagcagttatttgatgtttatttgatgtttgtttgaatgagaaaaaagtgaagtcaatattttattgaaatggattctctagttgtaattaagtaaacaattaggcataaaaaaagccccgaagatagtcgaggcgctaaatgttttcacaacggaataatccttattgtgagttcctttcgattacaaatctataataaaaaaaataattattactacgggaaaccgtaatgtgggagatttttttctaagtatcttgtacaaattataaaagacttaaaatcaaaacaatgaaaaatatattaggtttagacttaggaaccaattcgattggttgggcgttgattgagatagatcatgaaagagatattttaaaaatacttggattaggatcaaggattttaccaatgacagctgatgaaattggagattttggaaaaggatctccgactgtaagtgcagctgcttttagaacagaaaaaagaggaccaaggagattaaatgaaagatttattttaagaagagatcgcttgcatcttattttaaacttacttcaagcgttacctaatcattataaattagatattgattttgagaatggaaaaggtgaaaagtcgggtcattttaagtttaataaagaacctaaattagcttatcttccaaaaagcattaatgaaaaagctaagtttttatttaaagatagctatgaagaaatgttacgtgagttaggaattgataataaaaaaggttcaagaataccatacgattggactttatattatttacgtcaaaaagcattaataaaagagatttctttagaagaattggcttgggttctgttaagctataatcaaaaaagaggttatgaaaagttagaagtagaatctaatacttctaaagattctgaagtagttgaagaattagacttacgtgtgagatctgttgaaaagaaagttgataaagcaggaaaggtttattttcaaatcaatttagatggaagtagaaatattatgtacaatgaatatacttcagaacaattgacttttgaaaatgatataaaagaactgaaaattatatcatttgttgacgataaaggtaatattgatgattcaaaaacaacttttacagttattgatatttatccacttacaattacagaagttaaatatgagaatgagaataataaacatttataccatttaacctataacaatggttggcaacaaacaaaaagaaaagataaatatacttttcaatttgaaaaagccttagataaatcttatgactatgttgttgaaaccatttatgacaaattaggaaatattaagctacaaagtgggatagaacgtaagttacgagaacctaattttggtgataattctaatgactggactttactgaaaaagaaaactgaaaaagaagcattggcgttcaatttggataaatttaaagagcccaaaaaatatatctctcccaaaatttattctattctaaaacaggatgcgataagtggaagtcgcacaaagattattggaggaatgtttcaaactgttgatagaagtttttacagagaagagttaaaacaaataattagtatacagcaaacgtttcatcaaaatttaaatgataaagaagtttttgaaaagtgtgtacaattactatatcctaataataaatctcatgcaaaaactttattgaccaataaagaagctatccaacatttattaatagaagatatcttgttatatcagcgtccgttaaagtcaaagaaaagtgaaattgcagattgtaaatttgaaataaaattcattaaagacgctttagatagtaagggaaatcctatagaaattttaaataagcaaacaggagaaataacacttaaaaaagagattattagacacaaagttgttcctgcatctcatccttattatcaagaatttcgcatatgggataagctacacaacttaaagatttttcaattagagcaaacggttgaaggaaaagtgcagacaaatgtagatgttacaaaacagattttaacaagtgaggtttataataaactttttgagttattgaataatcaaaaaactttaactaacggtggatttatgaaatttcttgcgccgatttttaaagctaataaatggaatgctaaagattttgtttggaattttacagaagatgatgagataaaaggaaatgctacaagagttgattttgcagttcgatttaagcgttctggctttgctgattatactgaatttttatcgcaggaaaaagaacgaatgctttggcattatttgtattctgtaagctacaaagaaaggattgaaaatgattttaaaagtattagatcattcttccaaaatacatttttcaaagattttagtttagatgaggtaatagtagaaaaccttgttcaagattttgctaattttccaaaatttgatgcgaaatatggtgcgtattctgagaaagcattgaaaaaattacttccgcaaataaagttgatgagtgacagaacttatgcttgggaaagtgaaggaagttatattaactataacgaaaaattgaatgaaagaaaacaggaaatattaaataaattacaacaaatcgattttttagcagataaaattgattatacaaaagttgttgataataattcagtacctccatatccaaaaggtttgtttaatgtttttaaagattttgagagtatagaggatttcacaaagcttaatttaacaaaagcatcttacttagtttatggtcgtcattcggaattggaacaggctaaatattggcattctccagagcaaattagaaaggagttgcatcaagaactaaagcaacattctctaaataatccaattgctgaaaaggttttgttagaaatgatgcaagtagttgctgatatttgggattattatggagaagggcaagaagatttctttacaagtattcacgtagaagtcgctcgtgagttaaagaaatctgccaaagaaaagaaaagggattttgatagaaataaagataacaaagtccaaaatgacagactaagacaagttttagaagagtttttaagtattgataaatataaagccaaaccaaaaaatgccgatcattttgaacgattgaaaatcattgaagatggcgcaagccatacaaaaaacaataaaaaagattttttcaatgataaaagttattctaaaaaagaaattgatgatattttaaagaaatctaaaattacaaaagaagattttgataaatataaattgtggatagaacaaggatataaatcgccttatacaaatcgtatcatcaatctaacagatttgtttgatggaaataaatataatgtagatcatattttaccaagagcatcagtcactaatgattcacttagtaataaagtggtttgtgaaaaagaaattaataaagaaaaaagtaataaaactgcacgagagtttatcctaaatccagcaaatagaagtatttattgctcagctcatagtggatatgtggaattggtaaatgatgatgattttacagatattgtaaaaacacaattttcaggttctaaacgatttattttgctttctaaagaagttcctaaagaatttacgagtagccaattaaataatacacgtcatattgctcgcaaagcaatggaattattaagtcatattgtaagagaagaaggagaagtagaatttttgtctaaaaatgtacttcctgttactggagaaattacaagcaaactaaaacgagcgtggaagttagaccaagtatggaaacaattagttgctcctcgctttatcaggatgaatgaattaacaaattctaatctttttggttattggcaagaagataaaaatggtagaaaatattttgattgtgctattgatgatttaattagagagaagaatccaaattttgatatcaaaaggattgaccataggcatcatgctttagacgcgttggttgttgcattgtgcacaagagaacatgtgaactatatcaataacatcaatgcggatgcaaagtctgataattatggaaaacagaagcaaatcgaaaaataccgtgaaacactaaaacgtaaaattcaattttccagacctaataaagaaaatccaaaagataaagattggttttatctcttacctggcgaaaaaaggatagaaggtgaggagcattcatcaagagaaagcgttttgtctgtaaattattggtataaagatgtagattatggtaaagaaatcagtcatttttcaaatatggtttttgatatattgcatggcacaacgacatcgtttaaaacaaataaatttccaattagaaaaacaagtaataaatattggagttataaaacggaagcaggagaactaaatattttaaacggagctcctaagaaaatattgataagacaattaactgatgaaaatcgaaaagggaatgttgcaattagaaaagggatgcacgatgagattccttatggagaaagatattatgattttgaattaaaggaattaagatctgccattaaaagtgaaaaggattttgaaaatatttatgatgaaaatttaaaaattcgtttagttgatttattccacaactcaaatgaagacataaaagaattatttaataatatcaaaaaagaagttgagaatccatttcctaaaaaagctttcttcaaagctgatactaaaatcaagttgtctatttccagaaaaagcatagttggtttaaatgaaaaacaaattgataaaattgttagtccagaaatttatcaagatatattagaacacatcaaaaattttgaaacgattgatgaggcaatgtcagcttatggtattgaagaatttaataaaaataggaaaatacctgttaaaaaagttacattcggcgagcgtggagatgggcgttatgtattaggagaaaatgatttgaaaaaatctactcgcaagatggtaaaaggtgcaaattattctttatttattgatagaaataatgaaatagtaaatacaatttcattaaaatcattaatagaaaaaaaagatgattcaattaatgttacttccaagtcaggatttcatttattaccaaatgatttagtgtatgttactttggatggaaataattttgactttagtaatctgaacaatatttatcagtttgtcaattctaagaaagattcagtaaatttttctccagtaaatattgccaaagtaatttgggattacggttttcctaattctaaaaaagaagatatagagtataataagagattatttgataaagggaatttcaaaagtgaaaaagagagtcctttaaaaaatgaaataggattagggactcaagaaaacaaacatagaagagagtttatttataatgttgaggagcgtatacatgtatttaaaggagagactattcgtgacttttgcattaaactaaaaatcgaccgtcttggtaacatctcaaaagcataaactatgaatcgttctgattttatcaaatctctagggttaggtttaagcggtattatcctaccacaaactttgttttttcagacaaaacatgtcaagatttatgataattatattcgtggaactcagtattatcagtttgataaaataaagaatgttttaaaagaaggtgatgaggttctacttaaaagagatacagagaatttgcacgactcttttgcaatagaagtatattttcagaatagtaaattaggttatatcgctgcttacgagaatattgttttagccaatatgttagatcaacatataaatttagttgcaaaaattagtaagcttgatttaaaatctaatttttatcaaatagcaattatggtttatgctgaattggttatacctagtgataaattgatagtgatgatgaaccaagaaataagggcagatgatacaatagatttatatcgtaataatttgtaaaaaaaatgattttatgctcaaacgaaccatttacataggtaacccggcttatcttaagttgaaagatcatcagttaaaaatagaagatacagaaaccaagacaacaaaaggctctgtacctatagaagatttggcatttttggtgttggacaattatcaaattaccatcagtcatcaactaattgtcgccttgcaacaaaataatgtagccattgtgagttgcgacgagagtcatttgccttatggtttgatgttacctatgaatggacatgttttgcatagtgaacgattgaaacatcaaatcaatatttcagaacctttgcgtaaacaattgtggaaacaaacagttgaagctaaaatatatcagcaaaaagcattgctttctaaattcggatttgtagaagaacccatgcaaaattatttaactgctgtaaaaacaggcgacactacgaatatggagggcattgctgcacagtattattggaaacaattgtttgataattttacaagagaacgcgatggagatgcgcccaataattttttgaattttggttatgctgtcttacgaagtatggttgctagagcattggtgagttctggattgaatcctacaattgggatatttcatcgaaataaatataatccttattgtttggcagatgatctaatggaaccttatagaccttatgtagatgagttggttttggaatggatgaataaaccttttcgacctacagaaataagcaaagaagctaaaactcatttattgaagattgctactaaagatgtaaaaattgatggtttgacccgaccattgatggtcgctttgagtcatacgacaagttctttttataaatgtatgacaggagaacagcgcgtgattcgtttcccagaaatgatatgagttttaatcgttataatgcttatcgaattatgtgggttttggttttgtttgatttaccaactgagacaaaaaaacaaagaagtcaagccaatcgatttcggaaagaattgattgatgatggatttacaatgtttcagttttctatttatttacgtcattgtcccagtaaagaaaatgcagaagtccatataaaacgagcaaaatctaagttgcctgaatatggtaaggtaggaattatttgtattactgataaacaatttggacaaatggaaatgttttatgccaaaaagcaaaccgatttacccacaggaccacaacaactcgaattattttgaaaataaatagaataaaaaaaccgatagatatataattgatttctatcggtttttagtttttttctcattctaaaaaactttcaaatcccttataaataaaggagtagaagaatgaggttgtaattacttcagtaaaattaccaaatttgaaaggaactcacaacaccgttacaatgtaagatcgtgcgaacgttgttgtaattacttcagtaaaattaccaaatttgaaaggaactcacaactacaatgaagaaatacaaccaatctggtgggttgtaattacttcagtaaaattaccaaatttgaaaggaactcacaacaaaacacgttgtctgattgcttcaattcctgttgtaattacttcagtaaaattaccaaatttgaaaggaactcacaacaatacttgacctattgaaatagacttagatgttgtaattacttcagtaaaattaccaaatttgaaaggaactcacaactgctaacaattcattaacagcatctaaatggttgtaattacttcagtaaaattaccaaatttgaaaggaactcacaactaatttaaagacgcgaatccaaagcctgctgttgtaattacttcagtaaaattaccaaatttgaaaggaactcacaacttgtaacccttttatatctatttctctttcgttgtaattacttcagtaaaattaccaaatttgaaaggaactcacaacaattctgcattttgcttactcaaagaatccgttgtaattacttcagtaaaattaccaaatttgaaaggaactcacaacaagtctataacctcttgttttcttgtttttgttgtaattacttcagtaaaattaccaaatttgaaaggaactcacaaccgatgtgattaaatccaacaatttgaaatagttgtaattacttcagtaaaattaccaaatttgaaaggaactcacaacagaatcgaaaccaattctatataaagcatcgttgtaattacttcagtaaaattaccaaatttgaaaggaactcacaacaattttcttttgttcttgctccgagtggtggttgtaattacttcagtaaaattaccaaatttgaaaggaactcacaacagttaaagcttcttcacccgaaatagctacgttgtaattacttcagtaaaattaccaaatttgaaaggaactcacaacacaaaatttgacttagataaatcgatctatgttgtaattacttcagtaaaattaccaaatttgaaaggaactcacaactaaagtcgaatcgattctttcaattaaaatgttgtaattacttcagtaaaattaccaaatttgaaaggaactcacaacacaagattgtttcatttcttcttgccaaatgttgtaattacttcagtaaaattaccaaatttgaaaggaactcacaacccgtccatttttgtcccgcactctcgccaagttgtaattacttcagtaaaattaccaaatttgaaaggaactcacaactatattaattgcatcttttatattaaaagggttgtaattacttcagtaaaattaccaaatttgaaaggaactcacaacacaagagagggggttttcttcgctaacggagttgtaattacttcagtaaaattaccaaatttgaaaggaactcacaactaatatcagttttattattaactagcatctgttgtaattacttcagtaaaattaccaaatttgaaaggaactcacaacaacgctaattaaaggttgaccaccatttatgttgtaattacttcagtaaaattaccaaatttgaaaggaactcacaaccaacgctaattaaaggttgaccaccatttatgttgtaattacttcagtaaaattaccaaatttgaaaggaactcacaacatggtggttttcacttacaatatagcgaaggttgtaattacttcagtaaaattaccaaatttgaaaggaactcacaacgaagggttaaatgtttctaacatcttctttgttgtaattacttcagtaaaattaccaaatttgaaaggaactcacaactatccacgagcgaagctaattaagtcgtccgttgtaattacttcagtaaaattaccaaatttgaaaggaactcacaacagttgttttacttggtctaataaatattctgttgtaattacttcagtaaaattaccaaatttgaaaggaactcacaacattttcggcttcttcttttgtttctttttcgttgtaattacttcagtaaaattaccaaatttgaaaggaactcacaacgcaatgccagaagatatgtttttgaacgaagttgtaattacttcagtaaaattaccaaatttgaaaggaactca

SEQ ID NO: 4554 - DNA, 18328 bp, synthetic construct
  source 1..18328: mol_type = other DNA
  misc_feature 1..18328: note = Synthetic
aaaaccgtcgccttctttgcctccttcggtaatttttccttcataagctttgccgcaatgggtttttaatttattccaaaatgaaacagaaggagcgggttcttgtgcaattcccgaaaaagacatcaacaatgcaataaagaataaagtttttttcattttactgaaattttggttggtgattataaatctcttcgttttaaaacataatatgagccgtaaataaaaattgccgtccaagcaagaacgataactacggatagcaaacttacatgatattctttagtaaatccttcgcctaattgtgttgctgcagattgaatcactcctaacctggtgaacggttcgataatcaaattgctcattgcgtttaacggaaaaaatgaagctacggtatcggcgatgtttgtatctttaaaaaattgccatttcatcattccgtatacaaaggtttcgacgatgttccaaacaaataagaaacctaaagcaaaagcagaacgctttaccaacactcccaagaacaaacagaacgagaaaaaagcgattaactttaaaaaataggcgcctaaatattccatcccgctgaaaataattccgatttctgtataatccgaaaaaatgagtccgagaataagcgagacgataaaaacaaaaattgtggaagctgccgagaacaaaagaatggtcagaaactttgaaaaaacaaattgttttttactcagtccgtcaattaaattctgttttaaggttcgataactgtattcattggtcatcatcgagataatgacaattgccaaaaacaatttcagaattgccgcgatataggtgttaaaatgccaaataaacggaaaattaaaaatgccctgatcggctacccggaaattaaaatctccaaaattaaattcgatagaagcaatgaatgcaatgaaagtaataagcacaaaataaacaatagagattatttttgccgagcgattgtaacgaagtttgtagagctcaattttaagtaatcggattgcttccatgaaattaattttgttgggtgagttttaaaaattgttcttccaaactttcttttctttttaccagatgagataagacgacgcctttttcaaaaaggtatttgtttaattctgctgcagtaaggtttttatcgggataaaaaagaaccgaatcccgaacaatctgaacggaatgaacatccgggtggtgttttaaaacttctttcaaccgattgatatcttcactttgaagcgtaaaaaaaccgtggcttgccgacatcccttccactggaccggtgtagagactttttccttttcgcaaaatgactacgtgtgaacataccttttcaacttcatccaaaagatgggatgccaacaaaatagtggttccttgtgaagcaatggttttgataatctcgcgaatatgatgtattccctgagggtcgagtccgttcgtcggttcatcgagaatcagaatttccggattgttcaacagggcagaagctatggcaaggcgctgtttcattcccaatgaaaacgtattgaatttgctgtcttgacgttcggtcaatccaaccaattcaagtttttcggaaatcgtggtgtaaggaatgttttttatttgacaaacaagttccagattttgtcgggctgtcatgtacggataaaaattgggacgttcgatgatggcgccaatttttttaagggaatcttcaatgggttggcttccgtcaaaccaaacaaattcgccggaagttttatttacaacattcagtacaattcctaaggtggtactttttccgctaccgttgggacctaacaatccgtagatatttcctttttcaatcgtcagtgagaggtcgttaagtgcggtcaaggaaccgtagtgtttggtgaggtttcggatggttaaaatggtattcaagatttgtgatttttaggcagttataaagaagacgctattggaatcattttgttacacaaaaaccactttttttattgtaattgttctttcccgaaagtctttaaagcggtttcttttcgattgactacctttgcaaggtattaaaaaaacaattatgcaaaacggaatttacgcaaaaataactacaacaaaaggttcggttcttatcgaattgacttacaaaaagactcccggaacggtgggcaacttcgtggcgcttgccgaaggaaatttggaaaataccgcccgaccgcaagggaaaccctattatgacggtttaaaatttcacagagtgatttcggattttatgattcagggaggagatcctaccggaacaggatcgggaggtccgggttacaattttgacgatgagtttcatcccgaattaaaacacgacagaccgggagtactctccatggcaaatgccggtcccggaacaaacggaagtcagttttttattacgcatgtcgaaaccccttggttggataacaatcacactgtttttggatatgtggtcgaaggtcaggaagttgtcaatgccattgcgcaaggggatttgatggagaaagtggaaattattcgacaaggagaagaagccgaaaagtggaatgcgattgaagcattcagaacttttaccggggagcgcgaagcgcgcattgctaaaatgaaagaaaaagaagcagaagaattaaagaaactttctgaaggatttgatcaaactgcatccggattgttgtataaaatcataaataaaggagacggaaaaaaagcagaaaacggaaataccgtttctgtgcattatcaaggcatgttgcctgatggaactgtgtttgattcttcctacaaaagaaacagtccgattgattttcagttgggagccggtcaggtgatcgcaggttgggatgaaggaatcggtttgttgcgtgttggcgataaagcccggtttgtcattccttcacagttggcatacggcgatcgcggtgctggaggtgtcattccgcctcgagccaccttaatatttgatgtggaacttatgaatgttaaataagcttcatttctagtttaaaaaaaatccgttattcaatttagagtaacggatttttttatcaactcaattggtttttccatttgatgttgcagccaatgctgggtttttggtctttccgctgcggattgttgtttaaaatattatccatggcttcacgcaaatcacgcccatttacaggaatgccgtttcccggtctggaattgtccaactgtccgcgatagaccaatttcaaatcggcatcaaataaataaaaatccggagtacatgccgcgcgatacgattttgcaacttcttgtgtttcatcaaacaaataaggaaaagggtaggagagccgtcttgccgttcgccacatttcttcgggagaatcttcgggatagcgcgtaatgtcattgctgttaatggctacaaatccgaagcccaacacccgataatcattgcaaatccgtaccaattcttcatttacatgtttgacaaacggacaatgattgcagataaacattactaccgttcctttggttccgcgaacatcgcttaactttacttttttgttggtaacggcatctgtcagtgtgaatgttggtgcaggcgtccctaacggaagcatcgttgattctgtacgtgccataataaactattttttaaactgcaaaaatacaaattttataggttaaggatattggcttttttagaccgtggaaagcggcttattatattaaatatattataaagcgaaagggagaaaacgggacacttcttattttagagaaaaatttaaaatctttataattatgaaagaatcctatccaacactttctgatgccattcgcgaattgcaaaaacaaggatatacgaccgattttaattatatattgaaacaaggcagtgatgacgaattaaagagaaaatgggaagcaggtacctttgaagcggtaaaggtgtatcgatatgaagggatgagcaatcctgatgacaactccattctgtatgtcattgaaggaaaagacggcaccaaaggaattttggttgacaattacagcggaacggaagatcaagttccgatagctatgttgaaacggttaaatgttacgcatgacaactaaaataacttgggaagattttgaaaaaattgaaatgcgggttggaacaatcatcgaagtaaatgattttccaaaagctcgaaaaccggcttatcaactgactattgatttcggttctgaaattggaatcagaaaatcgtcggcacagattacaacccgttattcaaaagaagtattgttaaaccgtcaggttgttgccgttgtcaattttcctgaaaaacaaattgccaattttaaaagtcaatgtttggttttaggagttgtaaacggaactgatgtcatccttctcgaaccgggagcgccggtgcaaaatggacttcggataggttaaaccaaaataaaaaatccgtttcatctttaagatgaaacggattgactcttaaaaatcacgtgaatttttaaatgtcttcaaagtcaatgtcagtaaaatcggaagagtttgttgcggtttgattttcaacagtttcttcgtttttcttgtaatctctttgatgacgttcgctgattacttcttcacctttttcttcaatgatgaaatccgtcatttcggttaacacatttttaaactcttcaaagtcctctttatacaaatagattttgtgttttttgtagtgaaaggaaccgtcatcattagtaaattttttactttctgtgattgtcaagtaaaagtcaccggctttcgtagcgcgcacatcaaagaaataagtacgtcttcctgcacgcataacttttgaaaaaatctcttcttgctccatagtaaaattgtcacccataataaatttttggttttttctgttgttttgccaaaaatctaaaaaatttctaaatcgaccaaagtaaattacatttctttttccatgagttgttttgtgtacagttctttgtagtatccttctttttcaacaagttgctgatgcgtgccctcttgaataatctttccgtcttccaaaataatgattttcgttgcattttttaccgacgaaatacgatgccctacgataattgtcgttttgtctttggtcagggtcatcaagttgtttaaaatttgttcttcggtttccgtatccactgcagagagactgtcgtcaaacaaaagaatttgagggtctttaatcagtgcgcgtgcgatggaaatccgttgtttttgtccgccgctcatcgtgattccgcgttcgcccaaaacagtatcataccctttcgagaacccttgaatgttgtcatgaaccacagcgcttttggctgcggcaattacttcgtcatcggttgcatcttcttttccgaaacggatgttgttcttaattgaatcgctgaatagaaaagcatcctggggaacatatccgatgctgttgcgcaaatcgtccaaatttaacgagcgtatcggtttgtcgtcaatcgtcaacatgccatccggcacatcatacaaccgaccgatgagttccaaaatcgtcgactttccggaaccggtattgcccataattgccaatgtttctccgggtgctactgtaaacgaaatgttttttaaagcttggatgccggtgtcgggatacgtaaaactcaagttgttaaaagctatttttccgacgatcggcgtgctttcgggttgttcgttcttaatttcaggttcggtttgaagaaaatcgttaatacgtttttgtgaagcctccgcgcgttgtaccatcgaggtgacaaacccaacaacagctaccggccacgtaagcatgtttacatacatcaaaaactccacaagcgttccgatgtcttcaatttgtccattgatatagcgttggccgccgatgtatatcaccaaaatattactgattccgatgagcaacatcatcaaggggccgaaaagtgcttgaactttagccaaatcgacatttttttctttgctgccttccgataaggtttgaaattcggcaccaatgcgattttcaattccatacgctttaattacggatattccgctgaaattttcttgagtaaacgaagtgagttttgacaaatattgttgtacgatggtgctgcgtctgtgaatcatcacactcagtttataaatgacaatcgacaagattggaagcggtgcaatggcataaattgtcagtaccggggctttggaaaacatataactgatgaccacgataaaaagcgtaattgtgctcagactgtacatcaaggcgggaccggtgtacatgcgaacttgtgaaacatcctcactgattcggttcatcaaatcgccggtgcgattttgtttgtaaaaactcaacgaaagcttttcataatgttgaaaaatgacattttttaaatcgtattcgataaaacgcgacatcacgacaaaagtttggcgcatcagaaaagtaaaaaacccggagagcaatgcagcgcctaaaaggattccaatattgagcagtatttgctgtttgacaaatgctatgtctaaaatttcgccatcggtatattgcttgacaatatttaccgtatccccgattttttgagggacgacaagtttaaatacggttgctatgattgtaatgacgattcccaggaaaagacgccctttatatcttagaaaataggagtttaaatatcgtaattcacgcatagggtctttttaatcagttgtaatatataagaatttcctttgtacaatcattatcaaacgcttacttttgtaccctttataatacttttcttaaacaatcggaatatgactactgagacaattcagggagaagaccttcaaaaaataagtcccgtgtttggtcagctttcttttgataatcacgaacaagttgttttttgttttgacaaagatactggtttaaaagcaataatcggaattcataatacggttttgggacctgctttgggaggtaccagaatgtggaattatcaaagtgaatcagaagcactgaatgacgtgttgcgattgtctcgcgggatgacttacaagagtgctgtaaccggtttggatctcggtggcgggaaagcggtgattataggaaatgccaaaaaacacaaaactccggaactgatgttgaagttcggggagtttgtccattcgttgggcggaaattacattactgcggaagatgtgggaatggaaaccgatgatatggatctgattcgtacggtaaccccgcacgtggtcggactttcagaagccaaaggaggaaaaggaaatccttcgcccatcacggctcatggcgtctatatgggaatgaaagctgcggcaaaatttgcgtttggaacagacaatttgaaagggcgaaaaatttatgttcagggagtgggtcatgtcggtgaaaatttagtgaaaaagataaaagcagaagatgccgaagtctttatcagtgatatcaaccaagaacgtatggaaatgattcgcgacacttatgatgtgaacatttacgaaggaaccacattttatgatgaaccgatggacatttattcgccgtgtgcgctcggagccactttaaacgataaaaccataggcatgctaaaagcaaaagtaattgccggagcagccaacaaccaacttgccgttgaacacaaacacggtgaaatgttacgccaaaaaggaattgtttacgcgcctgattttttgattaatgcaggtggaattatcaatgtgtatggtgaaattcacaattacggattggatgaatctatgcggagaaccgaaaatatttacaacacgactctcgaaatccttaaacaatccgaagaaaataatataactacttatcaagctgcttttcaagtggcacaaaatcgaattgacgccaagagaaaagaacaaggacgttaataggtttttttacaattctatgttaacaagaagacacattcgcatcaaggtcatgcaatcggtttatgcttataatcaatctataaatcgagagctggaaacccaagaaaaatttttaaactacagcatcgaacagatgagcgatttatacagcctgctgttgcggctgattgtttcggtacgtgatcaggctcaggagtatatggagcgttccagtcagaaatttcttgctacggaaacagaaaaaaatccaagtttaaattttataaacaataaaatagtaggctacatcgctgataacaccacctttaatgagctcatcgaaaaaaggaaactggattattggagttttgattcagaatatgtgagcatcctctttcatgatttaaaagagaaagcatggtatcaggagtatctcgacatccaaaaaccgactttaaaagaagaccgtgcgtttgttttgcaattttaccgagaagttgttgcacccaatgacaaactatacgattatctggaagacaaacggttgacttggattgacgattttccgattgtaaacacagttatcgtaaacactttggaaaaaatcaattcgaaaaatatgacacaatacttggttccggaattgtataaacatgaagacgatcgcgatttttcggttgagcttttacgcaaagtaattttaaatgagcaattgctaaacgaggaaataaaaggaagaactccaaattgggatcaagaccgtattgctgagattgatatgattatcctgagaatgggaattgccgaatttttattttttccatcgattccggttcgtgcgactatcaatgaatacttggaaattgccaaagaatattccacgcccaaaagccgaattttcataaacggaattttggacaaagtagtgaaagaattcacggctcaaaagcgattaaataaagttgggcgcggtttgcaggaaaaataaaattgattacttttgacacttctgaaaactaaaacactataatatcatgagaaaatgaatcgttttaatggcattgatgtctgtatttgcactctattcttgcaaggacaacgcagcagacaaagtaaatgaagagaacgttaccgctactgcggaaaaagaagctgatgcgggaaagtttcctgtaatgacatttgaggaaacagaatttgacttcggaaccattgaaagaggaacccatgtggagcacactttcaaatttaccaacaccggagatgcgcctttaactattgtaaatgcaagaagcagctgcggttgtaccgttccgacgtggaccaaaaccccgattgctcccggagaacaaggagaattgttggtgaaatttgacggaagcggtcaaaaccaagttaccaaaacagtaaccattacagcgaatactgaaaaaggaaccgagcatttgcgaattaaagcatttgtagctcctcagaattcggcgacttcaactaattaagattattaatatttaagaatacgatacgtggaaggcatttcaggatttttaccgcttattttgttgtttttggttatgtatctctttttgatacgtccacaaatgcaaaaagcaaagaaagagaaaaagtttattaacgaattatcgaaagggatacgtgttgtaaccatcggtggcgttcatggaaaattaatcgatattttcgatgacggcacctgtttgatcgacattggagccgggcgcgtaaagtttgaaaaagctgccatctccatggaaaaaacaatgcaactaaatgcacctgaaaaaaagtaaatagtttaaaagtaatactttataaaaaacctcctttgggtccgcctaaaggaggtttttttgtttggggggctataaaaataaaaacgaggcttaacatgtagtcttgccccgtagtaaatgttttcacaacggaataatccttattgtgaattgctttaagatttgtaatacaaatataagtaaaaaaatttaattatcaaaacaaagttaaaaatgttaattatttcatatattagttcgctgtaagaaaaacttccccctctaactaattaaaaagcaattaaatatgaaacgaattttaggattggatttaggaaccaactcaattggatgggcgttgatagaagtagatcaccaaaataaaactgtaaaaatcatcggcttaggatctcgcattttaccgatggatgctggagaagtgaaaaagtttaaagaaggtggaaaaatcaaaagtaccgctgctcaaagaactgaagatagaggcctgcgaagactgaatgaacgttacttactccgtagagatcgtttgcacttagttcttgatttgttggatgctcttccgaagcattacaaattggagatagacttctctaatgacaagggcgagaaaagtggtaagtttaagaaaaacaaagaaccgaagctggcatatcttccaaaacaagttggaaagaaagcagaatttcttttcaaagatagctatcaggaaatgcttgatgaacttggcatagagaataaaaagaaaagcagaattccttatgactggactttgtattttttacgtcaaaaggcactatcagaaaaaatcagtttagaggaattggcttgggtattactgagctacaatcagaaaagaggatatgagaagacggaagttgaggataaatcaacaaaagaaggggaaattattgaggaattggatttacgggtaaaagaagtaattcctaaaacagacaaagccggcaagcagttttatgaagtgcatttggatgggaatgataacttcatctatcaagagtattctgatattcaaatgacctttaaaaatgatttaaaagaacttgtcaaaacctctaaagttgatgaagaaggcaataccgattataaaaaaactgaatttacagttgttgatatttacccattggaaattcaagatgttcattacgaaaaagaagacggcaaacacaaatacattttaacttatcaaaatggctggcaagaaacaaaacagcctaaagattttacttttaggtataaaaacgcattgaataagtcttatgactacattgtagaaactgtttatgactatcaaggtaatttaaaaactcaacaagggaaagaacggaaattaagagagcccgatttgagcgacaaatcgaatgattggacattacttaaaaagaaaaccgaaaaggaagccctttcttttaatgttgaaaaaggctacttgaatagtgacggcagtgccaaaagctatatctcgcccagaatttatgatgtcctgaaaaacgatgctaaaacaggaagtcgtacaaagattatcggtggaatgtttcaggtggtggatagggatttctatcgagaagagttgaagcaaattatttccacgcaacaagcttttcatacgagtttgagagataaagaaatctttgaacagtgtgttaaaacgctttatccaaaaaataaaaatcatcaagatgctttgttaaaaaacaaagatgccattcagcatttattggtcgaagatattctcatgtatcaaagacccttaaaaagtaagaagtctgaaatagcaaattgtaaatacgaagttcaatattggaaaattgttgaggataaagatggcaaaccaatacaagaagttgatatagaaacgggagaacttaaagacaaaaaagagcctgtttacatcaaagtcgtttcagcttcgcatccttactttcaggaattcaggatttgggataaattacataatttacgtttgattcaacttgaaaaagagattgatggtaaaaagttaacaaaccaagacgttaccaaagaatattttaaatctgaaaaagaatatcaagatctttttgacgaattgaacaaccgaaaatctttaaatcaagcacagtttttagcatactgtaaaaagaagtttaaaatagattataagcccaaggaaagcaattacgcttggaattttcctgaagacgaagaaattaaaggaaatgaaacacgcgtaagctttgctgcccgttttaagcgttgtggttttgccaattattcggaatttttaacgcagcaaaaggaaagagaattatggcattatttatattctgttaactacaaagaacgtactgcaaacaacaataaaagcttaaccacatttttcaataattatttcaaaggatttgaaattgccgatgaaatcaaagaaaaaatcattgttgactttgcaaattatccgaagtttccttcaagatattccgcctattcggaaaaagccttgaaaaaactattgcctttaattcgtttaggaaagctggaatatgaagatgtttgggcgaaagaaagttggtaccaaaaatggcgtgacggcttagttgaacgacaagaagaaattttaaaaagaataaagaatatcgattatgatactgataaagtcgattacgagaaagtagtaaatactaatgtcgattaccaaaaaggagaattgccattcccgaaaggcttgtttaatgtttttagagatttccaaagtacagatgattttcaacagttgaatttgacacaagcatcttatttggtttatggcagacattcagagttagcccaagcgaagtattggacttctccagaagatattcgaaatcaacttcatcaagaattaaaacaacactcattgaacaatccagttgcagagaaagtgattttagaaatgatgcaggtggttgctgatatttgggattactatggacaaggagcaccaaatttcttttcaaaaattcatttggaagttggaagagaacttaagaaatctgcgaaggagaaagaagcggaaacgaaacgaatgtctggtaataaggcgcaaaacaaaagattgcggcaaattttagaagaatacctgtcgcatagcccattcaaagctaatcccagaaatcctgaccatttcgaaagattgaaaatagctgaagaaggtgctgagcataccaagaataatgacagaaagttcttcgacgaaaatgaggaactaaaaggtgccaagatatctaaaaaagatatcgatgatatcctcaaaaaatcccatatcaccaaagaagattttgaaaaatataaactttggattgagcaaggatatcgttcgccatactctggtcagatcatcaagctaactgacttatttgatggttcgaaatataatgtagatcacattttcccacaagcatctattactaacaattcattaagcaacaaggttgtagtagaagtaaaccttaataaattaaaggacgatagaactgcaagagaatttattcaagctcagcaaggacaatcctatttaggtattcctgtttgtacggatgatgagtatgtaaatattgtcaaaacacaattctcgggaactaaaaggctgatattactgtctaaagaaatcccgaaaggatttataagtagtcaacttaacagtgcccgccatatcgcaagaaaagcgatggaattgttgagccatattgtaagagagccaggagaagtcgagttccgctctaaaaatgtacttcctgttacgggaatggtgactacagaattaaaacgcgcttggaaattagacgaagtttggactgagttagtagcgccaagatatatgcgtctaaatgaattgacccaatccaacttatttggaagttggcagacctccaaaaatggaactcgttactttgattgtaatttggatgaaactattcgtgcgaaagacgaatcctacgacattaaacgtattgatcatcgtcatcacgctttagatgcgctggtggttgcgttgtgtacagaagatcacgttaattacatcaacaatattaacgctgacgccaagtctgacaattatggaaagcaaaaacagatagaaaagtacagacaaacgctgaaacgaaaaataaaatttaccaaacgagatgatgagcgagatgaaaacaactggtattatatgttgcctggagaaacacggcgagaagatgcagacaattcccgtagggataccgtagttgaaatgaactatcaattcaaaggagatgcaacttttggtcaagattataaaaatatggttttgactgccttgcaaaacacgattaccacattcaagcaaaatctacgggtaatcaataagcgcgtgaattattataaaaatagtccgaattctattgcaagacaaaatactgataacggacaaaaagaaaattgggcaattcgaagaagtttagggaaagataccttttatggaaaaacaactataaatggtgttgataaaatcacgttgcgcacagcattagatacctctttcgatagtaaaaaaataaattcgatttcagatactgtcggacgaacaaaaactattttgctcaatcacctaaaacaatttgacacagttgaacttccttttgacgaagctattttacactttggagctttgttagaaaaacaggaacttgtagcaattgtaaatgatgcagaaaatgaaattggtacaattgaagaattgtttggacacttgaaggtaaataattttcagtttaaaaaacgtgattattctaagctgaatgtttttattgaaatggtttctgacattgatttgagaaaacgttatcaagatgatataaaggaacatccagagattgcgtttactcctgaagctatcgtagaaatgaataaaccagaaaatttgataaaactcaacgacaataaacctcataatccaatcaacaaagtgaaaattacacgaggttttggtaatcaacgagctttgaatgaagaagataaagattcagtcaaatcaaagcaatatgtagtgaatgatgcggggtcaaacctttatcttggcgtatatgaaattaaggacaaagagactttacaagaaaataagaaattgaaaaaacgaatttataaaggaataggccttatagatttaatagattttcagaaaactaatggattaaatccaccttttgaaaacaggctttttgaaaataattatgaataccaattcctattcagtttgtctcctgatgatatagtgaaaattgaacataataacgaggatcattattttgctttcaataactatactgaaagtaaagtttactttaggccagtaaatcattcaaaagaaattgacaaaacagaagtagataaaagaatagacataaaaaacaacaaattaatcggttcacaagaaaacaaaacagagtattttgagaatgtcagaattaaagatgtttgctggaaactcaaagttgatcgtttaggaaatatttcaaaagcataaaacaatgtccaaaacaaaactaaaaagaaagcctcagaaattaaccaaagagcagataatagataaaaacaaatctgtttagaatattacaataattaaaaaagcaacaataatggcgcataaactaaaaatagttttaaccgacaccgaaccaaagattacgcgaaccgtaattgtacctgaaaggtttaacttcgaacagtttcatatcgttatacaatgtgtaatgaactgggaaaatgaacatttatatgaattcaatcttggtgctccctacggaagtgattctattggtccagaggaggccgatgtcggttttgctgctttcactgagtcgagatttaaaaaatatgagtcggaaaaaacctatttatcagagtttttcaatggacaaaaaaagaagatgagttatacttatgactttggagacgactggattcataccataaccgttttaaagaaacccgatgaagaggtattggttcccaagtgtataaaaggagaaaatgctgcacccatagaagattgtgggggtacttggggattttatgagttgatggaagcttctgaaaaaaaacgaaagaataccgaagaaaaagaattgctcgagtgggctggaatacccacagaaaaatcctatgatgatgtttatggttttgatattgatgaggtaaaccaacggttgatagaagctttttcctaataacttttccaaagtttagactattaaaactcaaaaccatgctcaaacgcacaatttacataggcaatccggcatatcttaaactcaaaaatcgacaacttaaaataattgctccggaaagtggcgaagaaaaaggctcgatcccggttgaagatatagcggtgttgatgcttgataactaccaaataaccatcagtcatcaattgattgttgccttgcagggaaataatgtagctgttgtaagttgtgatgcacatcacctgccctttgctttgatgttgccaatgagtggtcatgtggtgcattcggaacggattaaacatcaaataaatatttcggaacctttgcgcaaacagttgtggaagcaaacggtggaggctaaaattagtcagcagatgcttttgcttaaaaaattaaagaaacctcatgagccgttagggatttatgccaatcaagtgaaatcgggcgatagtacaaatatggaaggaattgctgcccaatattactggaagcagctttttgagaatttttccagagagcgggaaggtgcaagcccgaataacttgttaaattttggctatgccgtgttgcggagcattgtggctcgcgcattggtcagctctggattaaatcctacggtggggatatttcacagaaataagtacaatgcctattgtttagcagacgatattatggaaccttatcgcccgtatgtggattggatggtgtatcgatggatggaagaaaatcccgatcagtgcgagttgataccgcaaaccaaagcgttcttgttacagatagccactcatgacgttgtgatgatgcaaaaactacgtcctttgatggtggcagtcagtagtacgacggcttcgctttacaagtgttttatcggtgaattgcgaaccattcgttatccacttttatgttagaacaaaatcgatttaatgcatacagaattatgtgggtattggtattttttgatttgcctactgaaaccaaacgacaccgaaaggctgccactaaatttcgcaagcagttattagaagacggatttaccatgtttcaattttctatttacttgcggcattgccccagtcgggaaaacgccgaggttcacataaaacgtacaaaaaataatttacccaaggaaggcaaagtgtgtattttgtgcattaccgataagcaatttggtcagatggaacttttttacggtaagaatgaaacagaaattccgcaaccggttcaacaactacagttattttaaaaggataaaacaattaaaaaaagcgtctttccatgtttggaaaggcgcttttttaattctaaattacgtttcaacgttatgataaccagtaataaaaaagaggttgtaacgtaactctgtaaaattactaatctttgaaatctattcccaacgcaatagtttctctggtggttttgtaatatgttgtaacgtaactctgtaaaattacaaatctttgaaagcaattcacaactacagttccgatatagattaatattccttggttgtaacgtaactctgtaaaattacaaatctttgaaagcaattcacaacacgatagtatcttggaacggcacctattcagttgtaacgtaactctgtaaaattacaaatctttgaaagcaattcacaacttgggttgataagcattcccagatttgtaagttgtaacgtaactctgtaaaattacaaatctttgaaagcaattcacaactaagtctccattttgaagtttcgcccccatgttgtaacgtaactctgtaaaattacaaatctttgaaagcaattcacaacccaagttatgggcgtgttgttcactctcgcgttgtaacgtaactctgtaaaattacaaatctttgaaagcaattcacaactttatatcaatagattcttctggattatacgttgtaacgtaactctgtaaaattacaaatctttgaaagcaattcacaacacgcttggcgttcgtttgggattttgtaaagttgtaacgtaactctgtaaaattacaaatctttgaaagcaattcacaaccagttaattgaactgtctttaattttaattgttgtaacgtaactctgtaaaattacaaatctttgaaagcaattcacaacaaagccttatgaattgattatatttggaaagttgtaacgtaactctgtaaaattacaaatctttgaaagcaattcacaacacgatagaaaacaacggcaccaattgcagggttgtaacgtaactctgtaaaattacaaatctttgaaagcaattcacaacgtaaaaaagaaaactccaataaaagccttagttgtaacgtaactctgtaaaattacaaatctttgaaagcaattcacaactcttttcccaa

SEQ ID NO: 4555 - DNA, 17934 bp, synthetic construct
  misc_feature 1..17934: note = Synthetic
  source 1..17934: mol_type = other DNA
aaatttgtagcttaccgtgtaaaggatgccattgccgatttctttagggaaaaatacaacaagcgaccatccgttagcgtcgataaccccaagttgatgataaatgtacatatcgctcaaaacttctgtacaatttcattagatagctctggagattctcttcataaacgaggttatcgtgaaaaacagaccgaagctcccatcaacgaagcactggctgcaggcatgatactgatgaccggttggcggggtgaaactgactttattgatccgatgtgtggttcgggaacgtttttgattgaagcgggattaattgcacttaatattccacctggaatttacagaaacgactttgcgttcgagaaatggaatgattttgatgaagagctttttgaatatgtcagcaatgatgattctgacgaacgggaatttaagcataaaatttacgggtcggatatttcactgagagccgtgcggactgctgaaaaaaatgtacgtagcgccggtttgagcagatacataagcataagccatcgtcctgtcagtgagcttgaagctccgtccgaaaaatgcatgcttgtaaccaatccgccttacggagaacgtatcaatccagctaatatcaacgaagtatatagctcactcggttcggtgttgaaacataaatttgcaggaagtacggcgtgggttatcagctctaacgaagaatttcaccataaaattggattaaaacccggcaaaaaagtggaattattaaacggagctttggattgcctgtactgccgatatgatatttttgaagggaaacggaatgagtatttgaagaaaaaattaaataggtgagtattaaatcatatcatataaatgatcagctatattcagctcgaaaatattactaaatcttttggcgataaacttcttttcgaagatatctctttcggtgtttccgacaatcagcgaattgcgttgattgctaaaaacggaacgggaaaaaccacgttgctcaatattattatcgggaaagacagtgccgacagcggaaatatttcttataaaaaagatttacggataggctatttggagcagtcgcctgaatttcctgtcgacctttctgttattgatgcttgcctgcaaagtgataacgaaactgtacgtactattgctgaatatgagcacgccatgctgcatcccgataagtctaaaatgagcgaagttctggctaaaatggatattcttaatgcttgggattatgaaacgcgcatcaaacaaattcttggaaaactcaatatcacagattttgagcaaaaaatcggtgaactttccggcggccaaatcaagcgtgtggcacttgccaacgtgcttatcagtgagccggaactgctgatacttgatgagccgactaaccatcttgacctagaaatggtggagtggcttgaagatttcttgaagcgttcatcaatggctttgcttatggttacgcacgaccgttatttcttggatcgagtttgtacagatattttagaacttgataatcagtcgcttttcagttattcgggaaattacagctattacttggaaaagcggcaggatcggattgataatttcaatgctgaattggcaagcactaaaaatatttatcgacgcgagctggagtggatgcgtagtacaccgcaagcacgcaccggtaaatcgaaaggacgtatcgaccgcttttacgagattgaagaaaaagccaagcaaagtttggtaaacgaaaatgttaaattagccgtaaaagcatcttatttaggttccaaaatttttgaagcgaaatacatcagcaaatcatacggtgatttgaagattttggataatttttattacaattttgcgcgctacgaaaagctcggaattgtaggaaaaaacggaacggggaaaaccacttttctgaaaattctgctcggtgaagtgaaacccgatagtggcagcgtggatgttggtgaaacggtgcgatttggttattacagtcaggaaggattggaatttgatgagcagatgaaagtgattgacgtggtacgtgatattgctgaagaggtggatttaggaaacggcaaaaagttgactgtgtcgcagttcttaaatcatttcctttttgcacccgaaaaacagcataattacgtctataagcttagcggtggtgaaaaacgtcgtttgtacctttgcactgtgttgatgcaaaatcccaatttccttattctcgatgagccgaccaatgatttggatatcgttacgctgaatattctggaagattacctgcaaacgttcaagggttgtgttattgtggtgagccacgaccgctactttatggacaaagtggtggatcatcttttcgtatttgaaggcgatggaataattcgcgattttccgggaaattacactcaatatagggaatacagagagagccaagaattggaaagtaaaaacaaggaaaaagaagcagagaaaaaacaggagcccaaaaccaagcggcaggacaatagcaagccgaaagatgtaccgagaaagatgacttatggtgaaaagcgtgagtttgaagcgttggaaaaggagattcccgagttagagcaagaaaaagcagagctggaaaacaaactttcatccggtgaaataacagatgccgatgaaattattcagatttccaagcttttttcggaagtgagtgatttgttggatgaaaaagagatgcgatggctggaactgagcgagattgaaggataagcgtaggagctaagacgttcatatccaatagttttagcatagccaaatattagattggatgcgaaacaaatccctttttaaatcaagaaaggttgccacgagcgtgacaaccaatcttttgttaaccttaaatctaatactatgaaaaaatcacaatacaaaagtatgggaattcagtatttcagccaaaatatttaacaataattcacttaaaaaatattgtccagcctttctttgacattttgttgaaaatactcgaatatgataagcatttgatttgtttagttaaaatcctgttgattttaaatttaaccccgctttttcgtccaatccaaacatcagattcatgttctgaactgcttgtccggatgcacctttcagtaaattgtctatgacagaaatgatcaataagttttctccgtgcttttcaacatgcatgattgctttatttgtatttaccacttgcttcatatccggattttctgacactacaaaagtaaacggagcatctttgtaaaagtcacagtataaattttccgcttcttcctgtgttaaatcacatttggtgtatgccgtagtaaaaattccgcgtgaaaaatttccacgtactggaatgaaattcagttctttatcaaaattagcctgcaattgatgtatggattgtaaaatttctgttaagtgttgatgcttaaaggctttatacaccgagatattgttgttccgccaactaaaatgggatgttggcgaaggtttcacgccggctccggtagatccggttatagcatggatgtgaatatcgttttgcaacaatcccgttgacgctaagggtaaaagagcgagttgaatagctgtagcaaagcatcccggattagctacgtgaagggcattttttatggcttcaccgttcaattctggcagcccgtacacaaaatcatttccttcgcgagcgtggcgataatcggtcgataagtcaatgattttcaagttttttggtatgtcgttggcttccaagaattttttactgtcgccgtgtgctgagcagagaaacagcacatcaatctcgtttaagtgcaatttatctgtaaaaataagttcagtgtcaccgtataatccgctatgaatggatgtaacgggatttccggcattgctgctgctgttgataaattcaatttttacttcgggatgatgaatgagaattctgattaattctccggctgtgtatcccgcaccgccgataattcctgctttaatcattgaaatagatatttagataataaattttatgttttatttaatggtgtttgaagttagatttaatccgataaccgagataatcagcgttgtcagaaagaaaattcgccagaaagaaaccggttcattgagtagtaagatgccggcgataactgctccggatgcgcctattgctccccaaactgcataagataacccgattcctagtcccattccgattgctttgtaaaggaaatacatcgaaaggctgacagctacaagaaaaatagcaatccaaaggaacatttctctgcccgaagtggcagatatttttcctaaactgaaagcaaacagcgtttcaaaaaatccaccgataatcaaataaatccaagccattttttaaaataataaacatacctgcttatcgctagggtaaaaccgtagcgggttaaaaattacttaatttttcaaattcatagggttaaggctaataagttgatttaacttcgtatcataaattagctaaacggtaaagctcaaaacgaatcatcaagaaggcggcaatccataaaatcagtattaagtaggtgaaaacgaagtacttaaatttccgatttttatgtcggatagcgtacatcagcacaatgatagcgaatacgccgcccagtaattccattaaatgtaagctgatttcagccacacgttttccgtttttttcagccgatatcttatcaaaaataaataatccggctgaaactaaattaatgattaacaggtaaatgagaaatgttttcattgctattgtgaaacaaattcaattttactttaacaaatccggtcttaatcgttttgtccgctcaacagattgttgatgttgccattcttctatttttgcttgatgcccggaaagcagaatatcaggcactttccagcctttgtattccgcaggacgggtataaaccggcggcgccagtaggttgtcttgaaaactgtccgagagcgcagaagtttcatcgcttattgcacccgggataagtcgcacgatggcgtctgtcataatgcaagccggaagctcaccgcccgtcagtacaaaatctcctacacttatttctcttgttatcagatgctcacgaatccgatgatcaatccccttgtaatgcccgcatagaataattaaattttcagccaaggaatacctatttgccattttctggtcaaatttttccccgtcgggcgaagtgtaaattatctcgtcgtattctctttccgaagttaattttgaaataatattatctattggttcaatttgcagtaccattcctgcaccaaagccaaaagcgtaatcatccacgcgacggtgcttatcgctcgtatagtcgcgtagattatgcacataaatttccaccaatcccttctctttggctctcttcacgatggaaaaattgagcgggctgtccaataattcgggtacggctgaaatgatatcgaagcgcattggctgtttggtttagtagatatttttctgaatgtttgtttttatccaaacacttttgcaaaaatacaaaaaaatcacttcttttatatcgcttttgaattaattcattaaaatataaagataaacagattcagaaataaatattttttaattgattttttaaaatttgataccaaaaatgaaatttataatgtatatttgcatattataaccaaaaactttaatcgtggaaatagatttattgaatatttttaccgacgtatactttaaaactcctatttggagtgattacgttcttttggcgttgtctgtattctttttagcattttcagcgttttatagctcggcagaagtggcttatttctcgttacttcaagaagatttggatgaatttgaagagagcgactcgaagaaggaaaaaacagctttaaagctatttagaactccccaaaaactgctggctaccattatcataggtagcaatgtatcaaaaattgcatttattattatttcccttacgtttatatattctgtttttgattttgaagaaatgcctgtttgggggattgtaggtccttttataggtgttagccttgtgtttattgtgttttgtgaattgatgccaagggtttattcgtcagaaaattcgaagtgggctgttcgtaatagctcagtgattttgcttggacttcaaaattttttccgaccttttgtcgatttgctggcagaatcaaaggcgctggtttacagcaaactaacaaaggttaatgtaaattccatttccattgatgaactttcacatgcgttggatttggctactgaaactcaagatgatgataaggaaatgcttgagggaatcattaagtttggggatattcaggtttcagatatcatgacttcgcgagtagatatggtaggagtggatacgaagttgaattttaagcagttgatagaggttattacttcttccggctattcacggttaccggtcttttctgggagcagagataatattaaagggatactatttagtaaggatatgctaccatatttggataaaccagactctttccgctggcaaacattaattcgtcaagcctattatgttcccgaaacaaagaaaattgacgatttgttgcttgagtttcaagaaaaccgaatacaccttgcgcttgtggtggatgaatacggagggatttcagggctgattactttggaggacattattgaggaaattgtgggtgatatcagtgatgagtacgatgaagaggaggttttgttccaaaaaatagataatcacacctatatttttgaagctaaaattcagctaaatgatttctataaagtgaccgaaattgacagtaaagagtttgaagaaattacagaagatgtagaaacgctggccggaatgattttagaaattaagggtgaattgccggaggtaaatgaaaaacttcaatacaaacattttgtgtttgagatattacaggcagatagtcgtcgcattaaaaaagtaaaacttcacattaaaaacgatccggacaaaacacatcaaaatgacgattaaacaattcatacacccggtttttgttgtattgttattttctgtttttttactcattacaagttgtaaaaaaaaatctataccacgcccgtatggatattttagggttgatttgcctgctcacgattactcggtttttgacctaaataattacccttatacttttgaagtttccaatttggcaaatatagtctctcgacatgaaatgggggagcagtactggatcgatattcagtatccttcgttgaaagccagtatccactgtagttataagccggtgcggtcggatttatttaatttgctggaagatacgcgaaacatcgtatataagcatttagtaagagcggacgatattgttgaattaccgtatgaaaatcgggagacaaaagtgtttggaattttgtatgagctttcaggaaatacggcttcaccggtgcagtttgttttgacggacagtactcgacattttttccgtggagctctttactttgaaagtgttccaaaccaagactcaatagctcctgtgtctcgatatgttttggaagatattgtgagactgatggaaagttttgagtggaaaaatagggatgacagctgatgaaagtcttgctccttacagcctaaatgtcttataatcaaaaagaaatgattttatatcaatcactaacacatcaaaatagcagaatttgcattgttgaaaatcgtttttcaatcgaagaattgttaggtgagctttccaatccgaaaatttataaaaacgaattagaaaaactaaagctcgaacatcggaagaaagagtttctgggcatccgtgttgcactaaaagaagcacttgacggcgcagaaaaggagattgaatacacttatgacggcaagccgatattgaaagacggaagccataaaattagtttttcacactgtaaaaaatgtgtggcggtgatagttcatcctgaatttgatgtagggattgatgtagaacttccttccgctaaattaaagaaaattcatacccgttttttagggcagaaggagttggagttttatcaagaaacaaattcttttgattttctccgtatcgcttggtctgcaaaagaggcactatacaaaatcattggggataaagcatataattttgcagaacagctacatattcagccgtttcaagttgacaaaaaaggtacactcaatgtgcttcatacagatacagaaaaaatttataagctacactatttacttttagacacttatacactggcatattgcattgacgaatgagtaaaatataccaagatattttagataaaaaggctcgcagggaaaaaatgtttgctgtgttgcttgatccagaaaaatgcgtagataaactattgtataacgtgttgaaacagttaaaataccatcatccggaccttatttttattggcggaagcggtcggtgttgcaatacagaagatttaatcaaagaattgaacggcattcccgtgccgaaagttctttttcccggcgatgcttcacaattctcacccaaagcagacgcacttcttttcctatccttaatttccggtaggaatctcgattatttaatcggacaacatgtaaaatcagctattgaaatcaaaaaatcagccgtagaaataattccgacaggatatattttaattgatggcggtaccgactcttctgtaaaacgggttagcaaaactgaaccaatcggtgctgatgatattgcaacagcttgttctacagctgttgcaggtgaattgctcggcatgaaaatgatttatttagaagccggtagtggtgcaaaaaatcccgtttcttctgaaatgattactgccgttgctgctgagttaagtattccaatgatagttggtggtggaattaaaacaaccaagcaactgaaaacagccttcgatgccggagccgatttggtggtagtgggaaatctttttgaaaaagaaacggagaggataggggagtttgtgcagtttgtggagaggtataagctgaaataagtttgtgctgaataagcaaacatttacgcgaatcatttctctctccatatatcaaaaatcacatattcatatattgttttttattttatcctgaaatgtgttttttgggatatgatagtatttagataaaaaaatgccccctgaataatggacaaggggcaacccaaatgttttcacaacggaataatccttattgtgaattgcttcaataattaggactacaaacatacaaaaaaatattaacataggaaatgcttttaagttaaaaaatatttatttatatttacagtcgatttaatttgttgaaaaataatttgttctctaaatatggatagatcaacatttcttaaagtaattggagcaggcgcaggaagttttttgttttcaggaattgatataaatgcagagagtttgcgctatgacttaaaacgagtaaaaatttatgataattatgttcgtggcctgcatttcaggaagaatgattttctcgctgatttaccgcaagtaaatgatgtacttcatcttgaattgaacgagtaccggacaacaaatatgatcgatttgctattaaagtgatgcgaaatggaaaatttctcggttatattgctgcctatgaaaatataacattggctttactgacggatcagggcgtaaagttggaagcaagtgtgagtaaagttgttgaaaatatgcttgataagaaatatttggataaagtgttttcagtataaatatttgtcaaattgcttgttcccatatcgcatattgtgactaccgatttagggtataaaagagcggatgatgtggaagatatgtatcggcaaaggggtgtgataaaataaacactacggagtacgtggggttaagaaaaatcttcggcttatagccttgttgtgaattgtatttggtaaatgaaagtacaaaataaatcaaaataaaatgaaaacaatcttaggacttgatctgggaaccaattcaattggttgggcattgatagaaattgatcaccaaaaaggtatagtgaaaataattgggcttggttcacgcattttacccatgaatgcaggagaaattggcgacttcgaacgaggcacaaaaattaaaagtacgacagcacaaagaacagagtatagggggacaagacgtttaaatgaaagatttttattaagaagagataggttgcacctagttctagatttacttgacgcactacctgaacactataaacttgaaattgattttaccaattcgaaagttaaaaaatgtggacagtttaagaaaaacaaagagccaaaaattgcttacttacctaagcaaaaggggaaaaaagcagagttcctttttatggactcgtatctagaaatgcttgatgatataaattgtgataaagttaaaaacactaaacacaagcgaattccgtatgactggacattatattatttacgtcaaaaagcactatcaaaaaaaatcactttagaagagttggcatgggtcctacttagttataaccaaaagaggggttacgagaaaacggaagttgaagataagtccactaaaacaaatgagattattgaagagttagacttaaaagttaaagatgtaatccctaaaaaggataataataacagacaatattatgagatacatttagaaggcaatgataattttatatataaagaatatagtgatatcccacttacctctaaagacgatataaaggaagttataaaaatatctaaagtagatgacgaaggtaatattgataacaaaaaaaacgaatttaagataactgacatttacccattagaaataaaggatgttaaacacgaaaaattgaatggtaagcatatatataccttaacatttcaaaatggttggattgaagaaaaactaccaattaaaaaattcactttcaggtataaaaacgttataaataagccctatgattacattgtagagacagtatatgactaccaaggtaacataaaaactaaacaagggaaagagagaacgctaagagaacccaattttgatgatacttcttcggactggacattactcaaaaagaaaacagaaaaagaagctttggtttttaatttaagacaaggttatacaaacaataatggggatgtgaagaaatatatttcaccaaaaatatacagtgtgctaaaaaatgatgctataaaaggcacacacactaaaataattggtggaatgtttcaagttgtagatagagaattttatcgtgaagaactaaatcaaattattaacacacaaagaaaattccacacctgtttagaggataaaaaattatttgaacggtgtgtaaaaaccctatatcctaataatgaaaatcatcaaaaatcattattggaaaataaaaatgcaattcaacatcttttagtagaagatatattattatatcaacgccctcttaaaataaaaaaatcagagatatcagactgcaaacatgaaatacgttattggaaacgtattgaaaataaggatggtaaagtaacaaaagaacccgtatacctaaaagcagtttccaaatcacatccctattttcaagaattcagaatttgggataaattacataatctcaggttaattcaacttgaaaaagagataaatggtgaaaaattcactaatcaggatattacaaaagagtatttcaagagggaagacgattatctggaattatttgataagctcaataatagtaaatcattaaatcaagatcaattcctttcatattgtaaaaagaagtttaaaatcaattatgataaaaaggcaagtaattatgtatggaattttccagaagatgaagagataaaaggtaatgaaacaagagtaagttttgctacccgtttcatacggtgcggctttaaagattataaggactttttaactcaggaaaaagagttaaggttatggcattatctctactcagtaaattataaagtgagaacagataataataataaaagtatcagaacctttttcaataatttttttgaaggatataatattgatgattcaactaaagaaaaaatcattttagacttcgctaattatccaaaatttgaatccatgtactgtgcttattccgaaaaagcattaaaaaaattattaccactaattcgtcttgctaaaagagataaagaagatacttggattaccgaaaagtggtataagaaatggttagtagaactaaacaatagaaaaaatactatattgacaaaactgaaagatatagatttttctgatgatgaagttgattattctaatgttgttaacgtagaggtaaatgttcaaaaaggagaaattccttttccaaaaggtttgttttcagcatttaaagggtttgaaaaagtagaagatttcgctaagttgaatttaacacaagcatcctacttagtatatggacgtcattccgagttggcaattgccaaatattggaagtcgccagatgagataagagaacaattacataaagaattaaagcaacattcattaaacaatccggttgctgaaaaagtcattctagagatgatgcaagttgtgaccgatatttgggaaatatatggaaaaagtaaagagaatttcttctctgaaatacatttggaagttggtagagaattaaaaaaatcagcaaaacaaaaacagaatgacagtacacaaatgtctgcaaatagggctcaaaacaaacgactacgtcaaattttagaagaattcctaaacaacagtacttataacgctattcctaataattatgaccattttgaaagattaaagatagtagaagaaggggctgaaactagaaagaattatgacaagtcctttttcgataacaagccatatagcaaaaaggacatagacgaaattctaaagaaaacacatatcacaaaacaagattttgaaaaatataaactgtggatagagcagggttatttatcgccttattcaggtcaaattataaaattaactgatctatttaatggtgcaaaatacaatatagatcacatttttccccaagcatcgattacaaataattcattaaacaataaagtggttgtagaggttgaattaaaccaactgaaaggggaccgcacagcaagagagtttatacaagctcaaaatggacagccacatccggaaacaggcactaaaatttgcagtgaagaagaatatttatcaattgtgaatgctcaattcaccggaaataaaaaacatatattattgtcaaaagatattcccaaagaatttacaaatagccaaatgaataacatgcgttatattgcaagaaaagcaatggaactgttaagtcatattgtaagagagcaaggggaagtggaatttagatctaaaaatgtactacctgttacaggtgcgattacaaatgaattgaaacgagcatggaggttgaataaggtttggacagaattagtctcaccacgcttcattaggctaaataaattaactcagtcaaacctatttggggaatggcaaatctcaaaaaatggaaatagatattttgattgtaatttagatacaaccattcgggacaaaaatgaatcgtatgatattaaaagaattgaccaccgtcatcacgcattggatgctttgattattgctttatgtacagaggatcatgtgaattatattaataatatcaatgcagatgcaaaatatgatgagtacggtaaacaaaaacagattgaagattatagactagagctaaaaaggaaaatcaagtttactaagaaagacaatgaaaaagacgacaacaattggtattatatgttgcctggagaagcccgaaaaaaagatgcaaaaaactctaaaagagactccattatagaaatgtgttatatgtataaagatatggcgcctttcgggcaagattataaaaaaatgatcttaacagccttgcaagatacaattgtaactttcaaacaaaatcttagggtaataaataagaccgttaattattatcagaagtgggtcaaacaatatgatgattcaatgaaaaaagtgcttgtaaaacaaacaaaaggcgatcattgggctattcgtagaagtttgggagaaaaaacattttacaaaaaaatagatataaaagatagagagaataaacaactccataaaaatgcagagttcttttatcatcacacagaggctattgtagatgaagaactaagagacaaaatccagaaacttaaagaagaaaccaaatccgaggatatttttaaaataaaattaaaagaaacatttgacaatattcttgtagaatgtattgcatataaaattgcaagtagagccaaaaatgaaattggcgaaaaattcacttctaaaaaaattaaaactatttcagacagagaaggacaaactataaatattttattaaatcacttaaagcaattcgacaccgtaacagtttcatttgaagaaggtattaggtattttgattccattttagaaaaagaggaattgataacaatagctaatgatgagaacaataattttcagtcaatagacgaacttattaaatatttaagagaaaatgattttaaatataaaaaatctaattattctgagttaaacgttttcattgataaaatatcagatagggactttagaaatgatgcacgatatattgataagataaaagaacatccggaaatagctttctccccaacgtatattgaaaaaatgaatgataaggatgaactaaagagacttaatggaggaaaaccacataagccgataaaaaaagtatcaacctttcaaaaatttggaacacaaagaccagtaagtaaaaataagcattccgtaaaatcaaggcaatatgttgtcaatgatggtggcacaaatatttatcttgctatttatgaaatagaggataaatcaaaaatatcaaaaaaaagtcctataagattgtttagggaaataaatatctttgatataattgaatttcagaaggctacaaattcaaacaatttgcctgtagaaaaattcatcttcagtaatgaaggggaaagatataattttctatttactttgactcaaaatgatgtagttaaagtaaagaatggtagtactgacaaaatattcgcattcaatcgattttcacaaggtgatgtgtacttcagaccaataaatcatgcttttgagatatataaatgtgaagtagatttaaagataaacaataaaacgggaaagctaataggttctcaagaaaatgaaacaactagtttcaacggggaacaaataaagaatacgtgttggaaacttgaagttaatcgtttaggacaaataaaaaaacaatcctatgatcaaaaaaactctctacttcggtaatcctgcatatctatcgttgaagcatagacagttggtcattcaattacccgaggtagtgaagaacgacacattgcccgagactttcaaagcagaagctgtaaaaactattccagtagaggatatcggtgttgttattctcgacaacaagcgaatcactataactcacggattgatagaagcgctattggcaaataactgtgctttaattacttgcaatagtcgtcgtatgcccgtggggttaatgctcccgcttgacggtaatacgacacaatctgaaagatttcgaaatcagattaacgcatcactacctttgaaaaaacaactctggcaacagacagtagaagcaaaaattcaaaatcaggcatacgttttagaagcaaaaaccgaagttattgttaaaaatatgcgtaaatgggcaaatgatgtaaaaagtggtgattccgataactacgaagctcgtgctgctgtttattattgggcaaatctattttcggagattgacggttttgcaagacaccgcgacggtactccacccaacaatctgttaaattacggctatgctattttgcgagcggtagtagcgcgttcattagtagctagtggacttttaccaacattgggcattcatcatcgtaacaaatacaacgcctattgtttggctgacgatattatggaaccttaccgcccatttgtggataaattggtgttcgaaataatggaatgtgaaacagatatttcagagttaacgcaggagataaaagcaagattactgaatatccctgttttagacgtgtttatcaataatcagcgcagtcctttaatgattgctgtcggtcaaacgactgcatcgctttataagtgtttttcgggtgaaattagaaaaataaagtatccatcttttagatgaaactttcgcctaactcaaacttctgttatgcagcgattcagtgaatatagaattatgtggatattagtttttttcgatttaccaactgaaacaaaaaaagaccgaaaaaggtatgcggattttcgcaaaaaacttattcaggatggttttaccatgtttcagttttctatttatttgcggcactgtgctagtcgtgaaaatgctgaagtacatataaagcgtgtaaaaagttttcttccgcccgccggacaagttggaattctttgcattaccgataagcaatttggaaaaatggagttgtttgtcgggaaaaaagaaaaagaagtacgtacaccgtatcaacagttggagttattttagaacaagaaaccctgcccaaaaggcagggtttcttgttgctgaacaacgatattttaaatcctaatttttactataatactctgtcttttaactcaatgctaagatcgtgttgttcagaatatcaaagatactaataattgaaagcaattcacaacctggatttagtggaaaatcattaccactagttgttcagaatatcaaagatactaataattgaaagcaattcacaacgtgcgtaaagtgtgtataatttgttaggatgttgttcagaatatcaaagatactaataattgaaagcaattcacaacccaattccctcggataatccatgaagttcggttgttcagaatatcaaagatactaataattgaaagcaattcacaaccgggaagttgttgatgggcgggttgcccaagttgttcagaatatcaaagatactaataattgaaagcaattcacaactggtgatgaactctttgttgcgccatttggttgttcagaatatcaaagatactaataattgaaagcaattcacaaccatcaccacttgtttgtaccgctaaatcagttgttcagaatatcaaagatactaataattgaaagcaattcacaactgattactgcttcgtttaattctgcttttggttgttcagaatatcaaagatactaataattgaaagcaattcacaaccgccgtctgcgcctaccgcttttgtgccgcgttgttcagaatatcaaagatactaataattgaaagcaattcacaacagtattacatcaaattcgaattgtagtgatgttgttcagaatatcaaagatactaataattgaaagcaattcacaacaatgttggtatgttttcattactggtatgtgttgttcagaatatcaaagatactaataattgaaagcaattcacaacctacttctactttaggcactggaactaatagttgttcagaatatcaaagatactaataattgaaagcaattcacaaccgattgcggtaatagcgtttacaccattatgttgttcagaatatcaaagatactaataattgaaagcaattcacaacaagtccgatttcgtagataattgtttgtttgttgttcagaatatcaaagatactaataattgaaagcaattcacaacaaaacaggagctgaaacgatgggagtaccagttgttcagaatatcaaagatactaataattgaaagcaattcacaacgccatttcgtcgg

SEQ ID NO: 4556 - DNA, 17529 bp, synthetic construct
  misc_feature 1..17529: note = Synthetic
  source 1..17529: mol_type = other DNA
ggaagaggagtaagtgctgctgctgcaattagccatccgccccattttcttgagtttcttatgtgtttttcaaatctaagagtaaaatagtcatttactcgtttgttttttctaataagaaagccaatgctgtaagagattgttcctgcaatataagataatactgctaaaatacttaaatatagccaagggtgagacaatcctccgcaccaaattataaataaatctgatggaattgggctgagcaaactttccgagcataaaaaaattagtaaaacaacccaaatttttacattttcaacgatataattaaaaattccttcaatgtcaagaaatgttttttcggcaattattaataggataattataacagttaaaattagcaaaaaatttaagagaccttttccaacttcttgataaaaaccagttcttttaaaatataaaaatcgtagtcgccagcgtttaaaaaaatttttcttcataaaataaattcacatgcaaatatataaattgcaatttatttattcagcaaaaaagaaataaaattttttacattaattaaatttgttaagtcggcgattaggaaaagaaatacaaaaatcataacaattctgatgattttgtttccatttttaatagctaggcgggaggctataaaagctccgataacatttccgatagcgtgaattagtccatatttccaaactacttggtcgttggctataaaaacaattaaagaaaaaggaatatacagcaacacaagtaagtttttcattgcatttgcgtgcaaaaggtcgtgtccaagccctaaaacaataactgcaagcaaataatatccaagcccaacatgaataaatccgccgtaaattccaattaaaaaaaacaacaaataataccatttttttatgggtttttttagcagttcagcattttctttaagccataaagatggttttataaacataaaaatgaccatggaagccataattacaataaagcaatatctaaaaatttcttcattaattttaattacgataaaagagccaacaatagagccgataacgagaggaatagcaatttttatactttttttccaatcaataagtttgttattttggaaagaggaaacagatgttaaggtttgaaataacacagcgacacgatttgtcccatttgctacagaaagtggcagcccaagccaagataaaacagataaggaaataattgttgctccgccggacaaagtgtttataaatccgacgaaaagaccagaacatattagagcaataacaacatgtatttccatggtttatatttatcgtatttctaaagctatatttctgttaaaatgtttcggacaaatttgcaaaaatagctttttgaatgttgtttttttaagaattgcggttatattcgttttttataaagttatataaaagtcttacgcctactcctgtgctgcctttgggccaataattccatgttttttcaagaaacgcaggacctgcaatatcaaggtgtatatatggataatctgtgaatttttctagaaatttaccagcggttattgctccagcgtatctgccaccagagtttgaaaagtcggcaatgtcggaactcatgtcgtcaaaatattcgtcccaaaaaggaaattcaacaacgcgctcaaacactttgtctgctgagttttgcaatctttcaaaatagccggaagctcctgattccatgcctacgatggcataatgtccaattgctacatgtgcagcacctgtaagggttgctatatcaattacaacagatggattgtatttctgtgcaaaagctagtgcgtcagcaagaattaatctgccctctgcatctgtatttgttatttctactgtttttccattcatcattgtaagcacatctcccggagcataggcgttttctcccggtctgttgtcagttgcaggaattagcgctatcacatgagcaggaatttgcatttctgcaataaggtgaatagctccagccacggcagctccgccagccatgtcgcttttcatgtccgacatataatttccgggcttaaggtttagtccgccagtatcgtacattactcctttacctacaaaaacataaggttttttgttaaaatgcttttcgggtttgtattccaaaattgtaaatgttggctcgtcaatgctaccgcgattcacacctagcaaaccgcccatttttaaagatttaattttttgctttgttaaaacttcaacttttacatcggtgtccttaaaaaaatcctttatgtaattaggaaatgttaaagatgtgagctctgaaggaatttcatttaccatgtttcttacaaagtttacagctttttgagtacgcattagctcaaaaacatgtatgttttcaactaaactttgccttataagtatagattttaagtgctttttaggctcgttggctgttttatattttgtaaactcgtagttcccaagcaaaatgccttcaataaaatattttgaaagcgatttttcttcaatataaacatctaaggaaatttcttcaattttttctttattaataaatttcaaaacgttattgcctgttcgtcttatcttttcaatgtcgttttcgttttttattttttctgaaacaaaagcaacaatgtcaaattttgataatctattgaagaaaacaaaatcttgtttttctttgcgtaagctgttttttatgtaagaaatttcttcttttgaaaaagctccagaaggcagattgtcaacggtattaattagatatattgttgttcccgttgtatattttcgcttgtataatcctatttttatatccataaaagtttttttgcaaaattataaaacaaaaagctctttttcaaaaatgtcgtgtaaaaaaaacaaagaggtaaatgaaaagaagcatagctgaaaaagcttttactagcagtttgttttctaatttttttgttttgttaattaaaataaaaatggttagaactgtaattataatcacaattatccacagttctttcactctgtcttcagatttaaaaaattctccatcaagagtatagccatttacaagatttagcaggggagtgatattcagcgttatttcttttccgtcgaggcttatgttttcaaaacctttggcagcgttaaattttagattattaacggagtatgagccgttcgggtttatgtgagctatgccgggcaagttttccttaggtaaaaaattatcagtaaggataaaaaagcaaaaagcaagtatgacaaaattaaaccatttgggccacaaaatgctgtgcatgggcatattaaaggcgtcatttttttgcttaaattcgttgtaacgcatttgggcatattgttttgccctgtttctagcttcgtcttcccatgctttttgggagttgttgatatttacttttttgtattttgaggttaatacttcataagcctctgtaactttaataaaattttcagctgcattttcctcttgacttacatcagggtggtatttgcgagccaattctttatagcgccgctttatttctgttgtagaagcattttcgggaacgccaagaatttcgtgatatattgacaaattatattatttttttaagtaaactgttctcctttttcaattaaaacatcgtttacatattggcgaatgttttgctcgtcatcttttcgaaccaccattaaaatattgtcagattctacaacaatataatcttctaaaccttgaagcagaaccattttttccaaaggcatgtgaattaagcaatttttagaatcatacagcatcacattttttccaataattgcattgccattattgtctctttttcgattttcgtatagcgagccccatgtgccaaggtcgctccaaccgaagtcggaaataataacgaaaacattttttgctttttccataacagcatagtctattgaaatgtttttgcagagcatgtaagtgttatagataaaatcttcttcattgatggttccgtaaatatttttacctttttcgaaaagatcatttatttcaggagcatattttgcaagagcatttattattgcttttgctgtccaaataaaaatgccgctattccataaaaaatcgccacttttaataaattcattagcaatttcaagctgcggcttttcagtaaaagtttttacttttctaattcgggcatctttttctggtttttctttgtcaaaatattgaatatatccatatccagtatccggtcttgtaggagtaatgcctaatgtaataaggcgattatctttagatgcagcatcgagtgcagtttttaaatgctccgaaaaagatttttcatcaaaaataatatgatcagaagggcatacaaccatagaagcatctggatctgcggaatatattctgtgggctgcatatgcaatgcaaggagctgtgtttttacgagagggttctgaaagaatattttcttcttttatttcaggaagttgttgttttacaagttcaacgtagtttttatttgtaaccactaatatattttctgcggggcaaatgtctagcaatctatcaaaagttagctgtataagcgttttacccatgcctaaaacgtctataaattgttttggttttaaatttctactcatgggccaaaagcgagtgcctagccctcctgccattattacacaatatgtttttccagttgtcattaatacatcatttttgcaaaagtacaataattattttgttgttagcaattaatatttttttgtacaaagccaaatattaactgtttttgtataaggcatttaattaggtggtaaaatcaaaattaatttttatttgaatatacggttttaatctctagaaaaatgtgtatctttactgcactttaaaatgcgttattaaaaaatataaaaatattatgaaagagataaaaataagagatttgacacttcgtgatggacagcaatctttgtttgcaacgcgaatgaatcaggcgcaagttgacttggttttgcctttgtttaaagaagcaaagttttatgcaatggaagtttggggcggagcagtgccagatagtgtgatgagatacttaaaggaagacccatgggaaaggcttgctaaggttaaagaaggaataggagatgcatctaaactcacagcactttctcgcggaagaaatctttttggctacaatccttatccagaagatgtaatagaaggatttattaagcatacaattggtacaggaatagatattttgcgtattttcgacgctctcaatgatatgaacaatattaaaagttcaattgggtatgtgcaaaaatatggaggaattgctgatggtacaataagttatactattgatcctaaattagaaagaaaaaagaagtttttcggattaataaaagagaaagaacagcctccgttttttactgttgaatattttgttggcaaagcaaaggaaattgaggctatgggtgcggatatgattacccttaaagacatggctggattggttgatcacgaaagttctgcaaaaataattcgtgcattgaaaaacaatgtgaaaattcctgttgatttccatactcactcaactccgggatatggcttagcatcagtacttacagctattatgaacggtgcggatattgtagataccaatatgatgccgtttgctggcggtagtgcggctcctgcttatgaactaattcatctgttttgtcaaaaattaggaatagaaacaaatgtaaatattgatgttctaaaaaaattaagcgacaagctagtggaaatacgcaaggatatgtcaaaccatgatagttacaagattttccctagaatgtttgacttgaaaaatgacaaattgcctaaagatattgagttaatctttgataaagctattgaatctgtggaaaaagaaaaatacgaagatgtgctgaaatattgtaatgaaatagaagcgtattttaatttccctgctgcaaatgagatggtgaaaaatgctcaaattccgggtggaatgtacacaaatatgttggcacagctaaaagctgcaaattttgaaaaattattgccacgagttttgcaagcagtaccacaagttagagttaatgctggttctattccgcttgtaacgccaacaagtcaaattgtgggggtgcaggctgtaaattgcattttagacgaaaataaaggattgccttggttttcaaatgtaaatacacaatatataaacttggtaaaaggaatgtatggaaaaactccaattccgatagatcctgaatttagagaaaaaattacaggttcacgcgaagaagtaccatataattcagattcttataaacctcaggaaaataaagttttagaacagtttggaaacagaaatttgattaattcagaaaaagaccaacttttaatggagcttttccctgctgttgctgaaacatttttgacagaacgagctcaaaacgaatggaatgcggagcaggctgctatcaaagctgagcaagatagaattgaagctgaaaaacaagctgcaatacaagctgaaaaggctgcatacaatgctcttagcaaagccgaaaaagaacaacgtctccatgatgggctttacaactatccatggacttcaaaaatggaaaaatagggaatacctatttgctaaaattgaaaataaataaaaggttgtacggattcgctttttagttgtaaacaaagctgtatcagtaaaacaaacgctattgctttaacaagaaatggaacttttttaatgtaaaattgttccatttttggatatatatagtctggaattgcgtggatagcaaagccaactagcaataagattacaaataagtagcgaatattccaaaatggttgcaaataagcccagtcgaagtctgcaaatatttgcgaaatcattgttgtggctgttgaaaagtcatttgcacggaaaaatatccataaaacggctacaaaatggaatgtgataaaccatgagaagaaattgtaaactgcattgccagttcttgatttgaaatcctctttaacaacgtattttttccatgctttgtgaataactaatccaacgccatgcattcctccccaaaaaacaaatttccacgaagctccgtgccaaagtccgcctaaaagcatggttatgaataagtttatatattgtcttagctttccttttctgtttccaccaagcgaaatgtataaataatctcgtagccacgatgaaagactaatatgccaacgccgccaaaattcagtaacagatagagattgataaggtttgttaaagtttattcctaagttaaagcctaacaaaagcccaatacctattgccatatcgctgtatccgctaaaatcgcaataaatttgcaatgtgtagccataagcagccatgagattttcaaatccgctgtatgtgctaggagctgcaaaaactaagtcgttgtattgtgaaataaaatctgctaacacagcttttttaaacaatccttgcattatgaggaaaaagccacgatgaatttcctcaggttttaaaattatattgttttttaattgtggaaggaagaattttgcacgcacaataggtccagcaactaaatgagggaaaaagctcatgtaaaaagcgtagtcaagaaagttgtttgttggctctaactctcttctgtagatgtcaataatataacttaatgtctggaaagtgtaaaaagaaattcctattggaagaaaaatatcaagcggctcaaatggctctcctcgtaggaatgcgatgttttctaagaggaaatttgtgtatttgaagtaagctagtaatccaaggcttgtgcacaacgatatgactagccaaaatgttctgaacttttgttttttagccttaaaaatagcccaagcaagaccataatcggctgctaatgtgaaaagtaaaataaacagataccagccactagatttgtagtaaaagaaaaaagaaaatcctaaaacatatagtgtgcgcgaaagtttgttgttatacaaaaaagcataacctattaaaaacagagtaaagaaaaataaaaattgcccactattaaacagcattggacttgctgaatcgtaggaaaacaaatcatgtattacattactccatctcattaaaaaggcgcatttggttgtaaaatttctgttggaggaattttattaaaaaatgtgtctggagggctcattaaaattttcttttctgctttgttctgtaagaataccgcaatggaatccatccatttaaatgcagaagctttcttaggatgtgcaccatcttttgttcgttcatagcttaaatctttagatggaaaatatcttttactacctgtatagtgcagaattaaatcatttattcctgtgtcgtctttccaattaggtggtccaatccataaaaaaggtagggtgtccatttgagctataatgtgcctcacatattctgctcgttcagtttttatatctcttataaaaagctcatttgctcctaaaactagcaaaacgtaagaaggattatgcttttttataaaatgttttaacgtgtcgcactgtccataccacagagttgatgagctataccaaataacagtgttcatggaatgcccattttttctgcaataatcgttaagtcttattcttaaaaactccaacattgaatcgccaatgagtaaaaatctttgagaagaagaatctactttatcatctgttttttctttgctagagacataagccatgagaccaacgggtaattcttcgggatagaaaaacttttttatacctatgtctttaaacttgtgaggtccaattttaaaatcaatgtttgcaaaagacagtaatccaaataaaaccaaagctccagcaagtaatgctacatactggaagaaagctttcggtggcggattttttccaaaaaagtttaatttcattgtgcaaaaataattatttctgctttttttgagtaaataaccaacgaatgttttcaacatttgaataaacattgtcccagcagaagtgcccaaggtcagtaaaaatgagcgatttagcgttgccgttgcatttttttattgcattaaccatatttgttgttcttgctggaaccacaagtttgtctagctttccatgaaaagcctttattggaatattttttaataaacaagctgtattttcgtctccgccgccacaaattggcattgcagctgcaaaaaaatcaggtcgcctcaccattgcgtcccaagtgccgaagccgcccatagatattcccgttatgtaaattctgtttgtatctatcggatattcttttattaaggaatcaagcattaagaatgttagatttagcggcgtagaaatgttttcagggattgtatgtttttgcaatttccagtcaacttctacccagcgcttgttttctggacattgaggagcaacaattatacatttgtattgctctttagtgctatcaagcatgaaatattttacaccatgaagtaattgcttttcattgtctgtgcctcgctctccagcaccatgtaaaaaaactaacaatggtaaattttcatttattgaatcaggcacatacaggcggaaaggcagttctccactagcagaagaaaaagttttttttgcaaacaacgcctcccaagcagtctgcgacctgagcgtgcaaaaatgaataaataaaaaacacaaagcaagtcttaaaaaaaccctcataaaaactctttaaaaaatctaccccaaagatacatttattatgccataaataattaggattttctaaaaaaaagcgtataaacgaaaacgaggcgagttaccccgccccatcttaaatgttttcacaacggaataatccttattgtgaattgcttcaaaatttgtacaacaaaaataatattttttttaaaagtaaacaaaaaaatttataaattcaccaaataattttaatttgatagatattatgaaaagaattttagggctagacttaggtacaaatagcattggttgggctttggtggaaattgaccatgaaaaaagagttgtaaaaataattggactaggttcacgtattttaccaatggatgcaggagaaattggagactttgaacgcggtggaaaaataaaaagctctgcggcacagcggacggaaaaaagaggagctaggcgattaaatgaaagatatttgctgcgacgagatagattgcacttagttcttgacttacttgatgctttgccaactcattacaaacttgaaattgatttcacaaattcaaaaggtgaaaaatgtggtcaatttaaaacaaataaagaacctaagttagcgtacttaccaaaacataagagcgaaagagcaaaatttctttttatggattcatatgaagaaatgttagataatataaatgatgataacgttaaaaacattaaaggaaaaagaattccttatgattggacattatattatttacggcaaaaagctttatcagaggagataagcttagaagaattagcttgggttttattgagttataaccaaaaaagaggatatgaaaaaacagaagtagaggataagtcaacaaaagatacagaatttgttgaagaattagatttgcgtgttttagatgtgtttgaaaaggaaaaagatggaaaaaaatattttgaaatacatttagatgggaatgataagtttatatataatgaatattctgatattcaaatgacatttaaaggtgatttaaaagaagttgtaaaaatatcaaaagttgatgatgagggtaatacagatgaacaaaagacagagtataaaatcattgatatttattctttagaaattcaaaagtttgattacgagaaaatagatgcaaaacacaaatatattttgacatataaaaatggatggattgaaacaaaattaacggcaaactattatagctttaaatataaaaatgctctcaataaaccttacgattatattgtagaaactgtttatgataatcacggaaatattaaaactcagcaaggcaaagaaagaaaacttagagagcctgattttggagataattcatctgattggacattattaaaaaagaaaaccgaaaaagaagcattggcttttaactctgaaaacggctttcttcatgacaatggagatgtaaaaaagtacatttcaccaaaaatttatagcgtacttaaaaacgatgctaaaaaagggactcaaactaaaataattggaggaatattccaagttgtggatagagaattttatcgtgaagagttgaatcaaattatttctacacaaaaacaatttcataatagcttgaaagatagaaaaatatttgaacaatgtgtaaaaacactatatccaaagaatgaaagtcatcaaaagtctctattagaaaataaagatgcaatacagaatttattagtagaagacattcttttgtatcaaagaccactcaagagtaaaaagtcagaaatcgctgattgtaaatatgaaatacgatattggaaagatgttgttgacaaagaaaccggtgagataaaaacaaagcaacaacctgtttttattaaagttgtttccaagtcacatccatattttcaggaatttagaatttgggataaaatacataacttaaaattaattcaattagagaaagaagttaatggtcataaacagactaatcaagatgtaacaaaagaatttttcaaaagcgacaaagaatatcaggaactttttaacgaattgaataatagaaaatcaataaatcaagaacagtttctaacttattgtaagaaaaaatttaatattgattacaattccaaagacagcaattttgtttggaatttccctgaagatgaagaattaaaaggaaatgaaacgagagttagttttgctactagattcaagcgatgtggtttttcaaattataaagattttctaacccaagcaaaagagttggaattatggcactacttatactcagttagctataaagagagagtagcaaaagataaaaaaagtataacaacttttttcaacaattattttaaagatttcgagattgaaaaggaaataaaagagaaaattattaatgatttttcaaattatccaaaatttaagtcaaattattgtgcttattctgaaaaggcgttaaaaaagtttattccaataattagtttgggagaacacaataacgagtattcttggacaaatgaaaaatggtataaagattggcaagcaacacttgaaatccgcaagattgaaatacttgacaaattaaagaaaatagattttagtgctgataaaccagattattcgaaagtggaacacactgatgtagattattccaagggcgaattaccatttccgaagggtttgtttaatgtatttaaagactttaaacatccagaagatttcaataaacttaatttaacagaagcttcgtatcttatttatgggagacattcagaattagcgtttgctaaacattggaaatcccccgaacaaattagagaagaattgaataaagagttaaaacaacattcattaaacaatcctgttgcagagaaagtacttcttgaaatgatgcaaatagttgccgacatttgggaatattatggaaatgcagaaaaggatttcttttcgcgtattcacgtagaggtaggtagagaattaaaaaaatctgctaagaaaaagaaagaagaatatgaacgaatgtcaaaaaataggagtcagaataaacgtttacggcaaattcttgaagagtttttaagtaatgactcttttaaagccaattcaaataattcagaccactttgaaaggttaaaaattgctgaggagggagctgaacacaggagtaatattgacaaagaattttacgaaaaagatgaaaagcttaaagctaagaatatatctaaaaaagacattgatgggattctaaaaaaagcacatattacacaacaagattttgaaaaatataaactttggatagagcaaggttatcgttccccttattcgggtgaaattataaaattaacagatttgtttaatggctcaaaatataatattgaccatgttttcccacaagcttcaattacaaataattctttaagtaataaagtagttgttgaggtcgagctaaataagcttaaaggagatagaacaggaagagagtttattcagcaacagaaaggacaaaagtatttaggaataccagtttgtactgaagatgagtatgaaaaaattgttaaagaacaattttcagggcaaaaacgctacatcttattgtctaaagaaattccgaagggatttattgatagtcaacttaatacatcaaggcatattgcccgaaaagcaatggaactattgagtcacattgttagagagcaaggtgaagtagagttccgttctaaaaatgtgcttcctgttacaggtgcagtaacaacagaattaaaacgagcatggaagttggatgaagtttgggtagagttagttacacctcggtttattaggctgaatgagctaacgcaatcaaacttatttggaagatggcaaacatcaaaaaaaggacaaaagtattttgattgtgatttagacaaaactattcgagataaaaatgaagcgtatgatattaagcgaatagatcatcgtcatcatgcattagatgctttaattgtggctttgtgtacagaggaacatgtaaattatatcaataatattaatgctaatgcaaaatctagtgagtatggcaaacaaaaacaaattgaaaaatacaggcaaacacttaaacgaaaaataaagtttacaaaaaaagatgatgcaaataatgaaaatgattggcactacatgctacctggcgaaaaacgaatggacaatgcagaaaattcaaatagaaattttgtaatagaaatgtcctataattttaaggattacgacacttttcatcgtaattataaaaaaatgattttaaccgcactgcaacaaacaatagttacatttaaacaaaatcttagagtaataaacaatagagtaaattattatcaagcagagccaaatacaaaacagagagtagctcaagagccaaaaacgcaaaaagagattaatagctcaagtaataaatataattggggtattagaagaaaccttagtaaagaaacattttatggaaaaaggattataaacaatgaggaaatgcgaattgagagagaattgttaaatgatacatttaaaaaaactaaaatcgacaaaatatatgataacgtagttaaacaaattttattaaaatatttatcgcaatttgatacagtaaaaattccatttgaagaagctattgtttattttgacgctttattagaaaaagaagagtttaatgcaattattaatagcaatgaaaaaaatattaaatctttggatgatttaattcgatatctaagaacgaataatcttaagtatgataaaacgagctatgcaaatcttaatgtttttgtggataaggttacagagaggagttttagaaatgaaaaattagctgatggctcaagtaaatatgagataatagagcatccagagattgcttttacgcctgagcaaattgaaaaaatgaatgagccacaagaaatagagaggttaaataatgggataaaacataagccaattaagaaagtacaagtttatcaaggttttgggaaggaacgtccgttaagtgagagtgagttttcggtaaaatcaaagcaatatgttgttacagcagcagattctaatttatatttagggttttatgaaagagtttatcatgatgaaaaaggtaaatatataactgagcgtaagtttaaagatattgatttaatagaattaattgaagttttaaaacaagatttttctaagcgattaagtccgcttccaaacaagttgtttgacaatgaaatgaatgaatatgtttgtaaattcactttatctcctttagatttagtatatgttcctacggaaaaagaagtagaaaatccttcattagtagatattaaaaatctgtctaaagagcaaattgagagaatatataaatacattgacgggagtgaggttcatgcgaattttgttccgtattccgtagctatacctatttggagatttcatggacaaatgaaaaaagaaatttttaaagaacttaatgaaagtaaaaaacttttaattagcgagaaaaatttaatacaaaatgaatttggattaggaagtccacaaaacaaaaatcaaaatatgatagatggggtcacccaaattaaaaagtattgttggaaattagaaattaatcgcttagggcaaattcaaaaagtattacgatgattaaaaaaacgctctatttcggtaatccagcttatctaggtttgcgaaataagcaaatggcaattaaattgcctgaggttgagaaggctgatgtgcccgaaacttttaagaaagaatcagttaaaactattccaatagaggatattggtgtggtggtgttagataacaagcaaattgccattacgcatggacttatagaggctttgcttgaaaataattgtgctttaatcacgtgcaatagctctcgaatgcctgttggtttaatgctgccacttgatggaaacaccacgcaaactgagcgatttcggaatcaaattgatgcatctattccgcttaaaaagcagctttggcaacaaactgttcaagctaaaattcaaaatcaggcttatgttttggaaaataaatcaaaggttgtggctaaaaatatgcttatttgggcaaatgatgtaaagagcggagatcccgacaattacgaagcacgtgcagctgtttattattggaataatatatttcccaatatttcgggctttacacgtggtagggagggtgacccgcctaataatctactgaattatggctatgccattcttcgtgcggtagtagctcgctccttagtggctagcggacttttaccaactcttggcattcatcataggaacaaatataatgcttattgcttggcagacgacataatggagccataccgtccctttgtggataaacttgtatttgaaattattgaaagtggtgcagatatttcagatcttacgcaagaaataaaagcaaaattactaaatatacctgtgcttgatgtgaacatagatggacaaagaagtccgctaatgattggtgtaacgcagactacagcttctttatacaaatgcttttccgctgaaataagaaagataaaatatcctatgtttgaataattttatgaaacgaattactgaatatagaataatgtggatattagtattttttgatttaccaactgagaccaaaaaagagcgaaaaatttatagtgattttcgtaaaaaacttattcaagatggatttaccatgtttcagttttccatttatttgcggcattgtgcaagtagagaaaatgcggaggtgcatattaaaagagttaaaagttttcttccaccacagggtcatgtcggcatactgtgcataaccgacaagcagtttggaaatatggagctgtttatcggtaaaaaagcaaaagaaatagaaactccaaatcaacaattggaattgttttagcataaaaaaatcccaccattatagtgggattttttatttataaacaacatttttttatttctaaaaagcctcacaactctttgattattaacaagttacacagatccagttgtttataatcacaaagatacaaaattttgaaagcaattcacaacaatctgtttgccaatgaagtcagaatgtagttgtttataatcacaaagatacaaaattttgaaagcaattcacaacaaataggctactttatgacgatgagattattagatttcttgtgtctgaaggctttcttgaacaaaataaacatggcatatatataacttataaaggacggattaagattgatgagggtggatttgtgggtgcaagacgcagaaagattgctgtcgcaattctgagtgttgttactgccattgcagcagttgcttctgtgttgttgcaaatctttttgtaatatttgaataacagcaacagtttgccactcaaaaagggcgactcttagttcttttttgcttcgctttgtttgtagcttttcgggtaaatttgaagtttttttcatttttatttggtttttgtgaaaaaatgttgtatatttgcatttacatcggattggtcggaaacgaccgccggcgtgaaccgcctgaaatgggtggttgaccgcctgaaatgggcggtttttttatttataggtatatacgattccattaacaatatagttgtttataatcacaaagatacaaaattttgaaagcaattcacaacaatctgtttgccaatgaagtcagaatgtagttgtttataatcacaaagatacaaaattttgaaagcaattcacaacatggtatgccattcattttttactctcctagttgtttataatcacaaagatacaa

SEQ ID NO: 4557 - DNA, 17228 bp, synthetic construct
  misc_feature 1..17228: note = Synthetic
  variation 16830..16998: note = note, n is a, c, g, or t
  source 1..17228: mol_type = other DNA
tggaaaattgtattttacgtgacctgccggaaaatcgaaacaaaccggaaagtcgtattctgccactgcctgtgctatagattcgtatagcgccagatacatatcgttatcttcagtataatcgctgaattgacccacaattaatcccgatattttatcaaagatgccggcaagcttcaattgattgataaatctgtccactttatagggttcctctccgatatcttcaataaacagtactccttttttaggaattttggcatatttagttcccaaaagcccacaaaaaacagaaagattgcctccaaacagttttcctgatgctttaccttttcgattcagatgagcataatttgcaaaaggaatatcgtatataatgggttctccggcaacgatggctttcgtgaaacggacggaaatatcagcaggcccttcttcggcaaaatgctttgccataggtccgtgaatggacataattccgttgctttgcaacgcagcgtgcagaacggtaatgtcactgtaaccaataacccacttgggatgttgttttataccggtgaaatcgagtttatcaagcaaatgaaccgttccgtatccaccacgtgagcagaagatcagttttacatcgggatcgtccatagcctgttgtaaatccgataaacgttgctccacaaacccgctaaaacgaccggtatgacacaaggcattttcggaaacttctacccccagtccccactcgctgagcacaacggcagctttttccaccaacccggcatcgattttcccggcaggcgaaagaataactgctttatcgccgatttgtaattttggaggttgaagcatttatgagttcgaattttaaacttcagacaccagaagtcaggtttttatattgtctgaaatctggtgtctgatatcttttatctgtttttatgcatcaatgtgcgcgtatgtagcattctcttcgatgaattcccggcgtggagcaacatcctcgcccatcagcatcgagaagatcatatcggcgtcagccgcattttcgatggttacctgacgaagcgtacgtttatcgggattcattgttgtttcccaaagctgctcggcattcatttctcccaaacctttgtatcgttgagagtgaacggcattctcgtttccatcggcatatttatcgataaacgcctggcgctgacgatcgtcccagcaatattcttcaattttcccttttttacaaaggtaaagtggcggagtggcaatatagacgtaaccgttctcgataagcggtttcatataacggaaaaagaaggtcaggataagcgtggcaatgtgacttccgtccacatcagcatcggtcattatcaccactttgtggtaacgaagtttctctatattcagcgctttggaatcttcttccgttccaatagttacacctaaagcagtataaatattgcggatttcttcgttctcaaatacacgatgagtcatcactttttccacgttcagaatttttccgcgaagcggaagaatggcctgaaacatgcgatctcggccttgtttggcagttccaccagccgaatctccctccacgataaagatttcgcatttttcgggatctctgtcggagcagtcggctaattttccgggaagtcccccacccgataacggcgatttccgctggatcaattccctggctttacgcgcagcatggcgggctgtagcagcaagaatcactttctctacaatgattttcgcttctttcggattctcctccaaataattattcaacgcctctccaatagcctgatctacggcgcccataacttcactattccccagtttggttttcgtttgcccttcgaattgcggttcagcaacttttaccgataacacggcagttagtccttcccgaaagtcgtcaccgctgatttcaaccttcactttttcaagcattttggaatcctcggcatatttcttcagtgtgcgtgagagccctctgcgaaaaccggtaaggtgagttccaccctcaatggtgttgatgttatttacgtaagagaatatattttcgttatacgttgagttgtatgtcatcgctatctcgatgggaattccttgtttttcggtaatgatgtgaatgggttccgaaattaacggttctttcgccttgtcgatgtaacgcacgaactcttcaagaccgttctccgaataaaaactttccgttttaaaagtgccgtcttctcttaaatttcttttgtcggtaagtgtcagcgttacgcctgcattcagaaaagccagttcgcgaagtcgtgtagacagaatatcatagcgatattcgttaacgatgaagatcgtatcatcgggcttaaaagttactatggttcctgtgatatcggtatcaccgatcacctgtacatcggcataaggctttccgcgtgaatattcctgaacatggatctttccaccgcgatgaatttcggctttgagatacatggaaagcgcattcacacacgatacaccgaccccatgtagtcctcctgaaaccttgtaagttcccttatcgaatttgcctccggcgtgtaataccgtaagcaccacctcgagtgcagatttcttttctttctcgtgataatctaccggaattcctcgtccgttatcggtaacggtgatggaattatcttcattgatggtaacatttatttcgttgcaatatccggcaagcgcttcgtcgatagagttatcaaccacttcgtaaacaagatgatgaagtcctttttcgctcacgtctccgatgtacatcgcggggcgtttacgtaccgcttccaacccttcaagtacctgaatattctgtgcggaataattcccgcttgccgattttttttcttcttctgtcattttaatcctttaattatctctctgagaattagtaatttattcatattagcgtttaggctaaaaaatcgaacaaatatacgaaaaatttgccgttcagccaaccgtttttcgtttttttagcacaaaaaaagcggctgaaatgccgcttaaaactcataatcgatggccgcccgctccgttcgcaccttaacaataaatcctcccactttttggtgttcgggatgcgaaatataagtctttaaatcttccagattcttaaattcactgtcgagcataatatcgtgattacccgcaggagcatcggcatgatttatcgatacttccattttaagaatttcggggatcaactctttcagcgcttcaagacgctgttttattatcgccgcattcacggctctcgaattaccttcggcttcatcagccagcttaaaaagcacaatgtgcttgatcataaattgttgatttttaattcatcttataatgtattcctgagacttagtcaaagtccaaaattactaaaaacattatctgaaagatcaaagaagctccttattttttgtaactttgctttgagcataaactaaaatcgaaaaaattaaacagttatgagtacaggaacaattattaccatcgtgggcgttctggtaattgtattggcgtttttccaatactacagcgccggcaaaaagagaaggcgaagatacagggacaaaaagtaataaattttgtgtttaattgccgaagaaagataaaaaaagccgaacataaatgtccggcttcatctattttgatgaaataaaaatcaacccaacttgctaatatgagcagccaatttagacttcaagttattagccttattttggtgaataacttttttcttcgccagtttatctaacatcgaacaaacctcgggatacattttcgtcgcttcttcctttgaagttaaagcgcgcaatgcacgtaccgaattcctggttgtgcgtgaaacgtaacgatttgataaacgacgaacttttgtctgtctgattcttttttctgctgatttgtgatttgccattatcgttgactttttaaatctttttttattgtagcccataggggaatcgaacccctctttccagaatgaaaatctggcgtcctaaccgatagacgaatgggccatttgagatgctaacccgaaagaaaaattaacctttcctcaaattgcgagtgcaaagatagaacctttttcgagatcaacaaaattttgcatatattttttctcaaaaaactttattttaaatcgaaaaaagaaaaaatatatgtcaaacagaattttaaacctcgataaattggatatttgaaaaataatttctaattttgcaccccgataattcagcaacaaataaaacatcagataaaatgaaaagaacatttcaaccctctaacagaaagagaagaaacaaacacggtttcctttcgagaatggcaaccaaaaacggaagaaaagtattggctgcccgccgtgcaaaaggaagagcaagattaaccgttgccgattaatcagaaaagactttcaacttactaaaagcaggaatatgcgacgcatattcctgcttttttgttatgtttcatcgaacatataaaactctttgccggtaaaaaactaaaaacaatcattttttttatacttttgtagagaaatttcaacatcatattttaagtatgagtacaaaacctgttattaagaattttcccggaaacaacattctcctcaacatagtggcaattggggttgttgctgttcttctgctgatacttaccctgctttttctgaatgtgtacactcgtcacggacaaaacgtgatagtgcctcagttgcaaggacttcaggaagaagaagccgatgccattctgaaatcaaaaggattggatatccaggtagtggattctatttttaaaaaagatgctgttcccggctccatcattgatcaaacgccaaagccaaacaacaaagtgaaggaaggccgcgatatttacgttactatttatgcccgtaacccacagcaaatttccgtccccggcctggtggatttctcaacacgtcaggccgtagcattgctcaattccatcggatttacgcaaattgccatcgaggaagttcctgctcagtatagcggattggttatgtcggttgagtatcgggggaaaaaactgatgccagacgagcaaatccctgccggatcacctcttaagttagtggtaagcagcggatttgttgacgactcacttaacctgaacagggaatacgtggtttcgccgggacaagcaagaatggctccggactctactcaaaacacgccgactcaaccctcgaatattgacgaatcattcttttaattagaagtgttagaaaacgatctcgatgatatacaggatttatcggaagaagacgatgaactgatcgtcggcacatccgataatcaaaaattcgagcattatcgatttgtagccgataaaggacaaagtctgctgcgaatcgataaatttttatcagaccgtattgaaggtatttccagaaaccgtattcaacaggcagccgatgctgattgtatcctcgtaaacggagcagccgtaaaatcgagttacaaagtaaaacccctggacgttattactattgtaatggatcgtccgaggagagaattggaaattcttcccgaagacattccactcaatatcgtttatgaagacgatgatttgatggttatcaataaaccgccgggtatggtagtacatcccggacacggaaattacaccggaactttagtaaacgcaatagcgtttcatttgcaatacgaacacggaatggatatgaccgatccgcgactgggattggttcatcggattgacaaagatacatcgggattgctgctcgtggcgaaaacacccgatgccaaaacgcacctttcagcacaatttttcaacaaaaccaccaaacgccgctacgtggcgctggtgtggggaaacgttgccgacgatgaaggccgtatcgaaggaaatatcggacgcgacccgaaagaccgcatgcaaatgcgcgttttcgaagacgaagagcacggaaaacctgcggttacacattacaaagtgttggaacggtttggctatgtaacgcttgttcagtgcgaactggaaaccggacgtacacatcagatccgtgtgcatatgaaacacatcgggcacacactgttcaacgacgaacgttacggtggcaacgaagtacttcgcggaacgcattttgcaaaatacaagcaatttgtgtataattgtttcgccatttgtccgagacaatgtttgcacgcgcaaaccctcggattcgttcatccgcgaacgggaaaagaaatgtttttcgagagtgagttaccacaagatatgtcggatattattgaaagatggaggacatatacggaagcaagagaaatcagaaattagaaatcagaaatttgaagatgaaaaaaaacatcgctattgtttggggaggctattcgtcagaaaaagaggtttcggaacgaagtgcccaaggcatatactcttttatcgataaagagaaatataatctttataaggtgaaaattgacgcgcaggtgtggggagttgaatttaacggagaaacataccctgtagataaaaacgatttcagtttcacggcaaacggacaaaaaactgcgtttgattttgcttatatcaccatccacggcactccgggagaagacggtattttgcaaggctacttcgacttgcttcgcataccctactccaactgtggagtactagcttcggcgttgactttcagcaagtttacgtgcaataactttctcaaaagttttgggttcaaggtggctgaatcggttgtgcttcgtaagaacgattcgtacgataccgaaacaatcgtaaaaaaattaggcttgcccgtttttgttaaacctaatgtaggaggctccagttttgcaaccactaaagtaaaagaagcgtcacaactgaaacacgcaatcgatgaagcttttggcgaagctcccgaagtgatgatcgaaagttttatatcgggtacagaagtaacctgtggatgctatcagggaggaaaaggttttcagcgcttgccgctcaccgaagtagttaccgaaaatgagtttttcgattacaatgccaaatacaaaggacaggtagatgaaattacccctgcccggattcctgacgacattgcaaaacaaattcaggggcaaaccgaacggatttatcatcttatcggtgcaaaaggtatcatccgtgcagattacattatttccggcggtgttcctgttctgctggaagtaaataccacacccggaatgaccgaaaccagttttattccacaacaggtgcatgctgccggactcgatatttccgatgtgatgaccgatattattgagtacgaatacaataaaataaaaaaataaccttagaaaactacggagtaacttatcgatacaaattatggaagaaaatattaagcagaatttcgacgatattcgtcctttacacgacaatgaagtaccttcggctgttaaatctctgataaatgatctctattttcgcagagcagttgaaccgatgatcaagccaatttcgtgggaaatatttagcggagccatgctggcgtgcaaatcggttaatgattttcagggcaccatcatttatccgtttatgaaacaacttatcgcaaaaaccacatcggaactgacgggtatcggatttgatgatcttaaaaacggttcaagccatatcttcatttccaatcaccgcgatattgtattagacgccgcatttctgaacattttgttttttgacgagaaaattaacacatccgaaattgccattggcgataacctgctaatttatccgtggattaccgaactggtaaggcttaacaaaagttttatcgtaaaacgaggtgtttcggtacgcgaaatgctggatacttccaggcatttatcggaatatattttcgatactatcgtcaaccggaatcagtccatctggattgctcaacgcgaaggccgggcaaaggattcagatgataaaacacagaccagtctgttgaagatgcttacactctataacagttcaaaaccggtagaagcacttaagtcaataaatatcgtgccgctttccattacatacgaattcgatccctgcgattttctcaaagcaaaagaatatcagcttaaaagagataatccggaacacaagaaaagtcaggccgatgatatcgaaaatatgcggacgggcatcatgggtttcaaaggaaaagtctttttcaagtttgggaaacagattaacgatgaactttcgcaaatcggtactgaagcaaatcgtacgcaaatactggagtccgctgccaacgctatcgatacggaaatttataaaaactatgttttcttccccatgaactacattgcttatgatttgatggaaaacagcaacaagtttatcgataaatatacggaagaagacaaggtagcatttgataaatacattgacggacagatagtaaaaattgatattccgaacaaggattacgattttttacgtgaaaaactgatcgagatgtacggaaatacggtaaagaattttgtttcagtaaaataacgttgtgcattgagtagaacttgaaacgatgaaatggaaatatttcgcatatctgacggttttttttctcattgtccttgcgtgtgataaggaagacaaacgtgtcgataatttcctggtggaatttgccacagttgtgaaacctgcagacaagataactttccagctagacaacaataaaatacttattccgaaagaattgaaagattattcgggtaacaacgggcaacgtgttattctcaattacactcctttacgcggggataccgtgaaagtaaacaatgtttccgatatttttacggggaccgtacaagaaatcagcgctgttgccgatctagtcaaggaccctgtaaaaatacagagtatttgggtaggcggaaactacctgaacatgattcttgaaatagaatactacgataaaacacacaccatcgggttatttcgcgacacccaatcacccacaatcaacttatatttcgcccacaccaaaaacgacgatccgcgcggatatgtcaaaaaactgtccgcttccttctcactttcttccattaaatctgtcgatggctcccccactccatttcggataaatattaacacatacagtggtgtgcgggtgtttgagttggaggtgaaatagacaaggtaattccgacagttatttgggccgtcttaggtatcttattcccaagcttttgatttcttatttgtagacggacattcaaaaaaatgccccgcagataggcgaggcgctaaatgttttcacaacggaataatccttattgtgaattgcttttaaaactttgtgcttcaaaagtacaacttatttgtgttttttacaatttttttcaaaaaaatatttaactttacccgaaaacaattctaatacgttataaaataagaatttgtatatcttagctaataaacttatcacaccttatggatagagcaacgttcctaaaaattacgggatccggagcaggaagctttcttttttcgggcttagagatgaaggctgaaagcttgagatacgaactcagaaaagtaaaaatctacgacaactatgttcgcggagtaaacttcagaaagaacgatttcctttctcacattccccaagtaaacgacgtgttacaattagagcgcgaacccgacaacaaatacgaccgctttgcaataaaagtacaaaaagatgggaggttccttggctacatcgccgcttacgaaaatattaccctcgcgttacttatggatcagggcgtacgcctagaagcctctgtcagcaaagtttccgaaaatataactgataaaaaatatctggacaaagtgttttccgttcagattttcgcaaaacttcttgttcctttcgaccacttaaaagtgaacgatttaggaaaagaaagagcagatgatgtggaggatgtttataggaaaggtataataaaataaaaatattatgaaaaaaattttaggactagatttgggaacaaactctattggttgggcattgattgagatagaccacggacaaagatatgtgaaaatcattgggcttggttcgcgcattttacctatggactctggagaaattggcgattttgaacaaagcggtaagattaaaagttctgctgctcaaagaactgaaaaaagaggcccaaggcgtctaaatgaaagatatttgctaagaagagacagattacatctggtacttgacttactcagtgcactacccgaacattataaattggaaattgactttaccaatgtgaaaggtgaaaaaagtggcaagtttaaagctaataaagaaccaaagttagcttatcttccaaagcaaaaaggagagaaagcaaagtttatttttatggattcgtatgtggaaatgattgatgatataaatgtcaataatatcaaaaacactaaagggaatcggattccctatgattggacattatattacttacgacaaaaatctctttccaaaaaaataagtttagaagaattagcctgggtattattgagctacaatcagaagagaggatatgaaaagacagagattgaagacaagtccacaaaagataatgaatttattgaggaacttgatttgcgtgttaaagaagtgatacccaaaatagataaagcaggtaataaactttttgaaattcatttagatggtaatgatggttttgtttattatgagtattctgatattcaaatgacatttgaaaatgatataaaagaaatcatcaaaacatcaaaagtagatgacgaaggaaataccgataacaaaaatacacaatttaaaatagttgacatttatcctttaaccattaccgatgttaaatatgaaaaagacaatgaaaagcataagtacacgctgacttatgataatgggtggaatgaagttaaagatcagaagaactttacattcaaatataaaaatgcacttaacaagacatttgattatatagtaacaactgtttatgatattaatggggaagtaaaaaatcaacaaggtaaagaaagaacacttcgggaacctgattttagtgacaactcatctgattggacactacttaaaaagaaaacagagaaggaggtattagcttttaacatagatcaaggattaaaaaaagaagatggcagtgctcaaaatttcatttctcccaaaatctacaatgttctaaaaaatgatgctaaatcaaatattcacacaaaaattattggcggaatgttccaagtagtggacagggatttttacagagaagagctgagccaaattattacaacccagaaacaatttcatacaagtttagaagacaaaaagatattcgaaaaatgtgttgaaacactttatcctaaaaacaaaaaccatcaagatgcactgttaaaaaacaaagatgcaattcagtatcttttagttgaagatgttttactgtatcaaagaccacttaaaagtaaaaaatcggaaattgcagattgtaagtatgaaataagatattggaaggatatagaagacaaaaatggcaatccattaaaagaagttgatatcgaaactggagaaatttatgtaaaaaaagagcctgtttatattaaagcagtctcagcatcgcatccatattttcaggagtttaggatttgggataaattgcataacttaaaattaatccaactttcaaaagaagttgatggtaatactttaaccaatcaagacattacaaaagaatattttaaaagtgagaaagaataccaagaactttttgatgaaataaacaatagaaaatcatttagccaagagcaatttctctcttattgtaaaaagaaattcaagattgattacaaacccaaagacagcaactttacgtggaattttccagaagatgaggaaataaaggggaatgaaactcgtgtaagttttgttacgcgatttaagcgatgtggtttttcgaattatatcgattttctgacccaagaaaaagaattagaattgtggcattatctttattctgtaagctataaagaaagaataactaacgagaataaaagtataaatacttttttcaaaaactatttcaaagactttgatattaatctggaaattaaagaaaaaatcgtcaatgattttgtaaactatccaaaatttgattcaaagtattgtgtttattccgaaaaagctttaaagaagtttattcccttgataaatatgggagaaaacaatcagaagtatgcttggaaaaatgaaaaatggtatcaagattggcagaaaagtcttgatgctcgtaaatctgaaataattgagagattaaagagtatcgattttgagaaggatgatatagattattcaaaggcagttcatataaacgttgatttgcaaaagagagaaattccatttccaaaaggtcttttcaatacatttagagaatttgaaaaggttgaagaattcgagaaattaaatttaacccaagcatcatatctcatttatggcagacactctgaattggctcaagcaaagtattggacttcgcccgacgatataagaaagcaacttcatcaagagttaaaacagcattcattgaataatcctgttgccgagaaagttattttagaaatgatgcaagtagttgcagacatttgggaatttcttggagaaaaacagaaaaactacttctctgaaatccacttagaagtaggtagagagttaaaaaaatcagccaaagaaaaagaagctgaaactaaacggatgtccgataatcgttctcaaaacaaaagacttcgtcaagtactcgaagaattccttgcaaacagccattataatgccaatccaaaaaattctgaccatttcgagcgattaaaaatagcagaagaaggtgccgagcacagaagcaatatagataagaagttttttgaggataatgaaaaattaaaagcagggaatataaccaaaaaggatattgatgaaattcttaaaaagagctacgtttcaaaagaagattttgaaaaatacaaactttggatagagcaaggttatcgctctccatattcggggcaaataattcagcttacagacttatttgatggaacaaaattcaatattgaccatatttttccacaagcattagtaaccaatgattcgttgagtaataaagttgttgttgaagtagacttaaataagcttaaggacaatagaacgggtagagattttattcaacaacagcgaggtcaaagctacttgggtattcctgtttgtagcgaagaaaagtatattgagatagtaaaacagcaattttcgggcacaaaacgctatattcttttatcaaaggatattccgaaagaattcacaaaaagccaattgaatacaacacggcatatcgcccgaaaagcgatggagttattaagccacatagtaagagagccaggggaaattgaattccgctctaagaatgtattacctgttaccggtgaaattacaacaaaattaaaaagagcttggaaattggatgaagtatggacagaattagttgccccaagatatattcgtttgaatgaattaacacaatctaaattattcggcagttggcaaatatcaaaaaatggtaaaaagtattttgattgtaacttggataacagcgttcgagaaaaggacgaatcttatgatataaaaagaatcgatcatcgtcatcacgccttagatgcattaattgttgcattatgcacccaagaacacgttaattacattaacaatataaatgccgatgccaaatctaataattacggaaaacaaaaacaaattgaaaagtatcgtcaaacacttaaacgcaaaataaagtttacaaagaaggacgacgaaaaagatgaaaacaattggtattatatgcttcctggagaaaaacgattaaacaatgtcgaaaactctaataaaagcagtgtgatagagatggaatatctctttatggagtttgagactttccatagtaattataaaaaaatgattttgactgcattgcaaaatacgattgttacatttaaacaaaatctacgcgtaataaataaaagagtgaataggtataacaacactcctaataagaataagtttgaaaaacaaaatacagaaaatagacaaaagcagaattgggctattagacgaagtttggggaaagaaacattttatggaaagcaaacaatagatggagaggaaaaaattgtaattcggaaaaatatcgacacctcttttgatggtaataaaatcagaacaatttcagatacccttggttttactaaaaccatactctttaatcagctcaaacagtatgacactattgaattaccttttgatgaagctatttttcactttgaagctcttttagaaaaagaagaatttgaagctattgtgaatgatgatgataataatattaaatctatagacgaactattcagttatttgaagcaaaataaatttagatacaaaaagtctgattataaatatttaaatgtttttatagaccaaatttcttcccgcaatttcagaaatgaagaccagttcaatgataaaattaaagagcatcctgaaatagcttttacaccagaagcaattgaagaaatgaataaatatgaaaacataaaaaggcttaacaatggcaaagagcataagcctattaaaaaagttacaattacaagaggatttgggaagcaaagagctgtaagtgagaacgaagcatccgttaaatcaaaacagtttgtagtaaatgatgccggttctaatctttaccttggtttttacgaaagatcacataaagatctcaacgggattgatatggttgagcgaaaatttaaggatattggattgatagaacttattgaaactttgaaacaagatagctctaagcgcataaatccattacctgataaaatctatgatgataaattaaatgagtatttctggaaattcacattatctccattagatttagtctatgtgccaactgatgaggaaatccaaaatccttcaattgtcaattttaatgatttaacccaagagcaaattgaaagaatttataagtatgttgatggaagtgaagatgtggcaaactttatcccttattatgcaacaaaaccaatttggagatttcacggcaagaaaaacaaagagatacataaagaattaagtgaaaacaataaactagcgatttctttacaagatttaatccaaaatgaatttggtctgggaagtcaacaagataaacatcaaaatatgatgaatggtaaaacacaaataaagaaaatttgctggaaattagaaataaacaggttaggacaaatcaaaaaagtaatccgatgatcaaaaaaacgctctacttcggaaatccggcatatttaagtttacgaaacaagcaattggttattcagttgcccgaagtggtaaaaaacgacactttgcctgaaactttcaaggcagatgccgtgaaaacattcccggtggaagatattggtgtggtaattcttgacaataagcaaataaccattacccatggattgatagaggctttgcttgataacaacagtgcattaatcacttgcaacagttcacgaatgcctgttggactgatgcttccacttgccggaaacactacgcaaaccgagcgctttcgaaaccaaattgatgcatccgttccgctcaaaaaacaactttggcaacaaaccgtacaggcaaaaattcaaaatcaagcttacgttttggagaccaaagcaaaggtaattgtcaagaatatgcgagcgtgggcatccgatgttaaaagtggcgacccggacaattacgaagctcgtgctgcagtctattattggaacaatattttcccgacaattccaggtttcactcgcggtagagagggcgatccgcccaacaatctgctcaattacggctacgccattttgcgagctgtggttgcccgttcgttggttgcaagcgggcttctgcccactttcggcattcatcatcgcagcaaatataacgtctattgtttagctgatgatataatggaaccttatcgtccatttgtggataaactggtgttcgagataatggaaaacggtgcggatatttcggatttatcacaagaaataaaaggccagttactgaatattccggtgttggatgtaattatcaacgaccaacgcagtccgttgatggttgccgtagggcaaaccactgcatcgctttacaaatgcttttcaggcgaaatacgcaaaataaaatatccttcatttgactaggaaacgacttattttgatgatttgaagcaaagtatggaacgatttagcgaatatagaattatgtgggtacttgtgttttttgatttaccgactgaaaccaaaaaagaacgaaaaatatattcggattttcgcaagaagctcattcaagatggcttcactatgtttcagttttcgatatatttgcggcattgtgccagcagagaaaatgctgatgtacacataaaacgcgtgaaaagctatcttccgcctgccggacaaatcggcatcctttgcattaccgacaagcagtttggaaatatggaactgtttgtcgggaaaaaagaaaaagaggtaaaaacgccctatcaacaattagaactgttttagcataaaaaatcccgcctctcgagcgggattttttacatccgaacaactattttttaatttctaaaaaaccttgcaatacgttgtgttttagaagaatactgacatcctgttgttcagaatatcaaagatacaagtttttgaaagcaattcacaacnnnnnnnnnnnnnnnnnnnnnnnnnnnnnnnnnnnnnnnnnnnnnnnnnnnnnnnnnnnnnnnnnnnnnnnnnnnnnnnnnnnnnnnnnnnnnnnnnnnnnnnnnnnnnnnnnnnnnnnnnnnnnnnnnnnnnnnnnnnnnnnnnnnnnnnnnnnnnnnnnnnnnnnnntttgaaagcaattcacaacagtccgtgccgaccgaagtaaccagcctccgttgttcagaatatcaaagatacaagtttttgaaagcaattcacaacatttcaagtattcgtaaacgccgcgttatcgttgttcagaatatcaaagatacaagtttttgaaagcaattcacaacattgcgtcagttgatgaatccacaacgtcgcttgttcagaatatcaaagatacaagt

SEQ ID NO: 4558 - DNA, 23723 bp, synthetic construct
  source 1..23723: mol_type = other DNA
  misc_feature 1..23723: note = Synthetic
tctctttgcaatcgccgcactcttgtttagcgtcgccgcacttttgcttgcagtcgccacacttttgtttagcgtcgccgcacttttgcttgcagtcgccacacttttgctttgcgtcgccgcacttttgcttgcagtcgctggatttctctttgcagcagtcgccggccttatttccgccacagctaccggcttcctttttgcaagtcgtctgattggtctgctgcgagcacgttttcggctcttcgcaagacgcagaagtcttccccagcgtcctttcacggttaatcatctgttggcgcaagttgccctccgtcaaggtttttacctgaccatttgttgctttattaaccgttactttacttgtgctataagcaggttctgttacgaagcgttcagtttgcttctccacgcgttcagttttcgctttctttgccggacgacgcttcttggggcgctgtgcagtagatcctacgcagaccgcagccagcaataaaaatgctacatacttcttcatcgtaatttaatcttgtttatcgttatacataataagagatcgtacactttcatccggcatcgcattgagcagagctgaaagaaagtagccgatttgttgcaaaaataatacaaaccgcacaaactacggccataaaacccgaatgtttgccattaataattgtaaatacgaaaaacgaggtcgcacttttccgtcccttaaaggcgacactgtgcaaaaaaagcaggaaagacaatccgcacaatggcaagctaaaaaaacaggaatttgtaattttgtagtcaaatagctaaactcttacacgatgatgatgcacacgaccgacgcaaggcgccttttacagcgcaaactcgactctctattgcgcacaggacaaattctgttagaaagctctgctgataccagccgcattatgcgcaatatgaagcgcgcggcggcttatttgggattgccggagaagaatctgcacatccacatcgactataatatgttgatggtcaacattcacaacaccgaactctccttttccaaatttcagcgctgcgataagcacggcatcaacttcacggctatttccgccgttagcaaactgacgtatcgagcggccaatgaaaactactctttggcgcaatatgaagccgcgctcgacgagattgccaaccgcgagcgcaactattctccactcttgacagctgttggagctgcctttgcctgcggcggcttctgcatacagtttggttgcgattgggtcgcttttctctacgccacgcttgctgcctttttgggtttccgcctacgctatcggctgatcgaatttggtcttaatatctatatggctattgcctgtgcggcctttgcctcaaccgttgtggcttggctgaccacgtatttacccgcaagctggacttctacgcctctccaccccctcttagcctgcgccttgttcattgtgccgggcgtcccgctcataaattttgtcgacgatatgttagacaacaacatccaaaccggacttgtgcgagcggccaatacgatgatgatgatgatcgctatggctttcggcatccttttcgccctcaaattctgcctatgggccttcaattttcaacccgatattatgggcatcccgatggtcccccaccacaactattgggaatacgccgtcgcggccgccatctccggtatgggtttctcgatgatctttaatatcccgaagcgcctcctgtgggtcgctgccgtgggcgcagccatagccgtctgcacccgaaatctggtcagtttgcagcccgacgaattatgccaattcagcttaggctggggcggcgtattgggttcgctggccgcttccgtcttaatcagtttgattatgttgcgtatggctcaccgcgtccacgctccgatgcagattctggctatctgtagcgtcatcccgatggtgcccggcgtgctgatgtatcgcagtctctactccttcttaatgatgacgcgcacggagacccaattggtcgatatgatgtcgctggccggcatcaacggcatcaacgcttcgctcatgatcttctgcatcgccttaggcgtggccgtgccttccgtcttcgccaagcgatatatcggcgccaagaagcagcagcgcttcttcgagaccctgaaagcgcagcggcgcgaaggcaaatccttcgactgggagcaattttaagatcaacgcaagcggctcgtcatacggcgaccgcccaaccttcaaatagcaacactgatgaacaagacatttaagcgcatggatctcagcctcgtaggccgcgaagatccctttcaagccatcggccacgaatggttactgattacggccggcacaccgacacattataatatgatgacggccagttgggggatgctgggcatcctttggaacaagcccgtggctacgattttcatccgcccggagcgatatacgcacgactttgtcgaggctacagaccgcttgacgctgagtctgctcggcgatcatcgcgaagcctacaaaatctgtggttcaaaatcggggcgggatctggataagacggccgcagcgggtctccacccggcgacgctacccgacgatctcgtcactttcgctgaagcccgcttggttttggtttgtcgcaaactctacaagtcgactctgcgcgccgacgagtttatagacgcacaaccttacgatcgtcattacagccccaaagaaggaaatttgcacgacgtatatgtctgcgaaatagaagctgtctacgcccccgaaggcgacgcctaagcctggggcgcaaagagcgcaatcatcgtcccgctcaaagcatctacggaggctttgggcgggattttttttgcggagatcaagtatttcttccgcctttttagtcattgcataaccacagcagtcgaccgctgacgtttttcgtcacgagaaaaaaggtgtgcgctcgtgataaaaaaggcttcatctcacgagaaaaaaggtttgcactcacgagcgcaaacaaaagaagcaggcaggcggcggttgcaagttgggggcacgccgattaaaaagagggcacaccgacaatgaaacaggctctgccgcagagcgccgatgagcctcggccgactaaaacaaaaaaagcctgcctccaaagggagacaggcggcactaaaactatatttttaccttggcaaaggtaattgagccaaactatttatcgaccgaattgatacgttatctcatagaagcacggccgaactgagcctttggagcgttcatgtccttctgtgctgggcacgatcaagcgcactttggctatttcgctcgtcggcgttgtttgccggcccaaaccgataaacggcagagggaacaaccagcccgaaggaacggtagctccgtaaagactcttcatcacgccgctattaaaaagtccgttatagatgccataacgattggtcacggtcatcacatccggcctatcctcgttggctaagacgttgttgcccgactgcaaactgtcggtagccaaattgtattcaaggtaacggcaaacgacaggggcgcttttgcccggcgcaatcttaccgggttggcccttacgcagaatctgcatatagacgcccgatccggcaaagagtacgtactcgttttgagctacgttggtcgtagaatcttgcttgtaaaattgctcttcggagatgactttgatgtttcctggcacatcaagcaggtatagccccgactcagcgtcgacgaccttcgcgcctttcttgaggaagttttgcacctgtcgacgctcccgtttacgcttatcggcataggaagtatcgtcattgctgcaagcctgaaaaaggcaaatgccggcaagcagaagcggcaacacgagcgctacacgctgccacacattgcggcataaacggatgcgaaaggatgtattttgcattgtaatcattcttattttgggcaaaaataagcaataacacgcacgtgggccgcattttttcaaaaggaattgcggcataaagccgaaaaaacgctaaaattgcaaaccggtttggcaggttgtcgggttattggcgcgccactttccatcggtggcctttgtataataatccgcgtgcgccctcgctcaactgatcgggcgccggcgaggcacttaggcgcgcaaagatacaccatcaacaggccacaacgcgcacgaaacgagcgaaaaaggggaaaggagcataggattttgcgtaaaatgcgcccaaattatttgcagaattaaaataaactcctacctttgcaagcgcaaacgaaagggtaccttgaccgagtggctaggtagcggtctgcaaaaccgtgtacagcagttcgaatctgctaggtacctctacaaagcggagcacttcgtcagaagtgctccgcttttttagttttattccatatctcaagggccgcgcgccgcatcagaagggcaagccaacggcaaaatggaggacgaaatcgcgagaaaatttggggtgaatcagcggatagtgaccgcgacctgagggataaacggggtcaacagccttcatgccgccatctaaacgcaagataaaataatcaaggttgaggcggaggcccaaaccataggccacggccaactgcttatagaaagaatgcaggtggaatcggcttcctgaaagattttcatagcgtcgcgtgttccacacattaccggcatctacgaagaaagcaccattgaatttccagaaaagcgccgtgcgccattcaaaactcaaatcgagcttcatatttcccgtttggttgatgaaatctactttgccgtccttctctacataattgcccgggccgagcgaacgcacattccaaccgcgcacgctgttggccccaccggcaaaatagcgcttctcgtaggggattacggcagagtttccatagggaattgccaagccaaaagcggcgtgaaacgcgaaggtgttgcggctatttatacgcaaactgcgcacaaaatcgacgtcgacctttacatattgggaataggcaatattaaacagcctgtgttggcccgcttcattcttacttgctctgacgattttggatattccgtgcagcagattgccggctgcttcgatgccaagcttcacttgccagccctttgtcagttggccggtaagcggagagaatgttacgctgcctcgttccttatcttgctgggagttatatacgaaactgtagcccgtattcataatgaagagatccgcataactggctcgcaaaatcgaatatcgagggtcagcgttgttaagatagtcgcgcctaaacgtattggaaatccagggcataaaaacatagttgaggctgatcatatcaaaacgatgctgaaagccgggatgggcgtgataactccagcgataggcccagttgcccgtgactacacgccgatgaaactccggcctgttttgcgaattgtacataaagctgaggtcgctcgttgcctttaagcgctggcgcgccgattggcgcacaaaaggcaggcgaaaggtgggaaaacggagcgaagcctcgccgctaaactctaagtagttttcgttgccgtagccttccaagcccctgatggcttcgtaagccattcttcccttcaaaagcagacgttcggcgcccttaaataagttgcgattcgtaaaggaaagggccaaagcagcgcctaagtcgccgctggtattcgtcccttcaagctcgagactgactgcattgggcttgttgcgcacaatcgtaacgtcggcatcgagcaaagcagaatcgccgggcggctcgttaaacttaatcgtcgtatagcgcaccgccgacaaaccgttcattgccgaatagctgtcttgaacgtcttcttcgcggaacagactatcgggccggattaacagatgatttttgtagagatgtttacgaaaggccaacttgtccgcacccaggctcggcgaatcccatattttgatcgtacgaaagcggtaaggctgataagcccgcaccgaatcgatgccgggcgggcgggaaaagacgaaagtcagcgccacacggtcactgccggcaacggtatcggcgtcgtaaccgacaaagtcgcggttgatgcgatagtaaccttggttctgcagggctgtgatcacacgattgcgctcttcattcagcaccgaaacgtccaaaggcatacccacgtggagcaagcttttagtgcgcaaagctgatacagcgcgctccaaacgcggatcatcgaagcggtaggccaaagaatcgacaacatagcgcacacccggccgcaacttatacgtaagtcggacgcgccgccggcgcttttgtgtgagcgtatctaccgctgcgtgcagatagcctcgcgattggagagcagcgagcagcgcagcgcgcgaagcagcagtcgacgccgtatcataaacgacgggcgcttcgccgaggcggcgaaagaaacggccgcggcgctttgtcgtatcggccggcgagaggcaataaatgccgagcggcactttaaccagattaaaccagcgcgcatttggctgctgacgcacatatttaatatagtcggcagttttgacttgcttagttgcagataccactttgacgtcgctcagcatcgcttcatcgctcgccaaatagcgtgtaggcgagcacgattgcagcaaaaaaagcagcaaagtaagtcctgcgaagagcagggatagagaaacgtgacggttcaaaggcttcaattttgaagcaaatatactacttcattagcttctgtctttgtaattttgccgaaaaatccataagatgctgacaagagctgaaataaaatggctgcacggcctgacgcgcaagcggcagcgcgatgctgaaggcctcttcatcgcagaagggccgaaggtggtcggagatctgctggccttgctcccttgccgactgctcttagcaacggctgattttctacaaagcaagacgcaatggcccgccgcagaggtgcgcgaactgtcggcatcggaactggcgcgcgtttcgcttttgcaagcgccgcagcaggtcgttgccgtctttgaaaagcccacgccggcgccttggcaacccacagacgaactagctttggctttagatggcgtgcaagatcccggcaatgtggggacgattatccgattagccgactggttcggcatacataatatattgtgtagcccaactacggccgacgccttcgcgccaaaagtggtacaagctacgatgggcgcactcggtcgcatcaatctccactacgtagatctctgcgaagtgcttgccaaatttcctgtggagacaccgatttacggaacgtttctcaacggatctaacatttacgagcaaacattggatacgaaaggcctcatcataatgggcaacgaaggccaaggcatatcgcccgccgtcgagcgtttcgtttcaaagcgcttattcatacctcgcttccccctcgacgcaacgggcagcgagagcctcaacgttgcgatggccacagccatcgtttgcgccgaattcagacgaagaaattactaaacaatgaacctactcctcctcattaacataagctttttggcaacgatgctgctctgcctgctcgccctttggcgctttcgctggcgcgattattctctgccggcacgctggtccgaaactgccgaatcgacggagcagcctgcgatctcgattatcattccggcgctcgaccagggcgactatttggccgagtatctgccggttttcttgcagcagaactatccttcgtttgagattatcgtcgtcgacgaggcctcgaccgaaaatacgcctgatgtgctcaagcgcctatcggctgaagataagcggctgcgctacttatccgtaccgcgctcggcgcgccacatagaattgactaaactggctctgacgttgggcgtgcgatccgcgcgttttccttgggtggtctttacacgggccgactgccaaccggcgtcgcccgactggctctcgcgactggcggagcagtttgcacccggcgtagagatggtcggaggctatgccaactatctcaacgatgagacgcgccaagcacgccgcccgatcttcgaacgtctgcgtttgcagttgcgtttggcgcgagcagctcgaagcggacgccccgtttatgccgacccctgcaacctggccgtcaagaaagccttttttatggcgcaggagggctttgccaacagtctgctactgccctttggcgaggaagaattgtttgtggatgcctatgctacgcctgaaaatttccgcctgacttggcatcctgacgccacgatttgccagcaactacccgctcgccgcctgctttccgatgagcggatctatacggcggagatcgccaaccgcagtagtcgccgccgccgactgtatgctgcgcgcgaagcgtgggcttcctgctttttctttctgtttttcctgctgacgctgacttatatcggtgagcgtacattttatattttacaacaatcagtttactttatccaagatttggccacagatctgcccttcttgctcctgctcatcacggccatcatcctaccgatccgcttgatgcgcaaggctacgcgggctctgggtgagcgccgctttggcgggatgctgatagcctacgcttggctgcaacctttgcgtaaccggctcacgtatctgcgccgcctccaccgcagcgacagtttcgtgcgtccctctttataattgttcactctttactggctgcagacaaacgaccgataccgctgatagcgtccggcctttgcctgctaccggcagttattggcgcgtaaaggatcaacttttaccgccacgcaaaggcacaaactatggcgacaagtcaaagtttgatacatttagtcccctactttcccctctccttctcttctttctacacccaacgccctaaacagcaacgcttgaagcgcaaataggaccgcaagaaggcagctttcgttttcgtttggtgccggcaaacgatagtttggtcccaccaaaccatagtttgttcccagcaaacgatagtttggcagcagcaaacaagaaacaaacaaaggagaacaatgcaaaaatcagagcagaagcacgaacaagggagacctgcccaccgtccgtcgcgccgagcgtcccgccttacttttcctccgcaagcacaatgcaaagaaaatctatcacagcccatacaaagacggcgggcaatcgagagcttacatccgaaaaacgactgctcgctctgccaataggccgcttcagcatcaaggcatcaagcgaaataagcggaaaagaaagccctcagcagaaaaaaaagtgagcaaagtatttggcaaaccaaaaattcattctacctttgcactcgcttaacggcaattaggtagatccgctagctcagctggtagagcacaacacttttaatgttggggtcttgggttcgagccccaagcggatcacaccaagaaaaagaggcttatcgcaggataagcctcttttttcgttgatagacctatattcgcctccacttgatcagtgcggcgtcagtttatcacagtcggccgactcgcaaaggaaacgaaacactacgaccaagtcgcaacttttcaaatacgattgcgccgcccaaacgtatggccctatccgaaacgaacaggaacaagtttgggcggcgcaatcgtaaatatgcagctgctttaagcgtaggcattcttaagcggaaatcatatgcacgtctgtcgtatcaagactaccttacgcctcgatacagccttttattttactaaggtagcgcgaacgatgcgcaagccaatcataggcaaacaagcaacagatttacgtaaacgaaaaaaagaaagcctctccgaagagaggccatgggaataaaatccttcggcatatagccttattgtgatatgatgtagaatatccttttcctgaggcaaatttaagaatttcatttgtacatgccaaatttttggtctatttttacagaaaatttacaaacttaccttatgaaaacccgaatattaggcctcgataccggtaccaacagcttaggttgggcagttgtagatcgtgatgaaaacaaccaatatacgcccatctgccgcggagatttaatcttcacggaaggcgtgaagcaagaaaaaggcatcgaattttctttggctgccgaaagaacttcttatcgcgcttcgcggcgccattacttccgccggcgtctgcgcaaagtagaagtgctgaaagttttggtgaagcataagttgtgcccgccgctttctgatgaggcgctcaaccgttggcatacgaaaaaagaatatccgcttgatgaggacttcatactttggcagcgcacgaacgaagctgacaataagaatccttatcacgatcgccacatttgcttgcaccgcaagttgaacttgaaagattctcagacggatcgctatacgctgggccgcgcactctatcacttgacgcagcgccgcggcttcttgagcaaccgacttgaccaaaacgaggaggcggaagagacgggcaaagtaaaatctgcgatctccgaattgagcaaagagatgaaggaggcgggatgtgagttcttgggcgattacttttacctactctatcgaacggaaggcaaccgggttcgcatccgttcccgctatacggaccgggaaaagcattatttgcaagagtttaaggagatctgccgcgtacaagaattggacgaggatctggcaaaagcgctggagaagacgattttctttcagcgcccgctaaaatcccagcgccaaggcgtaggtaaatgcacgatggagaaaggccattcgcgctgcgccgtctcgcatcctttatatgaggaatatcgactgctctgttatctcaacaatatccgaatcaaaacgccatttgatgatcgtttgcgtccattaaatgcggaagagcgagagaagattactcccctcttctaccaaaaaagcaacttcgacttcaaaaagattgctaaaaagctcgcaggaaaaacgccttttggctggataagagatgaggaggattggccctaccaatttaattatcgcatgacgcaagaggcgcctgcttgtcccacaactgcacaactaataaaggtctttggcgaagattggaaagcagcattggctgaaacttacacgatgagcaccaagcaggacgggacgctaaagacggaagatgagatttgcacggacatttggaacgtgctctattctttttcttcaaaagaaaagctgaaggagttcgggttaaagaaactgcaactggatgaagcgcaagccaaagccttctcggaaattcgcctaacgcgcgactttgcctcgctaagtttgaaggcaatacgcaaaattcttttcttcttgcgcacaggcgaagactattcgaaggctatctttttggcaaacatcccaacaattgtcggtgaagaaatatggagcaacattgagcgacgctctcgcttgctatataaagtcgatgtagcccttcacccgcaagaagaggacgaagcagaagagcatcgcacaatcgcagagcgcatcaaagcagcggtggcggcagaagtgcctgatgcgccgatcgatttgctgtatcacccctcaatgattgaggcctacccggacgccaaacgaaacgagcgcttcgattgctaccaactgggctctccgaagacgaatgctgtacgcaatccgatggccatgcgctcgctgcatatggtgcgcaaagtaatcaaccacttgctgcgcaagcatatcattgatgagaagaccgaaatacacattgaatatgctcgcgaactgaacgatgccaacaagcggcaagccattgctgattggcaacgcgagctaagtaaacgacacacagcatatgcgcaaaacattaggcaactctataaagctgaaaccggcttagagattgagccaacgaagacggacatcttaaaatatcaactctgggaagagcagcaacacgtctgcttgtacacaggtaagaagattggcattgccgactttttgggtgcgaacccgaagtttgacatcgagcacacgatcccgcgtagccgaggcggcgatagtacacaagagaacttaacgctttgcgacagtaagttcaaccgcgacaccaaacgtgacaagttgcccacagaattaaccaactatgaagaaatcttagcgcgcatcgagcattggaagaagcagtgctacgcgctgaagctaaaacgagacggcatccgcacgcattcgggcctggagaagagtataaaggattctaagattcgaagacgtcatcttgtgggcttagaatacggctacttgaagggaaaatatgatcggtttacgatgaaagaagttcctgagggctttagtcggcgtcaaggtgcgggcatcggcttgatttcaaaatatgccggcctcttcttgaagtcactctttaaggacccgaaaaacccaaatcgctccaacgtctatgtcgtcaaaggcgctattacggctgagttccgcaaactatggggcttgcagcaagccgatgaggcgaaatcgcgtgataatcatacgcaccattgcattgatgcttacaccatcgcttgcattggaccgtgcgagtacgctgccttagctgcatattatcggagcgatgaggagttcaagtatgggaggcgccgtgaaaagccgcagtttgagaaaccttggcccacgtttacggaagacttgctgaaactgcaagaggagttgctcatcgtacatcaaactactgacaaactgggcaagcgagatcggcgaaaagtaaaaacgccgcgcgggaagttcctcacaggcggcgactctgcacgcggcaggctgcatcaagaaacgtattatggtgccatcaactacgatggcaacattaaatatgtcgtaagaaagccgctggatagtttaactgaaaaggacttggataaaattgtcgatgaaacggttaagggcatcatcaaaggcgccgtagaagccaaaggcagtttgaaggaagcccttgccgacggtatatatatgaataaggagaaggggatcttgattaagcgggtgagaatcttcactcgtctaacgcagccgcttaccctacgctcgctgcgcgaccaatctcaaaaagaacacaaacgtaaagtttatgtaaccaacgaaggcaattacatgatggccatctacgaaggagtcgtaaaaggcaagaccaagcgcgagtttgacttggtcaacaacattgaagccgctaagttctttaggaaaaggattggtcaggagcaagacctacccctcatgccggaaaagagtgctagcgacttccccttaaagcacaccttaaaaataggaacgttggtattgctttatgagacttctccaagcgagattaatttctctgatcctaaggatatagctaaaaggttgtataaggttgttggattgtcaacactacatataaataaatatatttatgggattataagcttacgccaccatcaagaagcccgcccgacaggagagttaaaattcaagaacggagagtttaaaaatggagaggccttacgaccggctataacaatgttgcacactcaatttaatgctttggtagaagggcaagatttcgatttggacatcacgggtaagatcacattaaaacgaccatagccttatgctcaagcgcagccttgtctttatgcatccggccactttgtctttacgaaatgggcaaatggttatcatcagaaaagaacttcctgatgataatcttaccgttcccattgaagacattggcttggtgatgatcaaccacacgatggtaagcctaacgatcccgctcttgaatgctttgacggagcaaaacgtagcggtcatcttctgcaatgagaaaggtatgccagcttcgatgctctacaatttgcagggcaacacgacgcagggagagactttacgcaaccaactcgaagccggcgaggtactcaaaaagacgctttggaaacagatcatcgaagccaaaataaagaaccaagctgcacttttagacaagatgggcaaggagggtagcatcttaaagcccctttatacgaatgtaaaaagtggagacagcgataatcgggaaggcatcgcggccagattgtattgggccgccttgtttggccgcgatttcatccgcgatcggaacataccgggtatcaattcgctcttaaactatggctactcggtcttacgggcagccgttacgcgggccttggtctcctccggtttgtttccggcattgggcatctttcatcatcatcgcagcaatgccttccccttgtctgacgatttgatggaacctttccgaccttttgtagacgagatcgtgtttgaactaacggcccaaggcgaggcggaactaaacacagcgaccaaaagccgcctgatccgtgtgctatacgtcgacacttacttttccaaagtaacacgccccctatccgtgggcttaagtatgacgatggcttccttagccaagtgctatgccaaggagcaaaagaagttggtcgtcccgttattaaaatgagtgaagtcagattaaacgcttatcatattatgtggatctttgtgatgttcgacttacctacgatgaccaagaaagatcgcaaagcctcggccctttttcggaaacaacttgaaaaagatggcttctcgatgcaccagttcagcgtctatatccgccattgtgcctcaaaagaaagtgctgatgtacacataaagcgcgtaagatccaacttaccggcaaaaggatctgtcagcattctctccattaccgacaagcaatacgccggcatcatcaacttttggggtgcagaaagtaaaaagctaccggctacgcccctgcaattagaactattttagtacttttgcccatagaaagttacacatcaacgccatttcctatacactaaagagtccctcaagggcttccatctcaatggattatcttatataggttgtggtttgatgtagaagaaagatataacgcaactaatgactattggacagctctactcttacggttgtggtttgatgtagaagaaagatataacgcaaccaagatcctcgtagccatcttgttttaacagttgtggtttgatgtagaagaaagatataacgcaacagaatcaaaacaatctttatatttgcactgttgtggtttgatgtagaagaaagatataacgcaaccgactatcaagctgtgggttgctcgggcaggttgtggtttgatgtagaagaaagatataacgcaacgccaagaccaagagcagggcgacgcgatgagttgtggtttgatgtagaagaaagatataacgcaacccattctttccacaacaaacgatttggaagttgtggtttgatgtagaagaaagatataacgcaacaagataacagaacttaccgcctccaatgagttgtggtttgatgtagaagaaagatataacgcaactatgtgcccgacgatgtcaaggaacgagaagttgtggtttgatgtagaagaaagatataacgcaaccagaaaaaatgaaaatctactcgcacattggttgtggtttgatgtagaagaaagatataacgcaacctttcagcagctcagcagcatcaagagatagttgtggtttgatgtagaagaaagatataacgcaactccgatgcaaagatagagacttagagtttagttgtggtttgatgtagaagaaagatataacgcaacaggttgcgcggcaacttctttaaactgactgttgtggtttgatgtagaagaaagatataacgcaactgctcgtaataattccgtacatccctttcgttgtggtttgatgtagaagaaagatataacgcaacccgatgcaaagatacagactttgaagtattgttgtggtttgatgtagaagaaagatataacgcaacaaaataagctcttagccaaactttcttttgttgtggtttgatgtagaagaaagatataacgcaactggaccatattcagaaatagcgaagtacttgttgtggtttgatgtagaagaaagatataacgcaactagacgcgaagcgcggatattgttgtttatgttgtggtttgatgtagaagaaagatataacgcaactctggcaaggccgtctcgttgctcatcgatgttgtggtttgatgtagaagaaagatataacgcaacattaactggcaggttgtagtcattttgctgttgtggtttgatgtagaagaaagatataacgcaacatttacaggaagattatactcgttctgctgttgtggtttgatgtagaagaaagatataacgcaacttccgagccgttatagaaaactgagcggcggttgtggtttgatgtagaagaaagatataacgcaacttaactgacgatagaatgaagcaagaagatgttgtggtttgatgtagaagaaagatataacgcaacctttgtctttcgcttactgctatcaatccagttgtggtttgatgtagaagaaagatataacgcaactacagacagagtattatacgaccttatacagttgtggtttgatgtagaagaaagatataacgcaactgtattccacatttacggccgtatatcctgttgtggtttgatgtagaagaaagatataacgcaaccgaaatacgcgttgaggacaacacgggcgggttgtggtttgatgtagaagaaagatataacgcaaccggcgcggcgattatttcccttggcagtttgttgtggtttgatgtagaagaaagatataacgcaactatggcgtacagggtgatacaacaagttctgttgtggtttgatgtagaagaaagatataacgcaacaatgataggtttgatcacttgaagaatcgtgttgtggtttgatgtagaagaaagatataacgcaactctcggtatcgtaaatcgagcggctcgacggttgtggtttgatgtagaagaaagatataacgcaactgcggttagcaacgctgcccatttggcaaggttgtggtttgatgtcaattaaagacatcagattcccctcctttaggaatactaaaagaggggataaacttatggacagaaaaaacggacgactagtatgacacagtttactttacaatcttgattgatatcaattaaaggcatcaaatgcccccctcttttagggtttctaaagctaacttggttgttagtccttgctttgttatgaattcgtcggactcacattattttacataagtgtatcgaacaagtagtgtgattataaaataattttatctacctttgttgaggaatcaaaccatgacttttgcacaatgaaaaaaacactttatctaatgcttgccctcacgacacaatcggtctttgcgcagctacaatctgtaaaggttccttttgatgtcttcacgtcagtagtagcaaaacaagcagaaacttttggctctacagcttcttcgtctgttctttcgtcagctgtttgccctgaacaaacaaattcgttcactgcgacaacgggcgttcgtacatttgtcagtcatcctgacagcaaattagttgacaccttctcttataaccgcaagggagaggcgtcgagagaagtccctcgtttgtcagtaaaacaacttgaaggtattcaggacgaatcaatcagagaagttgcggtagaacaagccggagcactggggcagctccttccttcaacagaaagacttgaaatcagaaaattaaaagtaagcggaactattaatggcgacgacgtgctggtacttagggaaatggcaggacgcaacagcgacgacgaagaaacagaaggaaaacttgaagaacttgacctgagcgatgttgcacttgccgatggcggaagtccatattactctaccacaaggggcaattattacacagcgacctctaatgatgtcgatgaaaatgaggaaaacttttattgcaccgacttgtcatacgctttttgcaatacacatcttaaaaaggtactatggcccaacacaatgtgggaggtcggagatgcagcactgaatcgctgctacgaattggagtcgtttactcttggaagtgaaacgaatgaaatcaagagcggtgcatttgaatattgcactgccctctcaaatattgagctcaccccaaaaattctttatatcggcatgcgcgctttcgccaatagcggtttgacagaaatttctataccaaaagaaattgagacgattgccaatcaggcattttacaaatgcgaagcattgaagaaaatagattttagcgatggagtaaaagaaatcaaagaagctgctttcagctattgttcagctcttgaggagatacacttatctaaagtactgacaaaaataggcaaagaagcattctatgcttgctcatcgctgacggaaatcacacttcccaaaaagttaatcaatataggtgaagatgcttttggagcctgtaaagccctaaaagaaattaaggtcgaagcaggaaacgctgcatttacatcaatagatggtgtattgtttaataaagaaaagaccacactgctgacattcccttttgcaaacacagccaactatcaagtacctgtgggcacaacaaaaatagcgccatcggcttttagcgaatgcaacaagcttgcatcaatacaattccctaacacgctcatcgagataggcagcgaggctttctacaaatgcttgaaactcgagaacattacattgcccaatagtatcaccgctgtgggtgagggggccttctatggatgcgaaggactattgctggtggagttgagtaagagtatgaccattattcccgacaatttattgagtaagtgtacgaaactgcagaaaattaaaatccctgaaggcatcaacaaaattgcatatcaagcatttagcaactgctcatcgctcactaaggttgaaatacctgcctctgtcaatagcattgagggcgcatcttttaaagcatgtgagtctcttaacgagatctattgttacattaaagagccgctcactatcgaagaagatgtgtttaaaggagtgaatgttggaacttgcaacctatacgttacagctgaaagtatagaacaatacaaaatcagcgaagtgtggaagaatttcctagtaaaacctattcccaacacaacaggcaaaaataatgtcattcaacagaatgagaatgagattgtgaaggtttgtggtaatactatcacgatacagggagaattaactgccccaattcatataatggacaccagtggtaagacaatatattacggcactgaaagagaaatctctgtggggaaacgtggcattttcttagtaaaaacaggacataaggtaacgcgtgtaatgctttaacccgaaaacggtttggaatcattcgactgatctcctttatataatagtaaggactgcccttttctattctactggcgtaaaggccgttttgaatctattcgatttaacattgcacatagaacataaattacaaaaatggatatttctgtttcataagtataatcctcctgttttgttactgcccgataaaattgattgaaagttcagcagccctttatttgttgcgctactggtacgtatatagaacaacggggcatctgcttttagtacagaagcgcatgttgtggcttgatatcaattaaagacactaggcgccccctcctttaggcatactaaaagagggggttaatttatgggcataaaaaatggagggataacatgggtgtttgttccccttggcggaaagaggactacgcaggttttctgaccgacaaaaggcttgatataaaaaggcttaggagtgggcaaaaactttcataggtgatccgaaaaattgtcttaggtgatcggaaaaattctcttataagacaatttttactctcttataggaaagtttttagatatcttatactactgataatcagaagtattcaaaaccgattttggtacggcttacccgcgcaagatgagcattgcgaataagattgaaacaagtctgttgataaacgggccctaccttatttgactgctataaggtgggatgctgtgtaggtttactacgcttcgcacataaaaatgaaagttcacgaaaagactgaagctcggcaacagacttcagttgtagggtatatagagatgacgacttttaccggtcggccatataaagacataaaataaggctgcggagaagcgacctcggggaggtaagcgggcagccgactgcaactcgacgtatctttatgcctttggtttgttttattttggtcgtaagtaaatgtcgtttaatgcgctttctgctgaaatacaaacagttggttgtattattcaagtgtttgttcgagataatccaagcccgttgtcttagtttctttcaagtaattgataagcctttctgagaagaataagcccactgtaggtactttcaatatgtcgaaatcgtatttttttgcaagggagatgtggcgcatttccgtaaacttttgctcccgatttttatattctacgaacgaattatacttcaacctttccctcgaaaaagagtctataatgatacttttcgtgtaatctatctgatccggaggaatgcaagggaatgctaaaagataatagttcttcgctgtggagaactccggaatgctcacgggaatttcggaatgctcacgggaatttcggaatgtaggggcaatttgaattgttcaagcgctttctttatcgtttctgaaacgataaaatcgagcattccgaaggagttgtccgtcatatttgatatgaaatccgtttcttttacccgctttttagttttataatagacgatctgtcgcagcttggaaacgtcaattataggaaagtcttgtagaccgatatgcctgcttctttcccataaagccctacaatacgccattaaatagtccttgtctgccacattggcaaaggaatattgctctttcttgagtcgtatttcaacttggttggtaacaccatctgttattcccgttactgtactttctattgacggacgtacgctgaaatatcttttgttcgcttccatttatctgctattggcttgagatttgttgctcaaataatggttatgaagggaataaaattgcataaaacgcaaattcgttgttacatcagttaatgatttcgtcccaatagtgcggactataaatcgtaacagtcctttctccttcatcttcttgaaattcgctgaaggcaataccgacgctgttgaatatagtaaaaccatatttctgtatacacgaaaagctactcttcagcttatcaattatatttttgcagcaaaacagattgtattcgttgtaatacaattcaactcctttattttcgacaacagagatttccactaatctgttgttttcgaaaaccaaagacaaatcgtctgaatacaattttacaagaagacctttatcaactttcttaaagtccttctctgctttactcaaaatttcttcaagggaacttccgaacttgtaatcgttcacaccctcgtaaggttttattacgtatttcatcttactttattctcaaaacgtggtagcatctaaatcaggaggcaaaggtgcttagcgcttatgcaaaacgatcatctggctgtttcgtattgtttctattcctgaaataaaggttgggtttcaacataaaggccttttatcaatacgccattcatatatatggcaagaataaaaagagaaggtggcaacgggcttagccggtccaccttctctcgatttgtttattgcaagggttgcgctaattactcaccctgctccattttagctttcaatgcagccaaagcgtcgttgtcgcccaagctgttgcttgctatctggttctggatttgcgtagtttcttccttcttcgcattgtggcgagctgctttgcgctctgcacgctgcggatcttcgaatgtgcggctgtgagagaggatcacgcgcttattgtccttattgaactcgatcaccttgaaaggcaaagtttcgccaagctgaacgcggctaccatcttcttttaccaagtgtttcggcgttgcgaagccttctacaccttcttgaagttggatcactgcgcccttgtccaaaatttctacaacttttccttcgtggatagagccgtcttcgaagaggccttcaaacttatcccaaggattctcttcgagctgcttgtggccgaggctcaagcggcggtttgccttgtcgatttcgaggacaacaacatcaagctctgcgcccagctgtgtgaactcagacggatgcttaactttcttcgtccaagagaggtcagagatgtgtacgagaccatcaacgccttcttccaattcaacgaatacgccgaagttggtgaagttgcgtaccttgccttggtgcttagaaccaacaggatatttctcttcgatgtccttccaaggatcttctttgagctgcttgatgccgagcgacatcttgcgctcttggcggtcgagcgtaaggattacagcctcaacttcgtcgcctaccttgaggaagtcttgcgctgagcgtaagtgttggctccagctcatttcgctaacgtggatcaagccttcaacacccggagcgatctctacgaatgcgccgtagtcggccatcacgacaaccttgccttgaaccttgtcgcccaccttcaattcaggtgctaaagcgtcccaaggatgcggcgtgagttgcttcaagccaagcgcgatgcgcttcttctcttcgtcgaagtcgaggataacaacgttgagcttctggtcgagctgaacgacttcgtgcggatcgtttacgcgaccccaagaaaggtctgtgatgtggatcaagccatctacgccgcccaagtcgatgaatacgccgtaagaagtgatattcttaaccgtaccttcgagcacttggcctttttgcaacttagagatgatctcttgcttctgtgcttcgagttcagcttcgataagtgccttgtggctaaccacaacgttcttgtattcttgattgatcttaaccacctggaactccatcgttttgcccacgaagatgtcatagtcgcgaatcggcttaacatcaatctggctacccggcaggaaggcttcgataccaaatacgtctacaatcatgccgcccttcgtgcggcacttgataaagcccttgattgtttctttgtcttgcaatgcttggttaatgcgatcccaagccttgctcaagcgagcttttttgtgagaaagaacaagctgtccttttttgtcttcctgattttcaatgtaaacttctactttgtcgcctacttgaagttcagggttgtaacgaaattcgcttacggggacgatgccgtcgctcttgaagccgatgcttacaactacttcgcgcttgttgattgaaatgactgtgccttctacgacgtcattttcagtgacattgccaagcgtcttgtcgtaagatgcttcttgctcttgctggctttctccgccttcaactgtgcctttttcaaatgcttcccagtcgaactcggacagcggttgaatgttcttgtaattctccatttaaattttaaaaggattaatattgttagaaaagtgaattatatcgcggcaaagttacggttttccattga

SEQ ID NO: 4559 - DNA, 23705 bp, synthetic construct
  misc_feature 1..23705: note = Synthetic
  source 1..23705: mol_type = other DNA
gaacggcgcacttggctttaatgggcgaaaagaacgccgcaatacgatttttaatgtatagagcagtcgctttcagccttcacgcagaccgctacttggtgcgtcttgagcagcaagacgcctttcttgcctcgttcgccgtatttctcaattgctttttccccttgcaggagttccatgctggcaatatctgagcttctgattgaagctaaaatagcgtcatctgtgatttcctcaccatcaactacgatgatgaaatcagttttctcacgaaaatcactcaaattcttgccacgataatccaaacttgagatccagcctttttcagccgagagtttcacgcctgactgctgcgagcaattcgcagcagaatgacaattaccctgctcagcgccctgtttgctgcaactcttttgcgctccgcaagcctcagttttctgtttacagtcaccgcatttctctttgcagtcgccgcacctctgtttgcagtcgccgcatttctgctttgcatcgccgcacttctgtttgcagtcgccgcacttctgctttgcgtcaccacatttctgcttgcagtcgccgcacttctgctttgcatcgccgcacttctgtttgcagtcgccgcacttctgctttgcatcgccgcacttctgctttgcatcgccgcatttctctttgcagtcgccgcacttctgtttgcagtcaccgcacttctgtttgcagtcaccgcacttttgtttgcagtcgccgcacttctgtttgcaatcgccgcacttctgtttgcagtcgccgcacttctctttgcagtcgccgcacttctgtttgcagtcgcctgatttctctttacagcaaccgccggctttcatttcgccgcagctacctgcgttctttttgcaggccgtctgattggtctgctgcgagcacgttttcggctcttcgcaagacgcggaagtcttccccagtgtcctttcacggttaatcatctgttggcgtaagtcgccctccgtcaaggtttttacctgaccatttgttgctttattaaccgttactttacttgtgctataagcaggttctgttacgaagcgttcagtttgcttctccacgcgttcagttttcgctttctttgccggacggcgctttttcgggcgctgtgcagtagctcctacgcaaactgcagccagcaataaaaatgctacatacttcttcatcgtaatttaatcttgtttatcgttatacttaattaggaatcgcttgcttccctcccgcaccgcatcgggcaaagctgaaagaaagtagccgatttgttgcaaaaataacacaaaccgcccaaacgatgaccataaaacccgaatgtatacctttaataattgtaaactcagaaagcaaaattgccatttttcacccctcaaacgctcaattgagcaaaaaaagcaagaaactcaaaccgcacaacgacaagctaaaaaacaagaatttgtaattttgtagtcacaatcaccacacagtcacacaaagatgaatcaaacgaccgacgcaagacgccttttacagcgcaaactcgactctctcttgcgcacaggacaaattctgttagaaagctctgctgataccagccgcattatgcgcaatatgaagcgcgcggcggcttatttgggattgccggaaaagaatctgcacatccacatcgactataatatgttgatggtcaacattcacaacaccgaactctccttctctaaatttcagcgctgcgataagcacggcatcaacttcacggctatttccgccgttagcaaactgacgtatcgagcggccaatgaaaactactctttggcgcaatacgaagccgcactcgacgagattgccaaccgccggcgcaactattcgccgctccttacggccattggcgccgcctttgcctgcggcggtttctgcatacagtttggttgcgattgggtcgcattcctctacgccacgcttgctgcctttttgggtttccgcctacgctatcggctgatcgaatttggccttaatatctatatggctattgcctgtgctgcctttgcttcgaccgtcgtggcttggctgaccacatatttacccgccggctggacatccacgcccctccatcccctcttagcctgcgccttgttcattgtaccgggcgtcccgctcatcaattttgtcgacgatatgttagacaacaacatccaaaccggacttgtgcgagccgccaatacgatgatgatgatgatagctatggctttcggcatccttttcgccctcaaattctgcctatggaccttcaattttcaacccgatattatgggcatcccgatggtcccccaccacaactattgggaatacgccatcgcggccgccatctccggtatgggtttctcgatgatctttaatatcccgaagcgccttctgtgggtcgctgccgtgggcgcagccatagccgtctgcacccgcaatctagtcagtttgcagcccgacgaattatgccaattcagcttaggctggggcggcgtattgggttcgctggccggttccgtcttaatcagtttgattatgttgcgtatggcccaccgcgtccacgctccgatgcagattctggctatctgtagcgtcatcccgatggtgcccggcgtgctgatgtatcgcagtctctactccttcttaatgatgacgcgcacggagacccaattggtcgatatgatgtcgctggccggcatcaacggcatcaacgcttcgctcatgatcttctgtatcgccttaggcgtggccgtgccttccgtcttcgccaagcgatatatcggcgccaagaagcagcagcgcttcttcgagacgctgaaagcgcagcgacgcgaagaaaaatccttcgactgggagcaattttaagatcaacgcaagcggcccgtcatacggcggccgcccaaccttcaaacagcaacactgatgaacaagacatttaagcgcatgggtctcagcctcgtaggccgcgaagatccttttcaagccatcggccacgaatggttactgattacggccggcacaccgactcattataatatgatgacggccagttgggggatgctgggcatcctttggaacaagcccgtggctacgattttcatccgtccggagcgatatacgcacgactttgtcgagactacagaccgcctgacgctgagtctgctcggcgatcatcgcgaagcctacaaaatctgtggctcaaaatcggggcgagatctggataagacggccgctgcgggcctccaccccgcgacgctacccgacgatctcgtcactttcgccgaagcgcgcttggttttggtttgtcgcaaactctacaagtcgaccctgcgtgccgacgagtttatagatgcacaaccttacgatcgtcattacagccccaaagaaggaaatttgcacgacgtatatgtctgcgaaatagaagccgtctacgctcccgaaggcgacgcctaagcctggggcgcaaagggcgcattcatcgtcccgttcaaagcatctacggaggctttgggcgggatttttttggcggagatcaagtatttcttccgcctttttagtcattgcataaccacagcagtcgaccgctgacgtttttcatcacgagaaaaaaggtgtgggctcgtgataaaaaaggcttcacctcacgagaaaaaaggtttgcactcacgagcgtaaacaaaagaagcagacaggcgacggttgccggttggagtaagccgattaaaaagtgggcacacggacaaagaaaaaggccctgccgcagtgcgccgatgagcctcggccgattaaaacaaaaaagcctgcctcccaagggagacaggcggcactaaaactatatttttaccttggcaaaggtaattgagccaaactatttatcgaccgaattgatacgttatctcatagaagcacggccgaaccgagcctttggagcgttcatgtccttctgtgctgggtacgatcaggcgtactttggctatttcgcccgtcggcgtcgtttgccggcccaaaccgataaacggcagggggaacaaccagcccgaaggaacggcagctccgtaaaggctcttcatcacgccgctattaaaaagtccgctatagatgccgtaactattggtcacggtcatcacatccggcctatcctcgttggctaagacgttgttggtcgattgcaagctgtcggtagccaaattaaattcaaagtagcggcaaacaacgggagcacttgcgccctgcgctattttcccgggctgccccttgcgcaagatctgcatatagacgcccgatccggcaaagagtacgtactcgttgttggctacgttggtcgtagaatcttgcttgtaaaattgctcttcggagataactttaatgtttcccggcacgtcgagcaaaacgttgcccgactccgggtcgattaccttcgcgcctttcttgaggaagttttgcacctgtcgacgctcgcgcttgcgcttatcggcataggaagtatcatcattgctgcaagcctgaaaaaggcagaggccggcaagcagcaggggtaacataagcgccaaacgctgccacacattgtggtataaacggatgcgaaaggatgtattttgcattgtaatcaatcttattttgggcaaaaataagcaataacacgcacgtgagccgcattttctcaaaaggaattgcggcataaagccgaaaaaaacctaaaagtgaaagccggcttggcaggccgtcgggttatcggcaggcggctttcgaatggtaaccttcgggcggcaatgggcccgcgtttgtacgcaacagatcggctacttctagggccgcatacgcatgcgaagcggcgcggtcggcgagccgccttgcacgcgaaaaggggaaaaaagaggaaaattgcatggggctttgcgtaaattgcggccaaattatttgcagaataaaaataaaaccctacctttgcaaccgcaaaacaaaatggtaccttgaccgagtggctaggtagcggtctgcaaaaccgtgtacagcagttcgaatctgctaggtacctctacaaagcggagcacttcttacgaagcgctccgctttttaagttgtatgtcgtgctccaagggccgccgcttgcatcagaagggcaacccgacggcaaaatggagggcaaaatcgcgagagaatttggggtgaatcagcggatagtgggcgcgacctgaaggatgagcgggatcaacggccttcatgccggcatctaaacgcaagataaaataatcaaaattgaggcgcaggcctaaaccataggccacggccaactgcttatggaaggaacgcaggcgaaattgactgccggaaagattttcgtagcgccgcgtgttccagacattgccggcatctacgaagaaagcgccattgaatttccagaaaagcgccgtgcgccactcaaaattcaaatcgagcttcatatttcccgtttggttgatgaaatctactttgccgtccttctccacataattgcccgggccgagcgaacgcacattccaaccgcgcacgctgttggccccaccggcaaaataacgcttctcgtaggggattacagcagagtttccatagggaatagccaaaccaaaggcggcgtgaaacgcgaaggtgttgcggctatcaatgcgcaagctgcgcacaaaatcgaggtcgacttttacatattgggaataggcaatattaaacagcctgtgttggcccgcttcgttcttacttgccttgatgatctttgagatgccgtggagcagattgccggcggcttcgatgccaaactttaattgccagcccttggtcagttggccggtaagcggtgagaacgtcacgctactccgctccttgtcttgctgcgaattgtatacgaagctgtagcccgtattcataatgaaaagatcggcataactggctcgcaaaatcgaatatcgagggtcggcgttgttcagataatcgcgccgaaacgtgttggatatccaaggcataaagacatagttgaggctgatcatatcaaaacgatgctgaaagccgggatgggcatgataactccagcgataggaccagttgcccgccactacacgccgatgaaactccggcctgttttgcgaattgtacataaagctgaagtcgctcgtagcctttaagcgctggcgggccgattggcgcacgaaaggtaggcgaaaggtggggaaacggagcgaagcctcgccgctaaactctaagtagttttcgttgccgtaaccttccaagcctcgtatggcttcgtaagccattcgccccttcaagagcaggcgctcagcacccttaaataagttgcgattcgtaaaggaaagggccaaagccgcccccaagtcgccactggtattcgtcccttcgacctcgagactgacggcattgggcttgttgcgcacaatcgtgatgtcggcatcaagcaaagcagaatcgccgggcggctcgttaaactttatcgtcgtatagcgcaccgccgacaaaccgttcatagccgaataactgtcctgcacgtcttcttcgcgatacaaactatcggggcggatgagcagatggtttttgtagagatgtttacgaaaggccaacttgtccgcacccaggctcggcgagtcccagatcttgatggtgcgaaagcggaagggctgataagccttcagagaatcgatgccgggcgggcgggtaaagacgaaagtcagcgccacgcggtcgctgccggcaatggtatcggcatcgtagcctacaaaatcgcgattaatgcggtagtagccttgattttgcagggccgtaatgacgcggttgcgctcttcgttgaggagggagacatctaaaggcataccgacgtggagcagactcttggcgcgcaaggctgcaacggcacgcgccaaaccgggatcgtcgaagtggtaagccaaagaatcgaccacgtagcgcacaccggggcgcattttatacgtgagacggacatggcggcggcgctcttgtgtgagcgtatcgaccgctgcgtgcagatagccccgcgattggagagcagcgagcagtgccgcacgcgaagcaccggtagcggccgtatcgtaaacgacgggcgcttcgccaaggcggcgaaagaaacggccgcggcgcttggttgtatcggcgggtgagagacaataaataccgagcggcacttttaccaaactaaaccagcgcgcattgggctgctgacgcacatatttaatatagtcggccggcttgatttgcttcagagcagattctactttgacatcgctcaatatcgcttcatcgcccgacaaatagcgtgtaggcgagcacgattgcagcaaaaaaagcagcaaagtaagtcctgcgaagagcagggatagagaaacgtgacggttcaaaggcttcaattttgaagcaaatatactacttcattagcttctgtctttgtaattttgccgaaaaatccataagatgctgacaagagctgagataaaatggctacgcggcctggcgcgcaagcggcagcgcgatgctgagggcctcttcatcgctgaggggccgaaggtagtcggagatctgctggccttgctcccttgccgactgctcttagcaacggctgattttctacaaagcaaggcgcaatggcccgccgcagaggtgcgcgagctgtcggcattggaactggcgcgcgtttcgctcttgcaagcgccgcaacaggtcgttgccgtctttgaaaagcccgcaccgacgccttggcagcccacagatgaactggctttggttttagatggcgtgcaagacccgggcaatgtggggacgattatccgattagccgactggtttggtatacataatatattgtgtagcccaacgacggccgacgccttcgcgccaaaagtggtgcaagctacgatgggcgcactcggtcgcgtcaatctccactacgtagatctctgcgaagcgcttgccaaattgcctgcggagacaccgatttacggaacgtttctcgacggatcaaacatttacgagcaaacattggatacgaaaggcctcatcataatgggcaacgagggccaaggcatatcgccggccgtagagcgccttgtttcgaagcgcttgtttatacctcgcttccccctcgacgcaacgggcagcgagagcctcaacgttgcgatggccacagccattatttgcgccgaattcagacgaagaaattattaaacaatgaacctatctctccttctcaacataagtttgccgattgtgatgctgctctgcctgctcgctctttggcgttttcgctggcgcgattactcgctgccgatgcgcgaggttgccacggctgaatcgacggagcaacctgcgatctctattatcattccggcgcttgatcagggcgattacttggccgagtatctgccgttgtttttgcagcaagactatccttcgtttgaggttatcgtagtagacaaggcctcaaccgacaatacgctcgacgtgctcaagcgcttatcggctgaagataaacgactgcgctacctgtcggtaccgcgctcggcgcgccatattgaattgaccaaattggccttgaccttgggcgtgcgatctgcgcgttttccttgggtggtctttacgcgggccgactgccaaccggcatcacccaactggctctcacgattggcggagcagtttgctcccggcgtagaaatggtcggcggctatgccaactatctcaacgatgcatcgcgccaagcacgccgcccgatcttcgaacgtctgcgtttgcagttgcgtttggcgcgggctgctcggagcggacgccccgtttgcgctgacccctgcaacctggccgtcaaaaagtcgttctttatggcacaggagggctttgccaatagtttgcttttgccctttggcgaagaagaattgtttgtggatgcatacgctacaccggaaaatttccgcctaacttggcatcctgatgctacgattcgccagcaactacctgagcgccgctttctggccgacgagcgtatctatacggcagagatcgccaaccgcagcagcaaccgccgccgactgtatgccgtgcgcgaagcgtgggctacgtgctttttctatctgtttctcctgttaatgctgacttatatcggtgagcgcacctattatatttggcaacaatcggcttatcatctacaagatttggccaccgacctgcccttcttgctcctgctcatcgcggccatcgtcctaccgctccgcacgatgcgcaaggctacggagacattgagtgagcgcaagtttggcggaatgctgattgcttatgcttggctgcaacctttgcgcaaccgactgacgcatttgcgccgcctccatcgcagcgatagttttattcgcccctctttatgaggctcaagatccaatcgccgcttcttgattgcacttttcgcccaaaagcaaaggcttgcttgggaaaaggaagcttctagcccctgctatcaagcgaaagttacggaaaagaaagccttgaacagaaaaaaagtgcgcaaagtatttggcaaaccaaaaaatcattctacctttgcactcgcttaacggcaattaggtagatccgctagctcagctggtagagcacaacacttttaatgttggggtcttgggttcgagccccaagcggatcacaccaagaaaagaggcttatcgcaggataagcctctttttcgttcatgctctcatctttatcactattaacgttacgctacgcttcgtgcgctcaaccagctttcttactaatcaagcacgaatgatacgtaagcctaccacgaacaagcaggccgcagacataggtatataaaaaagaaagcctctccgaagagaggccatgggaataaaatccttcggcatatagccttattgtgatatgatgtagaatatcctttttctgaggcaaatttaaggattccatttgtacatgccaaatttttggtctatttttacagaaaatttacaaacataccttatgaaaacccgaatattaggccttgataccggtaccaacagtttaggttgggctgttgtagatcgcgatgaaaacaaccaatatacgcccatctgccgcggagatttaatcttcacggaaggcgtgaagcaagaaaaaggcgtcgaattttctttggctgccgaaagaacttcttatcgcgcttcgcgacgccattacttccgccggcgtctgcgcaaggtggaagtgctgaaagttttggtgaagcataagttgtgtccgccgctttctgatgaggcgctcaaccgttggcatacaaaaaaagaatatccgcttgatgaggacttcatactttggcagcgcacgagcgaagctgataataagaatccttatcacgaccgtcacatttgcttgcaccgcaagttgaacttgaaagattctcagacggatcgctatacgctggggcgcgcactctatcacttgacgcagcgccgcggcttcttgagcaaccgacttgatcaaaacgaggaggcggaagagacgggcaaagtaaaatctgcgatctccgaattgagcaaagagatgaaggaggcgggatgtgagttcttgggggattacttttacctactctaccgcacggaaggcaaccgtgtgcgtatccgttcccgctatacggaccgggaaaagcattatttgcaagagtttaaggagatctgccgcgtacaagaattggatgaggatctggcaaaagcgctggagaagacgattttctttcagcgcccgctaaaatcccagcgccaaggagtaggcaaatgcacgatggagaaaggccattcgcgctgcgccgtctcgcatcctttatatgaggaataccgcatgctctgttacctaaacaatatccgaatcaaaacgccatcggatgatcgtttgcgtccattaaatgcggaagagcgagaaaaaatcactcccctcttctaccaaaaaagcaacttcgacttcaaaaagattgctaaaaagctcgcaggaaaaacgccttttggctggataagggatgaggaggattggccttaccaatttaattatcgtatgacgcaagaggcgccggcctgccccacaacagcacaactaataaaggtatttggcgaagattggaaagcagcattggctgaaacttacacgatgagcgccaagcaggacgggacgttaaaaacagaagatgagatttgcaccgacatttggaacgtgctctattctttttcttcaaaagaaaagctgaaggagttcgggttaaagaaactgcaactggatgaagcgcaagccaaagccttctcggaaattcgcctaacgcgcgactttgcctcgctaagtttgaaggcaatacgcaaaattcttttcttcttgcgcaccggcgaagactattcgaaggctatctttttggcaaacatcccaacaattgtcggtgaagaaatatggaacaacattgagcgacgctctcgcttgctaaataaagtcgatcttgcccttcggccgcaagaagaggacgatgcagaagagcatcgcacaatcgcagagcgcatcaaagcggcagtggcggcagaagtgcctaatgcgccgatcaatttgctgtatcacccctcaatgattgaggcctatccggacgccaagcgaaacgagcgcttcgattgctaccaactgggatctccgaagacgaacgctgtgcgcaatccgatggctatgcgctcgctgcatatggtgcgcaaagtaatcaaccacttgctgcgcaagcatatcattgatgagaagactgaaatacacattgaatatgcgcgcgaactgaacgatgccaacaagcgccaagccattgccgattggcaacgcgagctaagcaaacggcacacagcatatgcgcaaaacattaggcaactctataaagctgaaaccggcttagagattgagccaacgaagacggacgtcttaaaatatcaactctgggaagagcagcaacacgtctgcttatataccggtaagaagattggcattgccgactttttgggagccaatccgaagtttgacattgagcacacaatcccgcgcagcaaaggcggcgatagcacgcaggagaacttaacgctttgcgagagtaagttcaaccgcgacaccaaacgtgacaagttgcccacagaattagacaactatgaagaaatcttagcgcgcatcgagcattggaagaagcagtgctacgcgctgaagctaaaaagagacggcatccgcacgcattcgggtctggagaagagcataaaggattctaagattcgaagacgccatcttgtggccctagaatacagctacttgaaggggaaatatgatcggtttacgatgaaagaagttcctgagggcttcagtcggcgtcaaggtgcgggcatcggcttgatttcaaaatatgccgggctcttcttgaagtcgctctttaaggacccgaaaaacccaaatcgctccaacgtctatgtcgtcaaaggcgctattacggccgagttccgcaaactatggggcttgcagcaagttgatgaggcgaaatcgcgcgagaatcatacgcaccattgcattgatgcttacaccatcgcttgcattgggccgtgcgagtacgccgccttagctgcatattatcgaagcgatgaggagttcaaatatggaaggcgccgtgaaaagccgcagtttgagaaaccttggcccacgtttacggaagatttgctaaaactgcaaaaggagctgctcatcgtacatcaaactactgacaaactgggcaagcgagatcggcgaaaggtaaagacgccgcgcgggaagttcctcacaggcggcgactccgcacgcggcaggctgcatcaagaaacgtattatggtgccatcaactacgatggcaacattaaatatgtcgtaagaaagccgctggatagtttaactgaaaaggacttggataaaattgtcgatgaaacggttaaaggcatcgtcaagggcgcagttgaggccaaaggcagtttgaaagaagctcttaccgacggtatatatatgaataaggagaaggggatcttgattaagcgggtgaggatgtttactagagtaagtgatcctattaaattaaagcagttacgagatatttcaagcaaaggatacaaacaacacattcacgtaaataaagaagaaaactatctcatcgccatatatgaaggtctaaacaagaagaatcagaagcagaccgagacctatactgtcgactatttagatgcggcaaagttctacaaggatagcaaacgaagagataaaacaaataaccttgtcagtgactatagtgagaaatacaagctcccgcttaaatacattctaaagaaaaggcaaatggttttattctatgaacatagcccagaagaaatcagatttagagacaaaaaggatctttccaaacgattatatatcgtgacttgtattgaaaaagatggacgcatacagctactgcaccatcaaacagccaatacagcaggaataaagccatcctcaagtcctttcacaaatgatggggaacatcagactttttatcgtttgagggcttctaaattaaatattttagtagctggggttgattttgacattaatattttaggtaagatcacgtcaaagctccaatagccttatgctcaagcgcagccttgtctttatgcatccggccactttgtctttacgaaatgggcaaatagttatcatcagaaaagaaattcctgatgaaactcttaccgtgcccattgaagaccttggcttggtgatgatcaaccacgcgatggtaagcctaacgatcccgctcttgaatgctttgacggagcaaaacgtagcggttatcttctgcaatgagaaaggtatgcctgcttcgatgctctacaatttgcagggcaacaccacgcagggagaaactttacgcaaccaactcgaagccggcgaggtactcaaaaagacgctttggaagcagatcatcgaagctaaaataaagaatcaggctgcacttttaaacaagatgggcagggagggtagcatcttaaagcccctttatacgaatgtaaaaagtggagacagcgataatcgagaaggcatcgcggccagattgtattgggccgccttgtttggccgcgatttcatccgcgatcggaacataccgggaacaaatgccctcttaaactatggctactcgatcttacgggcagccgttacgcgggccttggtctcctccggtttgtttccagcattgggcatcttccaccatcatcgcagcaacgcctttcccttgtctgacgatttgatggaacctttccgaccttttgtagacgagatcgtgtttgaactaacggcccaaggcgaggcggaactaaacacagcgaccaaaagccgcctgatccgtgtgctatacgtcgacacttacttttccaaaataacacgccccctatccgtgggcttaagtatgacgatggcttccttagccaagtgctatgccaaggagcaaaagaagttggtcgtcccgttattaaaatgagtgaagtcagattaaacgcttatcatattatgtggctctttgtgatgttcgacttacctacgatgaccaagaaagatcgcaaagcctcggccctttttcggaaacaacttgaaaaagatggcttttcgatgcatcaattcagcgtctatatccgccactgtgcctcaaaagaaagtgccgatgtacacataaagcgcgtaagatccaacttaccggcaaaaggatctgtcagcattctctccattaccgacaagcaatacgccggcatcatcaacttttggggtgcagaaagtaaaaagctaccggctacacccctgcagttagaactattttagtacttttgcccatagaaagttacgcatcaacaccatttcctatacacaaaagagtccttcaagagcttccatatcaatggattatctcatataggttgtggtttgatgtagaagaaagatataacacaaccgaaaacgtacgcaatgcagacctcgagaagttgtggtttgatgtagaagaaagatataacacaactagcccgtaacgatagcaatgctatctttagttgtggtttgatgtagaagaaagatataacacaacttctttgcgagtgtctttcttggctttaatgttgtggtttgatgtagaagaaagatataacacaacctctcccttgcgctctttactctcggtattgttgtggtttgatgtagaagaaagatataacacaaccttttgtttgcaagttacaaacctgcaacggttgtggtttgatgtagaagaaagatataacacaaccataggttggtctaagtagtcatcaaactggttgtggtttgatgtagaagaaagatataacacaacctcgccactattaacgcgcgcgagcagcttgttgtggtttgatgtagaagaaagatataacacaacctttgcgtaacgcctcaacgtgtggcggctgttgtggtttgatgtagaagaaagatataacacaactcatatgcaaaaagcccgtagcgtctttcgttgtggtttgatgtagaagaaagatataacacaacacggcgaaagcttgtcgatttaaccaccacgttgtggtttgatgtagaagaaagatataacacaactctataagttcttcgcccgtgccgtaaaagttgtggtttgatgtagaagaaagatataacacaactcaagataaaagccattcatcatacctttgttgtggtttgatgtagaagaaagatataacacaactgaatgcgcagagaaagaacattgaggctgttgtggtttgatgtagaagaaagatataacacaacttcacctaaaaacaacaattcggaaatagagttgtggtttgatgtagaagaaagatataacacaacaaaccacttttgcaaatggtctttgtggacgttgtggtttgatgtagaagaaagatataacacaacaactcttcatattgaaggctcaaattatcggttgtggtttgatgtagaagaaagatataacacaacgattaacgggtaagttgtactcattttgttgttgtggtttgatgtagaagaaagatataacacaacaagaagttggcaacgctatcgcgtgtctgcgttgtggtttgatgtagaagaaagatataacacaaccttggtgccaaccaccctaaggcgcgcgccgttgtggtttgatgtagaagaaagatataacacaaccaattatcaaagtagtagagacgctactaggttgtggtttgatgtagaagaaagatataacacaacagcgtagcccgtaatcgtccgactcggttggttgtggtttgatgtagaagaaagatataacacaacataccggctttttgtattgttgggattatgttgtggcttaatatcaattaaagacactaggcgtcccccctttaggcatactaaaagagggggtttatttatgggcataaaagatgggtggagggacgaacatggctgttggccctccgttggtggaaagatgtgcttgaaagacccggtaaaaggcttgatgtagaagaacttatgggttgactaaaaccacctaaggagatcgtaaaaactttcttaggtgattcgaaaaattctcttaggtgatcgggaaaattgtcttaggtgatcggaaaaattctcttataagacaatttttactctcttataggaaagtttttgagctccttatgctactgataatcagaagcattttaagccgattttggcgcgccttgctcgcgcaaggtgtgctttgcgaatatggttgaagcaagtctgttgataaacggccccaaccttgcttggctgccataaggtggaagactgtgtaggcttactgcgtttcgcacataaaaatgaaagtttacgaaaaagctgaagctcgataacagacttcagttgtgggtatatagagatggcgacttttaccggtcggccatatgaagacataaaataaggctgcggagaagcgacctcggggaggtaagcgggcagccgactgcaactcgacgtatctttatgcctttggtttgttttattttggtcgtaagtaaatgtcgtttaatgcgctttctgctgaaagacaaacagttggttgtattattcaagtgtttgttcgagataatccaagcccgttgtcttagtttctttcaagtaattgataagcctttctgagaagaataagcccactgtaggtactttcaatatgtcgaaatcgtatttttttgcaagggagatgtggcgcatttccgtaaacttttgctcccgatttttatattctacgaacgaattatacttcaacctttccctcgaaaaagagtctataatgatacttttcgtgtaatctatctgatccagaggaatgcaagggaatgctaaaagataatagttcttcgctgtggagaactccggaatgctcacgggaatttcggaatgtaggggcaatttgaattgttcaagcgctttctttatcgtttctgaaacgataaaatcgagcattccgaaggagttgtccgtcatgttcgatatgaaatccgtttcctttacccgctttttagttttataatagacgatctgtcgcagcttggaaacgtcaattataggaaagtcttgtagaccgatatgcctgcttctttcccataaagccctacaatacgccattagatagtccttgtctgccacattggcaaaggaatattgctctttcttgagccgtatttcaacttggttggtaacaccatctgttattcccgttactgtactttctattgacggacgtacgctgaaatatcttttgttcgcttccatttatctgctattagcttgagaatagttgctcaaaataaaaggttatgaagggaataacattgcataaaacgcaaattcgttgttacatcagttaatgatttcgtcccaatagtgcggactataaatcgtaacagtcctttctccttcatcttcttgaaatccgctgaaggcaataccgacgctgttgaatatagtaaaaccatatttctgtatacacgaaaagctacccttcagcttatcaattatatttttgcagcaaaacagattgtattcgttgtaatacaattcaactcctttattttcgacaacagagatttccactaatctgttgttttcgaaaaccaaagacaaatcgtctgaatacaattttacaagaagacctttatcaactttcttaaagtccttctctgctttactcaaaatttcttcaagagaacttccgaacttgtaatcgttcacaccctcgtaaggttttattacgtatttcatcttactttattctcaaaacgtggtaacatctaaatcaggagacaaaggtacttagcgcttatgcaaaacaatcatctggctgttttgtgttgtttctattcctgaaataaaggtcgggtttcaacataaaggccttttatcaatacgccattcatatatatatggcgagaataaaaagagaaggtggcaacgggcttagccggtccaccttctctcaatatgtttatcgcaagggattgagctaattactcaccctgctccattttagctttcaatgcagccaaagcgtcgttgtcgcccaagctgttgcttgctatctggttttggatttgcgtggtttcttccttcttcgcattgtggcgagctgctttgcgctctgcacgctgcggatcttcgaatgtgcggctgtgagagaggatcacgcgcttgttgtccttgttgaactcgatcaccttgaatggcaaggtttcgccaagctgaacgcggctaccatcttctttcaccaagtgtttcggcgttgcgaagccttctacaccttcttgaagttggatcactgcgcccttgtccaaaatttctacaacttttccttcgtggatagagccgtcttcaaagaggccttcaaacttatcccaaggattttcttcgagttgcttgtggccgaggctcaagcggcggtttgccttgtcgatttcgaggacaacaacatcaagctctgcgcccagctgtgtgaactcagacggatgcttaactttcttcgtccaagagaggtcagagatgtgcacgagaccatcaacgccttcttccaattcaacgaatacgccgaagttggtgaagttgcgtaccttgccttggtgcttagaaccaacaggatatttctcttcgatgtccttccaaggatcttctttgagctgcttgatgccgagcgacatcttgcgctcttggcggtcgagcgtaaggattacagcctcaacttcgtcgcctaccttgaggaagtcttgcgctgagcgtaagtgttggctccagctcatttcgctaacgtggatcaagccttcaacacccggagcgatctctacgaatgcgccgtagtcggccatcacgacaaccttgccttgaaccttgtcgcccaccttcaattcaggtgctaaagcgtcccaaggatgcggcgtgagctgcttcaagccaagcgcgatgcgcttcttctcttcgtcgaagtcgaggataacgacgttgagcttctggtcgagctgaacgacttcgtgcggatcgtttacgcgaccccaagaaaggtctgtgatgtggatcaagccgtctacgccgcccaagtcgatgaatacgccgtaagatgtgatgttcttaaccgtaccttcgagcacttgacctttttgcaacttagagatgatctcttgcttctgagcttcgagttcagcttcgataagcgccttgtggctaaccacaacgttcttgtattcttgattgatcttaaccacctggaactccatcgttttgcccacgaagatgtcatagtcgcgaatcggcttaacatcaatctggctacccggcaggaaggcttcgataccaaatacgtctacaatcataccgcccttcgtgcggcacttgataaagcccttgattgtttctttgtcttgcaatgcttggttaatgcgatcccaagccttgctcaagcgagcttttttgtgagaaagaacaagctgtccttttttgtcttcctgattttcaatgtaaacttctactttgtcgcctacttgaagttcagggttgtaacgaaattcgcttacggggacgatgccgtcgctcttgaagccgatgcttacaactacttcgcgcttgttgattgaaatgactgtgccttctacgacgtcattttcagtgacattgccaagcgtcttgtcgtaagatgcttcttgctcttgctggctttctccgccttcaactgtgcctttttcaaatgcttcccagtcgaactcggacagcggttgaatgttcttgtaattctccatttaaattttaaaaggattaatattgttagaaaagtgaattatatcgcggcaaagttacggttttccattgagtaacaagcattaaaacgagaattaatttgtactttagccgctcaaaatatgttttttatgaagaaagcaatactttttcttgcccttttagcgtttgcaggatgcaaggagcgcaagacgcacagcgatgagcagcctgctacgttgccgaaggatagcgtggcacaagtaaatgcagtacccgactcgaccatctatggtaaagcggacgacgatttatatggtatgtcgacttttgccgtgatcacgacaaagggcgatacattggaacttgaccgcacgtatgaactcgatggcaaagatggcatcttttatggcgacatcaatggtggcgacgattacgccttgaccgtacgcggaaaaggtacggactatcaggcggtgggcgtagcagtcaatctctcacagttgcgccgcttcgttaaagactttacgattttcaatgctcgtccgattattaacggcgacacggtgcgcatcctctcgctcgacgataaagcctttaaggccgagggcaagcagcaatatttcattcagaaaaagtaaacgatatgtttagtggtatagtagaaagcacggcgcgcctcgtcgctgtggaaagagatcgaacaaacattcacttcacctttacgtgcgatttcgcgcacgaactcagcatcgaccaaagcgtggcgcataatggggtttgccttacggttgtttcgcaaacggcggaccggtatgtcgttacggcaatggacgaaaccttgcagcgttctaatttaggcttgctgcagccgggcgatgaagtgaacgtagaacgctcgatgctgatgaacgggcgcctggacggacacatcgtgcaagggcacgtggacacgacagccgtttgcaagaaggtggagaacgtcgacggcagttatattttcacctttgcctatgaggctgatcgtgcgaaggctttgcagggctattttaccgtagagaaaggcagcgtcacggtcaatggcgtgagtctgaccgtttgccgcccgactgacaattcttttgaggtctgcatcattccttatacctatgagcacaccaacttccacaatataaaagaaggctctgtcgttaatctcgaatttgacattctggggaagtatatggcgcgcctcagacattttgaggaatgaagaagcaggcgctttttgatacggtcttaggcaccttggcgcctaagtatggcgacgtagaaaccgaactccatttcactacgcccttccaactgctcgtagccgtagtcttatcagctcaatgtaccgacaagcggatcaatatgattacgccggcgctcttcgaggcttatcccgatgcagacgctatggcacaagctacgccggaagaactgttggaatacatcaagagcgtgagttatcctaactcgaaagccaaacacttggccggcttagcgcaaatgctcgtcgaagcgtttaatggcgaagtgccgactacgcttgaagagctcacccgcctgccgggcgtggggcgcaagacggccaacgtcgtgcaagctgtagcctttcacaaagcggcattagccgtcgatacgcacgtcttccgcgtcagtcatcgcttaggcttagtgccgaagacggccaatacgccttacaaggtggagatggcgctcaaaaaatacattcccgaagagaaagtagccccgagccactactggttgctgcttcacgggcgctatgtctgcacggcgctacgcccgaagtgcgacaaatgcgatctgcacggcttatgcaaaggaccactgcaaattaagaaaagataaaagcaaagaaaatgtggtcatctcaagcagattttgtaaatttgcaacacggataactgacgacttatataaactattgattatgacaattgacaattgcaatttcaaaggtaagaaagtaatcgttcgcgttgactttaacgtgcctctcgacgaaaacggacttgtaacagacaatacccgcatacgcggcgcactgcctacattaaagaaagtattaaacgacggcggcgcattgattatgatgagccatatgggcaaacctaaaggcaaggtaaacccgaagctctcactcagccaaatcgtaaagaacgtctctgaagctttgggtgttgacgtgaagtttgcccccgattgcggcaaggctgaaagcgaagtggctgcgctccaagcgggcgaagcgctcctgctcgagaaccttcgtttctatcctgaggaggagggcaagcccgtaggcattgacaaggccgatccggcttacgatgcggcaaagaaagaaatgaaggcgcgccaagctgaatttgctcgcaagttggcttcttatgctgattactatatcaatgatgcctttggcacggctcaccgtcgccacgcttctacagccgtcattgccgacgattttgacaaggatcataagatgctgggctatttgatggagaaagaagtaaaagccatcgaaagcgtgatgcataacgcgcaacaaccatttacggccatcatcggtggcagcaaggttagctctaaactcggcgtgatcaagaatctgttggacaaggtggataacctcatcatcggcggcggtatgggctatacttttgtcaaggctatgggtgggcacattggcctgtcactccacgaagatgatctgatccccgaagcactcaacgtaatggcagcggccaaggagaagggcgtcaatatatacttgtctgtagaaagcgtctgcggtcaagagtttaagaatgatacgccgaagaaaatctaccccatcaaggagattcccgatgattgggaaggtatggacgccggacctgcatcgctcgaaatctggaagaaagtaattcttggctctaaaaccatcttatggaatggcccggtcggcgtcttcgaattgcccaactttgctgtgggcacgggcgaaattgccaagtatgtagccgaggctacgaagcaaggcgcttacagtcttgtaggtggtggcgactccgttgcagcggtcaacaagttcggtttggcggatcaagtatcctatgtatcaaccggcggcggcgctatgctggaggccatcgaagggaaagaactccccggagtaacggctatcaagggctgatcctctttgacaattatataaagctaaaagggcacgtctgcttagacgtgccctttttcgtttgatagagac

SEQ ID NO: 4560 - DNA, 23687 bp, synthetic construct
  misc_feature 1..23687: note = Synthetic
  source 1..23687: mol_type = other DNA
tgctggccggcattccgtcggtcgtctacggattcttcgggctcgtcgcggtcgtgccgctggtacgcgacgtcttcgacctgccggtcggcgagacggcactcgccggcagcctgattctggcaatcatggcgctgccgacgatcatcaccgtcgccgaggatacgatccgcacgactccccgagccatgcgcgaatcgagtctggcgctcggcgcgacgcattggcagacgatccgccgggtcgtgttgccgtactcggcctcgggcatcgccgcggcggccgtgctgggcatcggccgcgcggtcggcgaaacgatggccgtgctgatggtaaccggcaatgccgccgtcgtgccgcactcgctgctcgagcccgtgcggacgattcccgcgacgatcgccgccgagctgggggaggctccggccggaggcgcccactacgaggcgctgttcatgctgggctgcatcctgttcctgctcacgctgctgctgagcatcgcggtcgagatgatttcggcccgacggcccaagacgatgtaaacaaggaaaccgcgccgacgcccggagaaagattccccgccggcgcgcgagaaacgaaaaaaacaataacgaacggacaacatgataacgtcctcgaaaatatcgaaacgcaagaagcgctcgcaacgacttgccttcgggctgttccgactgacaagcctgctggtcgtggccatactggtatggattctgggtttcatcatcgtcaaaggagccggcgtcgtcagttgggaatttctcacctcgatgcccgaaaacgggatgaccgagggaggcatcctgccggctatcgtcggcacgctctgcctggtggcgggcagcatcgccgtcgcgtttccgctcggcgtgatgtcgggcatctatgtcagcgaatacgcccgcgacaactggctcgtcagagtgatccgcgtcatgacgagcaacttgagcggcgtaccgtcgatcgtgttcggcctgttcggcatggcgctgttcgtccgtacgctcggattcggcgactcgatcatcgccggctcgctgaccctcgccctgctcgtgctgccgatcgtgatccggacgaccgaagaggcgatgcgctcgatcgacaactcgctgcgcaacggcagctacgcgctcggcgcgaccaaattgcagaccgtctggcgcgtactgctgccgatggctttcccgaacatcgtcaccgggctgatcctctcgatcggccgcgtgtcgggcgagacggcgcccattctgttcacggccgccgcctatttcctgccgaaactgcccgacagcattttcgatcaggtcatggccctgccttatcacctgtacgtgatcgcaacgagcggaacggatctggaagcctcccgtccgatggcttacggaacggctctcgtgctgatcgcgatcgtattgctgatcaatctgctggcaaacggactgagacgctatttcggccgcaaagtgaaaacgaactaacgaaaccctatcgtcatgatcaacataagtgcgaaagacgtcaacttctattacggcagcttccacgcgctgaagaacatcacgctcggcatcgagcgtaacacggtcacggcctttatcggcccctcgggctgcggcaagtcgactttcctgcgattgctgaaccggatgaacgatctgatcgagggaacgcgcctcagcggcgagatccggatcgacggcgaggacatctacggccgggacgtcgaggtcgtcgagctgcgcaaaaaggtaggcatggttttccagaaaccgaatccgtttccgaagacgatctatgagaacgtcgcatacggactgcgcgtgaacggcgtccgcgaccgccggctgatcgacgagcgcgtcgagagctcgctcaagggagccgcgctgtgggacgaggtgaaagacaagctgaagaaatcggccttcgagctgtcgggcgggcaacagcagcgcctctgcatcgcgcgggcgctggccgtgcggccgtcgatcctgctgatggacgagccggcctcggcgctcgacccgatctcgacatcgaaaatcgaggacctgatctacgaactgaaaaaggaatacacgatcgtcatcgtcacgcacaacatgcagcaggcggcgcgcgtcagcgaccgtaccgcattcttctacatgggcgagctcgtcgagtacgaccagacccagcagatgtttctgaacccctcgaaagaggccacgcagaactacgtgaccggccggttcggctgattcggtacctttgcgccgcaagcgcctgaaagagaccgctcccgaacgactgcggagagagaaaaaacgacaaccgcaggaccgggcgcaaagccgtcctccgccggatcggacacccgcgacgagaggctttcccgtccgaacgggacgctccgtaaaccgccgattgaagcaaaaacatcaaataccgaaaatccatgcgacataccgaagaatcgatcaagcgcgtcaaaaaaagcctggccgagatgtggcttctcgtgcaggggcaggtcgaaaaagtctcagccgccctgctcgagcggaaccgcgaactggcgctcgaagtgcgcagccgcgaaaaaatggtcgatgcctacgagctgacggtcgaccgcgagtgcgagaattttttcgcgttgctgacgccggtagccgtcgacctgcgcatgatgctgtcgatcgtcaagatcaacaacaacctggagcgcataggcgacttcgccgacggcatcgccgtcttcgtcgtcgaaaacctcaacgacaagatcacgccggagctgatcgaacggctcgaactcaaacggatgttccaagagacgctgtgcatgctgagcctgtgtaaggcggccctggccaacgaggacagcgcgatggcgggcaaggtcttcgccaaagacaatctggtcgaccggatcaacgccgacgcgatcgccgtgctggccgagcacatgagcgcgcatcccgacgcgatcacggactgtctgcacctgcattctgcgatccgccgcatcgaacgtatcggcgaccggtgcagcaacatcgccgaggacatcgtgttctatctggaagcgcgggtactcaaacaccacgataccggaccggccgaagagaagtaacggaccgcccgaagagctccggattttcccgttacccgagaaacctcccttgcgccggaagcgggctgcggcacccttccggcgccgtttctccgcacctggacacgggaacttccggttactccaacgagggcaagcgtttcaacatatccctgatccgaacggctgtccggggcatcggctcggctaccgtcagaccgaccacctcccgcgcccgggcgatgtcgccgatcaaccggacgacctgatcgacggtcatcccgtccggaacgacgcccacggccgcaacgagatcggccggatcgagcacgtccagatcgaaatggatcagtaccttcgaggccccgcaactttccagccactctacgaccgcgcggctgtcgccggccacgtcctgcggagcgaggtgcgcgatgccgagctccctctgccgcgccctgatttcgtcgcgctcccaatcgcgcagaccgaccagcagcacgcgcgacgggtcgatgcgcgcaggcagttcggcaagtatcttcgcatcgccgagacccatgcaggccgcgagcgccatcgcatgatagccggaataagcgtcgccgggcaaggtgatgtcgggatgagcgtctatccagatcacggccgcgtcatccccgtacttcccggccagaaaggcgaacggagccgcgctgacggagcagtcgcccccgaacgtcacgatccggtcgggatcgccggcacgcagcatgctcacggcggccctcgtctgggcaacgatcgcatcgcggtcgagcactccgtccgtcacccggcgctccgcaatgccgtcggcgacgggaaccgtcagcgtttgcacgctgctgtgcggagccagaaaggcgagcagctgcgctcccagaaaatatcctctcgccgcatcgtcgggattccttatctcgggaacccaccggacgatgtcgccgccctgccactggggataaatcaggcgaaccgttctcttttcgttttccatatcgcgaaatctacaacaagataattaccatatcgatacgccaagagctcccgcatggaatctcacagtcgcggactgcggctacggaccgcgcgtccgatccgctttcccggcaccccttcgccgaaaggaacttcgtttcgggacgaaagcattgaaaattcgacagccggatacagcaagacatctatgcgggagttctataccgtatccgcagcacgtttccggaacgcagacagaccggcatgcgcacccgacccgcctggcgtgcgggacatatccggtccttcctgtggcgacagggcatccgcgacgccttcgtcatcgccggccccgttcccttcagtcccgccaaacgatccggggaaacgcgcttcgcaatggcttccggaccgcagggaacgaaatgccggcacgcgtcgtccccattcaaccgtatctcgatacgttgcgtccggaaaattgccgacccgcaagccccccgcactcaggagacaaaagacctccggacccggaattttcgccgagagccggaaagcgttccggatccgcgcccgaccgaaaggccggccgaacgaccgggagccgtcgggctcgaaagcaagagcggcaagcgttctttccgcacggcccgtcaccagcgcggtgtcatcgcattcggaaaataatgcaggtcgcattccccgtccggccgatactcgaccgtcaccaaatcgaactgcgtatccgtatcgaagccgtagagcgcgacataatgctcggtggcccgcatcagcgccgcgaacttgcggggcgtcatcgcctcctcgggcggcgagagcgcgccgctccggcggcacttgacctcgacgacatggagcacgccctcgcgcagagccacgatgtcgagttcgtaacgcccgctgcgccaattgcgatgcaacagctcgaacccgttggcaataagccattcggccgccgcctgctcgcccctcaggcccgcctcgcgcgactgcacggctaatccagtaagaaattcagatcgtcgccgggccgtacctcgtagggtgcctgccccttgcggaagatccgcatcggacgttcgcctatcagctcgatccgcccgttctcgacacgcaggatacatccttcgcgaagccctgcgaccgtcatgcacggattggcttcgacatactcgagcagccgctgttcgcgcgtctcgccggcatgaccgtcgggatgggcgtcggtatagtgcggattgatctggaacggaacgagccctgccgccgtgaacgtagccggctcgacgatcggcatgtcgttggtcgtgcagatcgtcggacaggcgacattgctgccggcgctccagccgacgtacggaacgccttcgggcaccctctcgcggatcaccctcagcaagccctgctcctgcatcgccttcacaagcgcgaaagtgtttcctcctccgacgacgatcgcctccgcctgcgacagcatgcggaccggatcgctctcgcgatgcaccgaacgcacatcgatgccgagttccgaaaaacgggcctgcactttggtcaggtaatcgtcataggaaaacgtcacggccgcataaggcacgaaagcgacctgccggacaccgccgaggaaatcggcgatctgccgcttggggtactcgagataagcctcgccggcattggtcgaattgctgatcagcaacaggcgcatcgatggttttctcttcatatcgcatacgtttagtttgtctatttccgcttcgatcacgagaggataatagcggtactccagagcgtgcaccttctcggccacccgctcgggcgtatcgcccggctcgacctccgtgcggtagcgggccacgatgtcgccgctgtcgtaatgttcgttgacccggtggatcgtgatgcccgtctcccgatcgcccgattcgacgacggcccggtgcacccggtcgccgtacatgcccttgcccccgtgccggggcaatagggaaggatgcacgttcagaatccggcctccgtaagccccgagcagattgtccggcacgagccacaagaatccggccaacacgatgtagccgatcccctcgcgccgcaatctctcgacgacccgatcgctattataaaaggtatcgcggtcgaaaatttccgtcccgatgccgagcctgcgcgcccgttcgagcaccggcgcgtcgggacggttcgacaggatcagcgtcacgcgggccttctctcctgccgcgaaataagaggccacattctcggcattcgtccccgaaccggaggcgaacacggctatctttatcataaacaacgatttacagaatcaaaacccgattaaatgcgcaaaaaacgcttcggatgaccaaaaataatccaaaaagtattacttttgcaaaaatttggctttgaaatagaagttatttttcggaataaacgcaattgtcaaacttaaactattggtattatgtcagacgtttcatcaaaagtagtggacatcatcgtcgacaagctcggcgttgacgctgccgaagtggttcccgccgcaagcttcaccaacgacctcggggccgactcgctcgacaccgtggagctgatcatggagttcgagaaggaattcgagatctcgattcccgacgaagacgctgagaagatcaccaccgtaggcgacgcaatcaactacatcagcgagaaaaagaagtaatttttcaggcctttgaaacaggcgtttgtcgaacgaattgaccgaagttctatgaaacaaagaagagttgtggtaacggggataggcaccatcaaccccttaggcaacagcattgaggaatatttctccaaccttgagaaaggtgtgagcggagcaggacccattactcatttcgacccttccaacttcaaaacgaaattcgcctgcgagctcaaaggctacgacgccgccagtttcttcgaccgcaaggagttgcgcaagtacgacctgtactcccagtatgcgctcgtcgctgccgaacaggccgtcaaggactcgggcgtcgatctggagaagatcgaccgcgatatggtcggagtgatctggggctccggaataggtggactggaaacgttctaccaagaggtaaagagctatgttgagggcggctttatccctcgatatagccctttcttcattccgaagatgatcgccgacctggctgccgggcacatctcgatgaaatacggcttccggggtcccaacttctgcaccgtttcggcctgctcgtcgtcgaaccatgcgatgatcgactcgctgaactacatccgctggggcaaggcggacatgatcctgacgggaggctccgaagccgccatcaatcctccgggagtgggcggattcaactccatgcaggctctttcgacccgaaacgacgagccgcagaaggcctcgcgcccgttcgatgcggaccgtgacggcttcgtgatcggggaaggcgccggagcgttgctgctcgaggaatacgagcatgccgtagcccgcggagccaaaatttacgccgaagtggccggcggcggcatgagcgccgacgcctatcacctgaccgcgccccatcccgaaggagtcggagcgaagaaatcgatgaccgacgcgatcaaggacgccggcatcgctcccgacgacatcgactatgtcaacacccacggcacgtcgaccccggtcggcgatttggccgaagtggccggcatcgtcgcttcgttcggagaccacgtatacgatatgaacatcagctcgaccaagtcgatgaccggacacctgctgggcgccgcaggcgcgatcgagggtcttgcctgcatcatggcgatcacgaaagggatcgtgcctccgacgatcaacgtcgagaacctcgatccgaagatagacccgaagatcaacctgacgctgaacaaggcgcagaagcgcgacgtgaagtacgcgctgagcaacacgttcggcttcggcggacacaactcgacggtcatattcaaaaaaatctgacggacgtgctcgaccggatacgattgtactggaagctgcatcacagcagggacaaggcgtattacaaggcactggacgagattttcggcgtctgcccgaataatatagagctttataagctggccttgattcacaggtcagcttctctttttttggacgacggcacgccgatcaacaacgagcggctcgaatttctgggcgacgccgtgctcgagtcgatcgtctcggactatctgttcatcgagtttcccgagcagaacgagggctttctgacgaagctgcggtcgcgcatcgtcagccgagcgtcgctgaacaagctggccgtccgtatcgggctcgaccggcacattatcacgcagggcaactacagttcccagcagaaaaacctctacggcgacgcgctcgaagccatggtcggagcgctctatttggacaaggggtacgatttcaccaacagattgataataaaccatctgttgaatcgatatatcgatttggtcgatatgaccgagcaggagaccgacttcaagagccggctgatcgagtggagccagaagaacaagcgcgccctgtcgttcgacacggtgccgagcccgctctatacacagaaaatcccgcactttcacacgagcgtctcgatcgacggacagccggccggcaccggcgagggacacagcaagaaaagctccgagcaaaaagccgctctgtcggctctgatccggctccgcgaaacgggcgagcacggcacggcggagcatatcgaagagtaaatgcccgccgcagggcatcacgatcaaagacctggtcatcatggaagatcacccgctttccgacaaacaggtccgggaaaagctcattgcccggggagcctccgcattgacggataccgaactattgagtattctgcttcacggcagcggtcccggcggcccggccaccgagctggccgggcgcctgctcgaccgcttcgagggcagtttggcgcgaatgggccggtgcagtctggcagaactgcgctcggccgagagtctgggcatcgcccgggccgccgtactgtccgccgcgctggaactgggccgcaggctgagagccgagcaaagccggtcactcgatcaggtacagaccgaccgcgacgtaatcgagatgttccgtccgctgatcgccgagctgccttacgaagaattctgggccctgtatctcaactcgtcgaaccgggtgctcgaccgtgtacgtattagccagggcggcgtatcggccacggtcgtcgaccaccggctgattgtcaagcgggccgtcgaaaagctggcccacgccgtgatcctcgtgcacaatcacccctcgggcagcgaactcccgagcgaggaggaccgcacggtgaccgagcgcgtcgcgcaagccgtctcgctgttcgacatcgcgctgctcgaccatatcatcgtcacgcccggcccctgttacagtttccgtaacgaaggctttttcgacggtagagattagcctcccctcggaacatttccaccgaaatcgctcaaaacgtcttccggcacggtgtcccgtgccgttttttgctttctgtcgttccgtttgtactctccgattcggcttcctgacttccttcatctcgtccagctccggacaagaccggtcctgtccgacccaatccgcagcccggcagccacgcttaaatccgctcttaagaaaccaaaccccgatcacaaaaaagtctccacggagtacgcggagacataggtataaaaccttcggcctatagccttattgtgataagatgtagaactcttatgcttcaaatataataaaaaagccttgaaattgcaaaattttatttaattttactataaatggacgccgatatgacaaaaatattaggattggacttaggaaccgcctcgatcggatgggctctcgtagagcggaacgacacgggatatgccttgctcgaccaaggggtagacatctttcaggaaggcgtggcacgcgaaaagaacagcgagaagcccgccgtgcaagaccgaaccgcagcccgcgccctgcgccgtcattatgcccggcgacgattgcgcaagatcgacctgctccgtgtgctcgttcgccacgacctctgtcctgctctgaccgacgaacaactgaaagattggaaacagaagaaaatctatccgctgacggacgagtttatccgctggcaacgaacggacgaccgcacggacaagaatccctaccgcgaccgctacaaggcgctgaccgaaacgctcgatctcgacacgcaaagggaccgttacacgctcggccgggccttatatcatctggcgcagcggcgcggattcctgagcaatcgcaaggatgccggcgacgaaagcgagagcggtaaggtccgacagaacatcgaggacctgacggtcgacatggagaaggccggatgcgcctacctgggcgaatacttttatcggctttacgcccgaaaagagaaaatccgtacgaaatacacctctcgcaacgagcactatctggccgaatttcgggccatctgcgaaaaacagcggctcgccgacgatctgaggaaggcattgcaccgcgccattttctaccaacggccgctgaaatcgcagaagggatcggtcggccgatgcacgttcgagaagggcaaaagccgctgcccggtatcgcatccgcgattcgaggagttccggatgctctccttcgtcaacaacatccggatcacgacgcccgacgacccggaacctcgtccgctctcgcgacaggaaaccgaaacgatcctgccgcttttcaggcgcagaaccaaatcgcacttcgatttcgaggagatcgccaagaagctcgccggcaaaggccgatacgcctgccaaggagaccgtagcgaggcgccctatcgcttcaacttcgcgcggacagccaccgtcacgggatgcccggtcacagcttccctcattgcgctgttcggcgacgactatctgacgaaaatatgcgacctgtatacgctcggggtcggaaagacccgagaacagatactcggcgacgtatggcacgcgctcttctcgttcgacgacgaagaacggcttagcgcgtgggcaaagcagaaactgcgcctctccgacgacgaggccggacgcttcgccgccatccgcctgccgcaggactacgccgcgctgagcctccatgccattaacaagattctgccctacctgcgtgaaggttatcgctatgacgaggcggttttcgtcgccaacctcaaggcggtgctgcctccggacatctactccgacgaatcggaacgaagcgctatcgaagccgacatcgccgcgctgataaccgatttccgacggaatccgctgaacaggggaacgaccaaggagcaatgcgtccgcgactatctgcgcaactgccggggcatcgacgaaaaacgcctcgggcgcctctatcatccgtcgatgatcgaaatctatcagacggcgcagcccgatgcgcagggcatcctgcaactgggctcgccccgaacgccggcagtacgcaatccgatggcgatgcgggcattgttccgcttgagggtcttggtcaaccggttgctgcgcgacgggaaaatcgatcgcgaaacgaagattcacatcgagttcgcccgaggactcaacgatgccaaccgccgcaaggctatcgagctgtaccagcgcgaccgcgaggccgagcgcaaagcgtacgccgacgaaatccgccggcaatacgcctcggaatcgggccgggagatcgaacccaccgacgacgacatcctgaagtaccgtctatggaaggaacagaaccacatttgcccctatacgggcaaacagatcggcctgtccgacttcatgggcgattccgcgcgtttcgatatcgagcataccgtcccccgagcgaggggaggcgacaactcgcagatgaacaagaccctctgcgagagccgcttcaaccgcgaactcaagcgcgacaagcttccgtccgaactcccgaatcacgccgacgtcatggcaaggatcgacgaattcgggtggccggagaaaattgccggcttgcaaaaacagatcgagatacagaggcgcaagagcaaaagcgctacgaccaaatcggaaaaggacggagccatacagcgccgccacgtcctgcaaatgcagctcgactactggcgcggcaagtatgagcgtttcacgatgacggaagttcccgacgggttcagcaaccggcagggagtcgatatcggcatgatcggcaagtacgcgcgactctatctgaagacggttttcgagcgaatctatacggtcaaaggcgccaccacggccgaattccgccggatgtggggattgcaggaggaatatgcccggaaagagcgcgtgaaccacacgcatcactgcctcgacgcgatcgtcatcgcctgcatcggccgtaacgaatacgaccgctgggcgcagtacgcgggcgacgaggagcgttacaggcggggcgaaggagcgaaaccccgcttcgaaaagccgtggccgacttttaccgaagacctcgaggccgtcgccgacaggcttctcgtcgcgcatcatacgcccgacaatatgcccaagcagagtcgcaagcggctgcgcatccggggcaggatacggaccggcaggaacggcgagacgctctatgcgcagggcgatacggcccggggagccttgcatcagcagaccttttacggagccatcgagcgtcaaggagaggtaagatacgtcgtgcgcaaaccgttggggcagcttcagccgtccgacgtggataatatcgtcgacgacgcagtgcggcaaaaggtcaaggaagcgatcaaggcggtcggtttcaagacggccatggacacggagagccatccgatctggatgaacgagcagaagcgggtgccgatccgcaaggtgcggatattcgcgggcaaaaatatatctcccaaacccttgggcggaaagaagcaccgggacctgtccgcccttccgcacaaaagaccggtttacgtatcgtacggcagcaactattgtatggccatatacgaaggaaaagacaatcaaggaaagctcaagcggaccttcgaaatcgtcagcacgctggaagcggcgcagtatttcaaggcgagcgcggacaaggcggcgcgacccgatctcgtcccgcaatcggacgcgaacggctttccgctgaagtgcattctgaaaaccggaaccatggtgcttttctatgaagaaacgcccgaggagctgtacgaatgcacgcaacaagagttggctaaaagactgtacaagctgacgaaattcagttctatgaccaccggcaacaactcttacggcttatgcaccttcagacaccatcaggaagcccgtcctgcgggggagttgaagcccaaaggcggagcatggaaagccggagaggcataccgccccctcatcagcttataccatacccaactcaacgcttatgtcgaaggcttcgacttcgagctgagcgttacgggaaccgttcgattcaaacacgaatagccatgctcaagcgcacgctttttttcgccacgcccttctgcctgagtctgcgagacaatcagttggttatcgcgacgaaagaggctcccaacctccggaaaagcgttccgatcgaggacatcggcgtcgtcgtgctcgagcaccggcaaacgatcgtcacgctcccgctgctgaacgccctgtcggatcgcaacgtagccgtcgtcttttgcgacggcaaccggatgcccaacgccatgctgatgaatctcgactccaaccgaacgcagggcgagagctaccgggcgcagatcgaagcgagcgagccgctgaaaaagaatctgtggaagcagatcgtcgaagcgaaaatccgcaaccaggccgccctgctgcgcaagctgggcaaagacggagacaaactgaaaccctgctacaagaacgtcaagagcggcgatgcggataatcgcgaaggagccgccgccagaatatactggtcggagcttttcggcagggagttcgtccgtattcgcgagggcgcggagccgaacaatctgctgaattacggctatacgatcctgtgcgcggccgtagcccgctcgctgatgggctcgggtctgttccctgcgttcggcattttccaccggaaccgctacaacgcctttccgctggccgacgacgttatggaaccctatcgcccttacgtcgacgagctggtctgccggctgtatctcgagaataaaacgcagttgacgcaagcggtcaagggcgagctgctgagcctgctgtatgccgatacgcgattcgaaaaggtattgcggcctctcgacgtggggttgaccttcacctcggcatcgctggcgcaatgtttcacgggaatacggaaaaagatcgcgtttcctctactggagtaaaaaagatgtctgaattacgcctgaacgcctatcgtatcatgtggctattcgtatttttcgacctgccgacccataccaaaaccgaacggcgccacgcggcccagtttcgcaaggcattggaaaaggacggcttcgcgatgatgcaatactcggtctacgtccggcactgcgtctccaaggaaaatatggaggtccatatccggcggatccgcaaatcgatgccgccttccggaatgacgagcatcctgagcgtaacggacaaacaatacggcgagattttgaatttctggggcaaggtcgaacgcgccggtcccgaaatacctcaacaactggaatttttttgatatatttgttttgcagaacggaaaaactgcatcgaatcgacttcctcagttcgccgaacatcgcttttttcgcggcacatacgaatgtaatacccttataatcaataagtgtagtacctgaggttgtgatttgatgtagaaattggatactatacaacagagtgggcataacctgcttggagatcggagttgtgatttgatgtagaaattggatactatacaacagcagcttcagaacgacccgctcatcacctgttgtgatttgatgtagaaattggatactatacaacctttcgtatctcgattattactatgaatccgttgtgatttgatgtagaaattggatactatacaacactatcaagcatgtgttctttcaggagttgttgtgatttgatgtagaaattggatactatacaacgctcggactgcgtatagcccacctcgagcggttgtgatttgatgtagaaattggatactatacaacagatcagcgagatactgaccatcgtcaacagttgtgatttgatgtagaaattggatactatacaacaggcgaggtgcacatcagaacatcgatctagttgtgatttgatgtagaaattggatactatacaactcgagcttccgaacccggaggaccggtattgttgtgatttgatgtagaaattggatactatacaacttagcagttgagcggccgcaggaaaggacggttgtgatttgatgtagaaattggatactatacaacttcagcacggaaagcgtgatacaaggaatagttgtgatttgatgtagaaattaaatactatacaacgacggggcgtgtcagacactacccaaatgcgttgtgatttgatgtagaaattgaatactatacaacggcaacttaagtattttaacccgattgccgagcactagtacgatatggaataaccgcagcatcggaccggagaccgggaaccacagcgggagtgcggaaattatccgtcagtttataggtcgtggtacggggcggacgctcgttgccgatgagcaagcggtttcttgccgaccgaaaagtaatgggaacatgtttgccgcgcaggaaggatcaccgcttattgtttgggagacgatgcgacaaattcggcgaatatgacaggccttatgaaaatgccggaagaagcgcacatgcgataggacagaaaaagcgaatacatgagacttacgacacacacgggaatttacaggaatattgccaaggcgactattctcatgtaagtcctggcggcatccaaagtttccgtaatgctcgggacggttcgtactacgtccctgccggacattaccggttgccataaaagactgggctttaacaggtaacattagtacagcatacggcctccggagggctgtccctgtcgaaaagggcggtaagaatagaaacaggcataatcccggataaaaacggcgacgaacgaagatacgacaaagcggagagcgcgacaaattccgtcgtgtcattggaatccgatcggacaccgggaacatttcgggaataatcaaaaaaagaacggcctctcgggcatctgagaggccgttcttgtacccggagccgggatcgaaccggcacggattgctccactggtgtttgagaccagcgcgtctaccgattccgccatccgggcctgagacgcggcgcgttcagagggcaaagatagcgttttattgattatctgcaatacagagccgacggttttcacccgaagccgtcgggtaacggcacggaacgcctcgggaccggacggaaacgggccgtaccgacgaggccggcttccggatcagtcgatgcgccggatatcggccccgatggcgttcagccggccgtcgatgttctgatagccccgatcgatctgctcgacgttctggatcacgctgcggccgtcggccgacatggccgcgatcagcagggcgacgccggcccggatatcgggcgacgacatcgtcgtagcgcgcagccgtatcttgtgatcgtgcccgatcaccgtcgctcggtgcggatcgcacagaatgatctgagcgcccatgtcgatcagcttatccacgaaaaacaggcgactctcgaacatcttctggtgaatcagcaccgaccctttggcctgcgtcgcaacgaccagaaagaccgacagcaggtcgggcgtcaacccgggccagggagcgtcggctatgttcatgatcgagccgtcgatgaaactctctatttcgtagtggtcgtggcgcggaatgtagatgtcgtcgccccgctgctcgaactgtatgcccatgcgggcgaactgggccggtatgatgcccagattctcgaacgacacgtcgcggatcgtgacttcgctccgggtcatcgcggccatgccgatgaagctgcccacttcgatcatgtccggaagcagcgtatgcgtcgttccgtgcagtcgctccacgccgtcgatgacgagcaggttcgacgcgatgcccgagatcagcgcgcccatgcggttcagcatccggcagagctgctggacataaggttcgcaggcggcgttgtagatcgtcgtgcgcccctcggccagtacggcggccatcacaatgttggccgtgccggtcaccgacgcctcgtcgagcagcatgtagcagcctttcaggcggcggccctcgacggaaaagaaattggtccccgtatcgaagtcgaactcggcgcccagcttctgaaaaccgaggaaatgggtgtcgagccgacgccggccgatcttatcgcctccgggcttgggaatatagcccacgccgaagcgagccagcagcgggccgataatcattaccgaaccgcgcagtcgggcggctcgctggcggtaatcctcgctttgcagataatcgaaatcgatgtcgcgggcctcgaacgaataagtgctctcgtcgatccgctcgacgagaacgcccatgcgccgaagcaactcgatgagctgcattacgtcgacgatcgccggaatgttccgtatagtcactttctccggggtcagcagcgtggcgcaaattacctgcagcgcctcgtttttggcgccctgcggcgtgatttcgccgcacagcggcgttcctccccgaacttcgaatgtagccataaccaatcggtcggttcgcggccgaccatgccgctttcggtttaaaactcatcaaatataggcattgccagccaatattcaaaaaaatgattccgcctccgcgcggagcggaaacggccgttcgctaccgcatccggcttgaaactgcgtcggctacatgacaagaaactcggagacagaatcgtcgcaacaccctttctgtcgtatcggacgcaaaatcccggcacggcgatttcgggacggttcggtccgaagaacgacgccgacctgagccgcagcgcttttccgactaccgggccgcctgccagaagaaacatcccgtatcggcccggcaaccggaccactccgcgaacatccccggaaaactccgacaggcgacacggcgaagaaaaacggaacaaaaatgtgcacgacaaaatatttccccgaaacaatccgtacatttgcactaatgacaacgaaaacataccgaaaatgaaaacaatgcgttggagcggatggatgacggcgatcgtcgttccgctcgtatggtcgtgcagcgaccgccatgtgcgagaaattccgctcgaggagtttttccgcaattccgaagtccgttcctacgacatctcgcccgacggcaagtacctttcctatatggctccttacgaatcgaggatgaacatcttcgtgcagcaggcgggttccgactcggcgcggcgaatcacctccgagaccgaccgcgacatcgccggatacttctgggccaacaacgaccggttactctacctgaaggacaccggcggcgatgagaattaccagctctacggcgtcaatctggacggcagcgacccgaaggcctacacggcgattcccggcgtgaggacgcagatcatcgatccgctcgaagagatcgattcgctgattatcgtcagcacgaaccagcgcgatccgcagatattcgacccgtaccggctcaacctcaacacgggcgagatgacgctgctggccgagaaccccggcaacattcagggctggatgaccgatcacgacggcaagttgcgggtcgcctatgcgatcgtcgacggcgtcaacacgcagattctgtaccgggagacggaacaggagccgttccgtccggtgctgaccacctctttcaaggacgaggtaagcttttacgtgttcacgcccgacaataaaatggtctatgcgacgtcgaacatcggacgcgacaaagccgcgctggtcgtagtggaccctgcgaccggacaggaggtcgaggaactctatgcgaacgatctgtacgacgtaatcgggttgggctattcgaaagcgaaggaaaagctgaccggcgcctattgcgagggaccgaaggacgtgatccgccatttcttcgatccgcagaccgaggagtcgttccgcaagctgcaagctcaacttcccggatatcaggttagtacgaccgcaacgaacaaggccgaggatatgaagatcgtctatgcgggcaacgaccgcacgcgcggcacgtattacctctacgatgtaaaggccgacaaactgacgaaaatcgccgatctggcgccgtggattcaggccgaggaaatggccgagatgatacccgtcagctatccctcgcgcgacgggctgacgatcgagggctacctgacgctacccgcaggactgacgatggaaacggcccggcagctaccggtcgtcgtcaacccgcacggagggccttgggcccgcgacagctggggttacaaccccgaggtgcagtttcttgccaaccggggatatgccgtgctgcaaatgaacttccgcggctcgaccggctacgggcgcaagttcaaggaactctcgtacaagcagtggggacagacgatgcagaacgacattaccgacggcgtacggtggctgatttcgcagggaatcgccgactcgacgaggatcgccatatacggcggcagctacggcggctatgcgacgctggccggcctgacctatacgcccgacctgtacgcctgcggagtcgactacgtgggcgtgtcgaatctgttcacgttcctgcagacgatccctccctattggaaaccgatgctcgacatgatgtacgaaatggtgggagacccgcagaaggacagcacgatgctggccgcctattcgccggcgctcaacgccgacaagattaaggcgccgctgctggtcgtgcagggagccaacgacccgcgcgtcaataaggccgaatcggatcagatggtcgccgcgctgcgcgcacggggagtggacgtggactacatggtcaaggacaacgagggacacggattccataacgaggaaaaccgcttcgcgttctaccggacgatggagcgtttcctcgcaaagcatctcaaaggcgagcagatagatgccgtgatcgaagaagaagctccggcccccgccgaggccgattcgatggcccgataacttccgccggtcggaatttcgagaaggcattcttaaaaaagagtaagatgtccctcaaaatcgtataacaaaagaaatatgatgaaaaacaaccattgtgtcatcgcattatccgctgccataatttccttatcttatgtaaactgtcaggatgcacggcatggacggcaatacaagattataaaggacatagcggaattgcagaacaccgaatcgctggacgaggcggatttgtcgtcgttggatttgagggattgcgaagatttgtttttggggaaaacggggtttgacgagaacggggttaaacaatggacagaccgtgtgatatggcccgaaacgtcgaaaatgccggaaggcttcgacccgcaagaacttcttgaagcgtcgaaaatgccgaagaatgttgccggactgcacgcgaaaggaattaccggcaaaggcgtaaagatcgctatcatagaccaacggttattcaaagagcatccggaatataaggaccggatcaaatattacgaagtattcggcgataactggcaacaggacggtatcgactatcacggcagtctggttaccggagtagcggcgggcaaaagcaccggtacggctccggaggccgatatttattattttgcggcgaataattggccggacgataaatcgcagccgaataccatgcgcacgatcaatcaagcgatccggaaaatcatagatatgaacaagacgtttccggagcgtgaaaaaatacggttcatatcgatgagcagcggcactcccgacgacgcgttcgccaaagaacgcgaggaattgttcgacgaagcggaacagaacggcataatggttctcggcggtttctacaaacatacgatgcgcaataattctttcgacataagatatggattcgtaggccgggggctcggaatacctacggacggaaaaacgaatccgtattttgacggcggatacgcttacgaacgtttgggaggggccagttctacgtttccctatctggccggagttttcgcaatggcattgcaggataatcaaaatttcacacgattgccgcattggcaggatcaactgatgaaaatagcgtacgacaccgctgtcgactctgtcgtcaatcctgaggggatcgtcgaagaagtatcccgtattgcccaaacgctacaataaatcggcgaagtcaacggatttccgccacgagccgatcgagtgccgggctgtaatttttccgtttatttgaggcggcaatgcattttgccgcctttttcatattcgtatcttaccggtattcaactccttgtataaaatccgaatttgatatctgacgatacattcggggctattctttaccgggatagtccgaaagcgaatctcgttacagggaggatcaacgaaatgccgaaacagttcgattcgtatgaattttgcagagcccgatttacctctgaaaatccgttttaagtacgaacggaagggtttcgttttcagtcaacgaaattgccttctctcccggcttcactgatctatggttttcataagcttatccgtcaggattgcagtaacgatgccaatccgatctttgtctttctaatctgaattttccatctcctcatcaattgtttgagactatgaacatcaacacatgaaacggaaaatagcgccgttgtcatgtcgtcattttatctcggttaaatctgaccaaccaataattcttttgaaaagggcgcttttctgctttgcggctataacgaccagaacggattcgaggaacgcccggactgttttccgaatcggaaccggttcgtcggggttgccctgcagaccgaatgcgtcttgccggaagacgtctgccggaccggaagatccgttgtgacgatgacgggaaagcgatcggtccgacaaaaagcgcccccggtttcaatcggaggacgctcttcatctgttgttcgccggttcgcagcgctatttccggacggatgcctcgtagacccacgagccctcgaacatgacctcgtactcccgtttcttctgtacggcctgccgctcggagtcggagccgaagatggaaatcagaatccgtccgttgggctggggcagtttttcataaggtagcgaatcgtccttcttccgggcttccgcaatgaagcggtcggcattctgttccgtgctgtacgccccgacgatcacgtagtagcgcttttgtccggcggccggaacgctgggaacagagggcgtaagctccttggccggcacgacattcccggcagccgtgtcagcctctgccccggacaatgaggccggagacgacggcaaattgtcctcggctgcatcgccggcctcggagggcgcggtcgccgtccggggcgtccggggcggataaggcgcatcgcgactttcgagccatgcgatagccccgaccgatatgcccgcgccgaccaccacggccagaacgacccaccataagagcccgttgccgcttcccttacggggcaaccgcatcggagcggtcccggccgggttgagcacgacggccatctgcggggcaggacgaaacgttccctcgctgacaaggccgaccgaatcgatcgtcacgccctcctcggagctcacctgagcgagccacgaattatacgtctgctgcgcgtcgtcgcgatccgtctcgccgtagcgggcaagcaaatcgatcacgtccagaaagccgggctgcgcatcgggcagcagctccacccggttcacggggggaaccagcgtgttccgctcctcggtccgggcgaccgacgtcacgacatgcagcgcgccgacgcccggcaggttgatgccttgccgcttggccagtgcattgaatacgagtacgctgacagggtccattatctcttggttttaggtagttccacggcggggcgtctgcatgcccggtacaaaatgactatgcccagtacgatgaacggaatgctgagccattggcccatgttgagcgtcatcgtccgctcgaactcctcctgcggattcttgatgaactcgaccagaaagcggaatccgaacagatagatcagaaaaaaaccgaacatcaggcccggacgacgcagtgcaagcttggggccatagtacatccagcacagaatgccgaacaggacgaggtaggccgccgcctcgtaaatctgcgtcgggtgcatcggctgcgtctccccgg

SEQ ID NO: 4561 - DNA, 23651 bp, synthetic construct
  source 1..23651: mol_type = other DNA
  misc_feature 1..23651: note = Synthetic
gcaaggctaaccaaatggtgcgcggcgttgtttctcttcctcacggaacaggcaagcaggtacgcgtattggttttgtgcgccacagaggcagatcaagctgccgcaaaagaagctggagcagactacgtaggtttggacgagtatattgagaaaatcaagggcggctggacagacgtagacgtaatcatcactcaacctgctattatgggtaaaatcggtgctctcggtcgcatcctcggccctcgtggcttgatgcctaacccaaagagcggcacagttacaccagacgtagcaaaggcagtgaaagaggtaaaacaaggtaagattgactttaaagtagataagaacggtatcgtacacgcttctatcggtaaggtttccttcacggcagaccaaatggcagaaaacgcacgcgagtttatcaacacgctgattaagttgaagccggccaccgccaaaggtacttatatgaagagcatatatctttcgagtacaatgagctcaggtctgaagatcgatacaaaatcacttgatgtgtaacgaatttttaaattaagagaatcatgagaaaggaagataaagcgataataatagagaaaatcggcgagactctcaaggagtacagctgcttttatctcaccgacactaccagcatggacgctgagcagacaagtgcgttccgtcgcgcttgcttcaatgcggaagtgaagatgatggttgttaagaatacgttgcttcacaaggctttagagcaattggaaggcgattattcagaattgtatccagcgttgactggaacaactgcaatgctgttctcaaatgtaggaaacgctcctgccaaagcaatcaaggagttccacaagaaaggatcagagttgccagttttgaaggccgcttatgtggaagaaacagtttatatgggtgctgatcagctcgacacattgtcgaagatcaagagcaagaacgagctcatcgcagaggttgttgcattgctccagtcaccagccaaaaacgttgtttccgcactgcagtcgtcaggcaacaagttgcatggtattcttgaaacactctctaacaaataataaacaaaaaaataacaataaaaaattatacaattatggcagatttgaaagcatttgcagaacaattagttaacctctcagtaaaagaagtaaacgaacttgctcagattttgaaagacgaatatggtattgaacctgctgctgcagctgtagctgttgctgctggccctgctgccggcgctgctgctgaggaagagaaatcagcattcgatgtagtattgaagagcgcaggcgcttctaagcttcaggttgtaaaggccgttaaggaagcttgtggtcttggtttgaaagaagctaaggacttggtagacggtgcacctagcacaatcaaggaaggtgttgctaaagctgaggctgaggctcttaagaaacaactcgaagaggctggagctgaagttgaacttaaataatattgcctgaaattcaggtaattaggttaagaatcccctataaagtcgattcttaacctttttgtgttattttcaatttcgggttcaattaatattatttttatgtcagtttcaacagtaaaaccacgcgtaaatttcgcctccgtaaagaatccgttgcccttccccgactttttggagattcagctgaagtcgtttcacgatttcttgcagctggacactccgttagagaagagaaagaacgagggattgtacaaggtttttgcggaaaactttccaattgccgacacaaggaataactttgtgctcgaattcttagactattacatcgacccgccgagatatacgatagaggaatgtcttgagcgcggcttgacatatagtgtgccgttgaaggcaaaattaaaattatactgtacggatcccgaccatgaggacttcgacaccgtaatccaggatgtttatcttggaccgattccgtatatgacggaaaagggcacatttgtgatcaacggtgcggagcgcgttgtcgtgtcgcagctgcaccgttcgcctggtgtgttcttcggacagagcacacacgccaacggaaccaaattgtattcagcacgtatcatcccgttccgtggctcatggatagagtttgccactgacatcaataatgtgatgtatgcctacatcgaccgcaagaagaaattgccggtaacaacattgttgcgtgccatcggtcttgacagtgataaagacatcatagaaatctttggtcttgctgaggaaataaaagtaaacaaaacgaacctgaagaaatgcattggccgcaagcttgccgcccgtgtgttgaaaacgtgggttgaagatttcgttgacgaagacaccggcgaggtggtttcgattgagcgaaacgatgtggtcatcgaccgcgagaccgttatcgaggaggagcatatccaggaaatccttgattcgggacttcagaccatccttctgcacaaggaggatgtagacatgagcgactactcgattatcttcaatacactccagaaagactcaagcaactctgaaaaagaggctatcaactatatctatcgccaattgcgcaacgcggagccaccggacgatgcgagcgcgcgtgaggtgatagccaaccttttcttctccgagaagcgttatgacttgggcgatgtgggccgttaccgcatcaacaagaaattgtcgcttacagtgccggaggaggtgaaagtgttgactaaggaagacatcatcgccatcatcaagtatttgattgagcttatcaattcgaagtcggatgtcgacgatatcgaccacctttcgaaccgtcgtgtgcgcacagtcggcgagcagctctacaaccagtttggagtgggtcttgcacgtatggcgcgtacaatccgtgagcgtatgaacgtccgcgacaacgaggtgtttactccgattgacttgatcaacgctaagacaatctcttccgttatcaatacgttcttcggaaccaacgcattgtcgcagttcatggaccagaccaacccgcttgccgagattactcacaagcgaagaatgtcggctctcggtcctggcggtttgtcgcgtgaccgtgccggatttgaggtgcgcgacgtgcactacacccactacggacgtctttgcccgattgagacccctgagggtcctaacatcggtttgatttcgtcgttgtgtgtgtttgctaaaatcaacaacctcggctttatcgagaccccttaccgcaaggttgagaacagcaaggtggatctcgacaacagccatgtcacttatctgacagcggaaatcgaggaaggtcagatcatcgcgcagggcaacgctccgcttaacgatgacggcactttcgtaaaaaacaaggttaaagcgcgtcttgacgccgacttccctgtggtagcaccggaagaagtgcagcttatggacgtgtcgccgatgcagattgcctcaatcgccgcatctttgattccgttccttgagcacgatgatgccaaccgtgcgttgatgggatcgaacatgatgcgccaggctgtgccgttgttgcgcagcgaggctcctattgtcggcacaggcattgagaagcagcttgcccacgactcccgcacacagattatggcagagggcgccggtgtcatcgagtttgttgacgccagcgttatcagaatccgctatgaccgtactgaggacgaggaattcgtgaatttcgaggactcggttaaagaatatatcattccgaaattccgcatgaccaaccagagcaccacaatcgacttgcgtccaatctgcaagaagggacagcgcgtcgagaagggaatgattctgacagagggttatgccacggaaaacggcgagctcgcactcggccgcaaccttaaggtggcgttcatgccatggaagggttacaactacgaggatgcgatcgtgctcaacgagcgcatggtgcgtgaggatatccttacgtctgtccacgtcagcgagtactctcttgaggtgcgcgagacaaaacgaggaatggaggaacttacgtcagacattccaaacgtcagcgaggacgctacaaaggatctcgacgagcgcggaattgtccgtgtgggcgcacacgttgtgccgggcgacatccttatcggtaagatcacacctaagggcgagagcgacccgacgccggaggaaaaacttctccgtgccatcttcggtgacaaggccggcgatgtcaaggatgcgtcgttgaaggcttctccttcgttgaagggtgtgattgttaagaccaacctttatgcaaaggcacagaagaagaagggcaaggcggcaaaccttgagcttcagcagatggacgaggaattcgaacagcgtcaggtggctttgaaggcacgtcttatcgagaaactcatcacgcttaccgacggcaagacttcgcaaggcgtgaaggacttcctcggcacagaggttattcctaagggcgagaagtttacggcagagtatctgaagggcatcgaggaattcgacaccatcaacctcagcaagtggacaacagacgctcacaagaacgatatgatccacgacacgatcatcaactacctgcgcaagtcgaaggaaatcgatgcagaattgcgccgcaagaagtttgacttctctatcggcgacgagcttccttcaggcatcatgcagcttgccaaggtttatgttgccaagaagcgtaagatcggtgtcggtgacaagatggcgggtcgccacggtaacaagggtatcgtttcgcgcgtagtgcgtcaggaagatatgccgttccttgccgacggaacgccagtggatatcgttttgaacccgcttggtgtgccgtcacgtatgaacttgggacagattttcgagaccgttctcggatgggcaggccgcgagcttggcgagaaattcgccactccgattttcgacggagcgagcctcgacgacctcaattcatggaccgacaaggcgggagtgccacgctatggtaagacatacctttacgacggcggcacaggcgagcgcttcgaccaaccggcaaccgttggtgtaatctacatgcttaagctcggccacatggttgaagacaagatgcatgcccgcagcattggcccgtactcattgattacgcagcagccactcggcggtaaggcacaattcggtggacagcgtttcggagagatggaggtttgggcgcttgaggcattcggcgcatcccacattcttcaagagatcctgacaatcaagagtgacgacgtggttggccgcagcaaggcatacgaggcaatcgtcaaaggcgagcctatgccaactccgggcatacctgaatccttgaacgtgcttctgcacgagcttcgtggtctgggacttagcataaacttggaataaaacgacaaaagaatatggcattcaataaagataatagaataaaaagtaacttttcgaagattacgatcgggcttgcttcgccggaagaaatccttgagcggtcatacggcgaggtgctcaagcctgagacgatcaactatcgaacttacaaacctgaacgcgacggtctgttctgcgagcgcatttttggtccggtaaaggactatgagtgccactgcggaaagtacaaacgcatccgttacaaaggcatcgtctgcgaccgttgcggtgtggaagttacagagaagaaagtgcgccgcgaacgtacaggccatatctctttggtcgtgccggtagcccatatctggtatttccgctcattgcctaacaaaatcggttatcttctcggcttgccgtcgaagaagcttgattctgtaatctactacgagcgctatatcgtaatccaaccgggagccgcagccgagcttgagggtcatgaggaccttgctcgtctcgacctcctttcggaagacgaatatcttgaaatcgtggacaagttgccgcgcgagaactcgatgctcgaggactcagaccccaacaagttcatctgcaagatgggtgccgacgcaatctacgatttgttgaagagcgtagaccttgacagcctttcttacgagttgcgccaccgtgccgacaccgacacgtcgcaacagcgcaagacggaggcattgaagcgtctgcaggttgtagagtcgttccgtgcgtcgaaaaaccgcaacaaaccggagtggatggtgctgaaagtggtgcctgtcactcctccggaattgcgcccgctcgtaccgttggacggcggccgtttcgccaccagcgacttgaacgacctttatcgtagagtcattatccgtaacaaccgcttgaaacgccttatcgagatcaaggcgccagaggtgattctccgcaacgagaagcgtatgcttcaggaggcagtcgactcattgctcgacaactcacgcaagtcaagcgttgtaaagaccgagagcaaccgtccgttgaagtcactcagcgacagcttgaagggtaagcagggacgtttccgtcagaacttgctcggtaagcgtgtcgactactcagcgcgttcggtaatcgttgtaggtccggaattgaagatgcatgaatgcggtttgccaaaagacatggcagccgaactatataaaccgtttatcatccgcaagcttattgagcgcggcattgtgaagacagtgaagagcgccaagaagattgtggaccgcaaggagccgattgtatgggatatccttgaatacgtgatgaagggtcatccggtgcttctcaaccgtgccccgacacttcaccgtcttggtatccaggcattccagccacgcatgatcgagggcaaggctatccagttgcacccgttggcatgtacggcgttcaacgccgacttcgacggtgaccagatggcagttcacttgcctctcggcaacgaggcagtgctcgaggcgcagttgctgatgctcggtgcgcacaacatccttaacccggccaatggtgctcctatcaccgtgccgtcgcaggatatggtgcttggtctgtactacatcaccaagctccgcaagggcgacaagggcgagggtcttgtgttctacggaccggaagaggctcagattgcatacaacgaaggcaaatgtacgcttcacgccataatctctgttgttgtcgacgaccttgacgaaaacggaaacctcgtgaagacaatggttaaggaaacgtctgtcggacgtctgctcttcaaccagaacgtgccagaggagatgggctatgtcaacacattgatttccaagaaatcgttgcgcgacatcatcggcgccgtcatcaagcgttgcggtgtggttcgttcagccaagttccttgacgacatcaagaacctcggttactacatggcattcaagggcggcttgtcgttcaacttgggcgatgtgcttatccctgccgagaaggaagaatacgtaaaagaaggttacgcgcaggttgaagaagtgatgaacaactacaacatgggattcatcaccaacaacgagcgctacaaccagattattgatatttggacgcacgtcaactcccgcttgacaagcacattgatgaagcagcttacagcagccaaccagggcttcaacccaatcttcatgatgcttgactcaggagcccgtggttctaaggaccagattcgtcagctcgccggtatgcgtggccttatggccaagccgcagaagagcggtgccgagggcggtcagattatcgagaacccgattttggcgaacttcaaggaaggcctttcagtgttggagtacttcatctctacccacggtgcccgtaagggtcttgcggatacggcattgaagaccgccgacgccggttatcttacccgtcgtcttgtcgacgtagcccacgacgtgattatcaccgaggaggactgcggcacgcttcgcggacttgtctgcacagaacttaagaacaacgaagacgttgttgcaactctcagcgagcgcattctcggacgtgtgtcggttcacgatgtgatagacccattgacaggcgacatcatcgtgaagagcggcgaggaaatcaacgatgcagcagcagagcgtatcgagaagtcgccgattgagtcggttgaagtgcgttctgtgcttacctgcgagtcgaagaagggcgtctgcgccaagtgctacggccgcaacctgtcgaccaaccgtatggttcagaagggcgaggctgtcggcgtaatcgcggcacagtcaatcggtgagccgggtacgcagctgaccctccgtacgttccacgtcggtggtgtggcatccaatatcgcagccgtatcgtcagtgacatcacgctacgacggtgtgcttgagattgaagagctccgcacggttaagacagaggactgcgacgtagttgtaggccgtctggcagaaatgcgtatcgtcgacgccaatacgggcatggtgcttacaaacaccaacatcccttatggttcgaaactttacttcggcaacggagcaacagtcaagaaaggcgacgtaatctgcgaatgggacccgttcaacgccgttgttgtcagcgaggttgccggtaaggcacaattcgtcaacgtgattgaaggtgttacttaccgcaaggaaaccgacgagacatccggtttgcacgaaaagattatcatagagtcgaaagaccgcaccaaggtgccggaggtcagcatcgttgacgctaacggacaggtgctgaaaacatattcattccctgtcaacgcccaccttatgattgaggacggcgatgaaatcaaggcaggtcaggtgtttatgaagacaccgcgcgcatctggtaacgcaggtgatatcaccggtggtcttccacgtgtcactgagctcttcgaggcacgcaacccgtctaacccagccatcgtttcagaaatcgacggcgaggttatgttcggaaaaatcaagcgcggtaaccgcgaaatcagcgtgacatcgaagattggcgaagtgaagaaatatctcgtgccgttgtcgaagcaaatcctcgtacaggaaaacgactacgtgcgcgccggcacaccgctttcagacggtgcaatcactccgtcagacattcttaacatcaagggcccgacagccgttcaggaatacatcgtcaacgaggtccaggacgtctatcgcatgcagggtgtgaagatcaacgacaagcactttgaggtgattgtgcgtcagatgatgcgcaaggtctgcatccttgatccgggcgacacccgcttccttgagtcgcaggttgtcgacaagcgcgactttatggatgagaacgaccgcatttggggcaagaaggtggttaccgacgccggtgactcacagaatctccaggctggtcaaatcatcacagcgcgcaagctccgcgacgagaactccgctttgaagcgcaaggacttgaatctcgtacaggtgcgcgatgccgttccggcaacgtccgaccagatgcttcagggtatcacccgcgcagcattgcagacttcaagcttcatgtcggcggcttccttccaggaaaccactaaggtgctcaacgaggcagcaatcaacggcaagaccgacaatctggagggcatgaaggagaacgttatctgcggtcacttgattccagccggaacaggtctgcgcgactacaactcgcttgttgtaggaagcaaggaagactttgaatatctcgacaagagtctcgacgcccgtcttgaggctgaagcggctgaagacgctgccaaaatcaagaaggctgaagagaaaggcaaataaagaaactgattgaaaaaactgacaataaagatagcccggcgattggttcgtcgggctatctttttaatgagtggacaaacaaaaagcctccacggaaagtacgcggaggcataggatttatatccttcggcatatagccttattgtgataagatgtagaaataatcttatgttgcaaatttctacagaataattgatatttccaaataaatttcgctaaatttacggaatattgaaaaaaccgaaacaaaaaacgatatgaaaagagtatttggaatagatttgggaaccaattcaataggatggtcaatagtagagcagttggaaaatggaaaatacagacatataaaatctggtgttgacatttttaaggatggagtggatcacgataaatcaggagagcatccatgtgtgcaattacgaactaatgcgagaggattgcgccgacattattttcgccgtcgtttacataaaatagagttgcttaaaatattgatagaggaaagaatgtgcccgccgttgacagatgaagatcttaaacggtggcggtttaagaaaatctaccctaaagaagacaactttatggaatggcagcgcacaaacgacaatttggataaaaatccgtatcatgatcgatatgttgcgttgacacgaaaacttgatttgtcgatagagtgcgatagatatatacttggcagggcattttaccacttgtcgcagcgcagaggattcttgagcaatcgtaaagattcaacgaaagagcaagaaggagaggtcaaggctgctatatctgaattgtcagataaaattaaagaggcaggatgtagttatctttgtgagtatttctacaaattgtatcaggctggggataaaatacgagggcattatacggctcgcaatgagcattatctgaaggaatttcaggcaatttgcgacaagcagagcctcggggctgatttgtgcaagcgtttgaataatgcaattttttaccagcgacctctgaagtctcagaaaggaaatattgggcgatgtacgtttgagcttggcaagcaaagatgttcgacatcgcatccagcttatgaagagtaccgcatgttgtgttttataaataatatccgtttgcatcgtcaaggggaggattctgatttccgtgtgcttacaaaagaagaggttgacgcaataattcccaaatttgtatgcaagtcgcaatttaaatttgaaaaattggcaaaggtgttggctcataaaaaagagaattatgggttcaagtatgattctgatgaaagtactcttaaatttaattatcgaaaagaaacaagcattgctggcagcccggtgactgctggattgaaagaaatattcggagaagaatggaaatcggaaatctgtagtgtgtatatgaagtcggaaggaaagacagaggaccggataatcgatgatgtgtggcatgtgctctattcttttgacaatgatgaaaacatccgggattgggcaaaaaagaatctgcagcttgatgatgaacaggcagaaaagtttgctaaaatcaaaatcgaacgtgattatgcatcgttgagcctgaatgctatccgaaagattctgccatatctgcgacgtggtttgcgttatgatgaggctgtgttctgtgcaaatattccggcggcgcttgggaatgtagaagatgttgatgaatataggaaaattgaggatgacgtagtcgcatgtgtgcgaaatttcaaaagctgtgaagtggcaggtagaaaaaatacattggaaaaagaagtggcagaattgttggaggagaagtatggcgtagacaaacgtcatcttggaaagatttatcatccgtcaaaaacagaaacttatccaactgcacagcccgacaataacggtctgcggttgcttggctcgcctcgaacggcatccgtgcgcaacccaatggctatgcgggcgttgtttagattgcgggcgttgacaaacgagttgcttaaaaagggagaaattaattcagaaacggttgtcaatattgagtttgcaaggggattgaacgatgccaatatgcgcaaggcaatagaaaattatcagcgggaaattgctgataggcatcagaaatatgccaaggaaataaaggactgttatttaaaagaaactggaaaaaatattgagccaacagaaaatgagattctgaaatatcaactttgggaagaacagaatcatcagtgtttatatacaggcaagatgataagtgtcgctgattttatcggggctaatccaaagtttgatattgagcacactttgccacgagctgctggcggtgatgactctcaggtcaacaagacactttgtgacagccgtttcaaccgagaagtgaagaaggcacatttgccatcggaattggcgaatcatgcagaaatattgttgaaggcaaaaaatctgtggcaaaagaaaatttatgagttgaccaagcagatagaaggaactaaaggttatgccgccgataagaatgcaaaagacggtaaaattcagcgcaggcatttgcttaaaatgaagcgtgattattacattggaaagttgcaacggtttgagatgaaagaggttcctacagggttctctaatcgacagggtgttgatattggtattataggcaagtatgccaagttgtatctgcacaccgtgtttgacaagatttttgttgtgaaaggagctacaactgcggctttccgaaaggtttggggcttgcagtcggtgtatgagaagaaagaacgcataaatcatgttcatcattgtgtggatgctattacgattgcatgtatcgggaaaaagcagtatgatgactggaaatgttatcaggaggcggaagatatgtattatcgaggagaaactgggcgtccgtcaatggacaaaccgtggtctacattcacagaggatgtaaagcagctgacagagggcttgctgattcatcattatgtgcccgacaatgctggaaaagcatcgaaaaagaagttgcgcgtccgtggtcgcattcagcgtaatgccgaagggcgggcgttgtatgctactggcgattgcgcacgtttgtcattgcatcagcaaactttctatggggcgattaaacaggatgatgagatacggtatgtggtgaggaaaccgttggattcccttgagaagaaagatatagaaaagattgtagacccagaggtccggcagaaagttaaagaggctgttgacgccaaaggtatgaaagatgctgtagctgacggaatctggatgaatgaagaaaaaaggattccaataaaaaaagtgcgtatatacacatcaattgctaatcctttgcgattgaagcgtcaacgagatttgtcggtgcatgactacaaacgagattattatgttgccaatgatggtaattattgtatgggaatttatgagggaaccgatgcaaagggcaaaaagaagaagacgtttaagatagtcaacaatatggatgctgcaagctattttaaggcaagacaacgcggcgaagatgtggaattgttgccaatgtcggatggtaatgatttcccattgaaatgtgttcttaagacgggctctgtggtgctcttctatcaagacactccaaaagagttgaaagaatgctcaaagaaagagcttgcgaaaagattgtaccgcgttgtgggaatgtcggagatgaaaataaagcaaaaaactggaaaaatagactgctatggaatgctctctttgactttccaccaagaggcccggccgagcagtgacctgaaagataaaaatggggtgtggagaattggggaggatgtgcgacccaaaattaagttaacgcataatcaaacgaatttccttgtagaaggaattgatttcagattgacattgtcaggagatgtggaatggctaaaataaaaaattatgttgaagcgggcactgtttttcactcagccgtttatgctgagtcttcgcaattgtcaaatggtgatatacactcgggagatgccgcaagaaaagcgaaccataccgatagaagatataggttatgtaattcttgaacatccgcagattagtgtttcgttgccgttgctcaacgctttgtctgataataatgtctctgtcatattttgtggagacaatcgtatgcctaatgcaatgttgcttaaccttgattctaacgcaacgcagggggagagtttccggaatcaggttgaggtgtcgcctgcgttgaaacgcaatctctggcaacaggtggttgtggcaaaaattcgcaatcaagcagctttgttgacaaagttgggaaaggatggcgatttgttgcgtccgttgtggcagaacgttaaaagtggagattctgacaatagggaaggggtggcatcaaaaatttattgggcagaaatgtttgggcgttcgtttgtgcgttcgcgagagggaacaggattgaacccattgcttaactatggctacactattcttcgtgctgctacggccagggcattgatgggttccggtttgctccctgcgtttggtattttccatcgcaatcgttacaatgcgtttcctctggcagacgatatgatggagccgttccgaccatatgtcgatgaggttgtttatgagatgatggaggctgggatggttgaattgaataaggaggccaaagggaaattgataggattgctctttgttgatacttatttcccaaaagtgacgcggcctcttgatatagcgttgacaatggcgaccgcttcgttggcaaaatgtgttgcaggggattgtaagaaattaaaatttccgataatgaaatgacagagtttagacttaatgcttatcacattatgtggctgtttgtcttttttgatttgccaaccaatactaagaagcagcgtaaaaatgcggcttctttcaggaaaatgcttgaaaaagatggattcacgatgatgcaattttctgtctacatacgtcattgtgcatctaaagaaagccgtgatgtacatgtgaaaagggttaagtcattcattcctccggaaggaaaggtgagtatactctcagtaacagatcgccaatatggtgacattcataacttttggggaatggtggaggaggaaaaagaaaggcgaccgattcctcaacagttagaaattttttgagttctttgaaatttggatgaaaacgtataattttgttatgtgattaagaagaaaccgttattgatgaatctttagcgagttttttttaaattttctcatcaaactacagcattccgttgaaaatgagaatgtgatttaggtgataatgtgcttgaaaatagcgtcttatgcgccataggttgtggtttgatgtagaaatggaataagatacaacccatattcgtcggacgccaaaaacgggtcgttgtggtttgatgtagaaatggaataagatacaaccgtatgctcaaaaggacggcgatttgccagttgtggtttgatgtagaaatggaataagatacaacagttgagcaatttgcaagcttgataatttgttgtggtttgatgtagaaatggaataagatacaacattgactttctcatcttggtaaggttgctcgttgtggtttgatgtagaaatggaataagatacaacctatcgcttcataatcaagaagaggggtagcgttgtggtttgatgtagaaatggaataagatacaactttagattcagttttagcagattgccgccagttgtggtttgatgtagaaatggaataagatacaacagacagatagatacacaaagcgtgcggaagttgtggtttgatgtagaaatggaataagatacaacttatatatacaaatcatcaactaacactaagttgtggtttgatgtagaaatggaataagatacaacctttttagcagttggtttcattgttttgagttgtggtttgatgtagaaatggaataagatacaaccggtcatcttatcaataaacaagtgtttggttgtggtttgatgtagaaatggaataagatacaacaaggttacgaactacctttacatcgaaattgttgtggtttgatgtagaaatggaataagatacaactagtgacatcagtaagagcagcttgcgcatgttgtggtttgatgtagaaatggaataagatacaactaaaggtatctggttaccaccaagggcaccgttgtggtttgatgtagaaatggaataagatacaacgtcaataagagtaggacgaaccttgaagagttgtggtttgatgtagaaatggaataagatacaacttcttgtgagatttacgcgggaggtggagggaattgatgctcttgccactgacgtttatttgtcgtaactttgcacggtcatcaatatcgatatggcaaagaagaagtatcagaaaagaaacagcaccgcgcgtcaggtgagaactgccgtgattgttgtggcggttatcgtggctgtgtggtggtttataggacatgcgaaggagttgggcttcaagcgtgttgagagtggtgcgcccgccagcaatgtcgatgtagaggcgcttatggaagtgaatgctccagaggggttgcggcagcagattgttgcgtatgagggctacaccgcgtcgttcaacgccgacctgcgtattcccaactatgttgtctacgaactcacacgtttcgagacccagggcgcggagccgcgtcacgacaagtttatgtgcgacaccgacgttgaaggctgtccgactgccgacgactataagggttcgggctacgaccgcggtcatatggctcccgctgccgatatgaaatggagcaagaaggcgatgcaggagtcgttttttttgacaaatatatgtccgcagaaccattcgctcaacagcggcgggtggaagcgtctggaggagaaagtgcgcctgtgggcagaccgcgacagtgcagtcattgtagtttccgggccaatcgtgcaaggtcacatcaaccgtttggaaagcggagtggctgtgcctaccggatttttcaaggtgctgctcgctccgtttgccacaccgaagcgcgccatcgcattcatctacaagaacgaaggcggacaaaaggtgattgagcggcaggcagtaagcgtagacgaggtggaggctctcacggggcttgacttcttttcttcgctgcccgacgacgaggaaaatgaaatagaaaaaacttgtgattattacgaatggaacaattagacatcaaccagcataacgacgacacaatatgcgccgtgtcgacaccggcgggagtgggaggaatagcagtggtgcgcgtcagcggacgcgacgccgtgaaatgcgtgatgaaatcatggcgcggagccgaccttaatgccgtgcagacccacacgctgcacctcggacgcatcgtcgacaccgacggcgagacgctcgacgaggttgtggcagccgtattccgcggaccacggtcgtttactggcgaggatgtcatcgagctgtcatgccacggctcgctatgggtgcagcagcaacttgtagcattgctcatcggcaacggatgccgcgccgccgagggaggcgaattcacgcgtcgcgcatttatgaacgggcgtctcgacctgtcgcaggcagaagccgtagccgacgtgatagcaagtggctcgaaagcggcacaccgcatcgctgtgagccagatgcgcggcggattcagccgtatgctctccactttgcgcgaacgtctgctcgaatttgtgtcgcttatggaacttgagctcgatttcagcgaagaggatgtggagtttgccgaccgcacacgtctgattggcatagcagaggagattgacacagccgtgacacgccttgccgactcttttgcagtcggcaacgccatcaaaaacggatttcccgtggcgatagtgggagagcccaacgcaggaaaatccacactcctcaaccggttgctccacgacgacaaagcgctcgtgagcgacatccgcggcacaacgcgcgacgtgatagaggacaccataacgctcggcggactgacatttcggtttatcgacacagcaggcatacgccagaccaccgacactatagagacaatgggtattgagcggacgttcaagaaactcgatgaggcagcgataatcctctggatgatcgacggcacacagcctgttgccaacatcgccaccgttgctgccgacatcctgccgcacgccgaaggaaagcatcttgttgccgtaatcaacaaaatcgactgtctttcggatgccgacatcagcgcgctgcgcttagccgtagccactgccgccccgtcggcagcgatagccacaatctcggcaaaagccgacatcgccgtcgactcgcttgagcaaagcctgattgaagcagccgccattgccgacaccgaccccaacgcagtcatcgtgaccaacgcacgccactacgacgcccttctgcatgccggcgaagccatcagacgcgccctcgacgggttgcgcagcggcatctcgggcgacttcgtgtcgcaggacatccgtgaatgcatgcactatctcggagaaataaccggcgaaatcacaacccacgaaatcctcggctccatcttctcccgcttctgcatcggcaaatgacataattgtcacaatacattagtacagcgtgctttacagcacgctttttccatacccttactgatggattctaacggattctgacccctttttcgcccatttttgtatcccgattgtatttcgccatcgaccgtgaccgaacgcgcgagataagtgatggaggatttacacgtcagtacacgtcgatacacgcccatacacgcttttggcgaaataattggcgaaataaccacttatataaagccagtatgagcagtaacattcaaattgaaaaagtctgtcagtggtgcggaaaaaacttcattgcccggactactcagactgcgtactgttccaaacgatgcgctgaacatgcctataaggatagaaagcgcaaagagaaaatggaacggtgcaaagaagaggtgcgtcgagttcagaccgggatgaaagaaattgacgagaaagaatttctcactccccgtcaggcagctcagtatcttggtctttgctataagaccttttacatctatatcaataaaggtgtaatcaaggcatggaaactcaaccgtaagacccttgtcaagcgaagcgatattgacactctattcgctgcgacggaacggacaaccattgcacgagaggaaacaccaatttctgagttttacactacacaggaagttcttgacaaatatcaggtatctaacggctggttttggaaagtctgtaaagaaaagaaaatcccaaagaccgtgtatcgtgggaaaaacatgtggagcaaagcccatgttgaccgggcatttgcaaagaaaccaactccggagggaatcacagagtggcacactgttgctgaaatccaagagaaattcggaatgacactatcagccatatacaaccttgcttccaaggaaggaattccgaaaactaaagtcggtaaagaagttcgctattcaaagaatcattttgatgtggctaaagtcgtggcagagcctgaacctccggctgaatacacgattgccgaggctatggcaaagtttggcatgacaagagaccagctctatcactatgtcaagacatacaagataacccgtaccaagagaggcaagtttacctatctctcccgcaaagaactggatgatttgcttgcgccacctacgatttagccgaatccggctatagtggtgcgatggtggctgattccaccatgcaaacactaccgaactttgcgtcaaacttttaactctttcaagatacaatgaatacctgcactaaagttttccttcgtaaaaaagaaatatcgggcgaccgcattcgctctacctcgacttctatccccagatccgaaatcctcacaccaacaggttcagccgccgagagggactgggaatctacctctacggacatccagctaatgcccgtgaacgagagttcaacgcctccatgatggaaaaagcggaggctatccgctgtcgccgctttgagcagttgctcaacgagcagttcggcttcctcgataaagagaagctccgcatcgactttctggaatacttccgcaagaagtgtttcaagaaataccagaagtggaagattgtctatcagcacttctatgatttttgcgacggtacatttaccctcgcaaaaatcaatgaggacttatgcaagaagtttcaggcttaccttcttaaaggtggccgtcgtgacggtcgcaagagcaagctcgcccacaattcaatcgtcggttactttgttatacgatgcaaaattaaagacaggttgtatcaaaatgctatacagtatcaaatttcataatgaacccgagaattttttgacaggattaccacgtttcagattatcatggttactccattggcgagattgagaaactgctaacgttttatcgttctgttggcggagttttaatagaaggcgttctcttgcaagagccttattctgcgattgggtgcgttcatcagagcattttaccgatagaccggtaggtgtatggattgcacgaaccgcagtctcgactttgttgacattctgaccgcccttgcctcccgatcgacaggtttcataaataatgtcagattcatcaatctgcggaagcgacacttcatcgaagaagttgacgcctacaaaccagttgctgcgtttgtgtcccggacgatagggattcttggttgaacgccaaagtatcgtgccttgccactcgtcaataacagactggtggattgattcttccgtggcgaatgtcattgacatgaagcacccatgcgcctgattgtgaggctcacagtcggcgagttgcagcgatgggaaagcctttagcaattcgcgggcaacgagcgtgacggctcgggcacattccaccggaccccgtccggctgtaatctgtatatattttttcattctccgttgtctttgatgttaagtttaggttttatcatagcgatgacctcgactgtcggccggataagttcgagtatctccccggttggtttgtatgccatcggggattcatcaagagtaccggcacatactgatgatgaatagatgtctgccattgaatcttcaaattcgttcaatgatatttgcttttttgcttgggctcggctcattatgcgtccggcgccatgcggagcggtattgagccactgctcattaccttttcctatacagatagcaatgccgtcgcgcatattaaacgggattgccactttacgaccctcggaagcatcaatcgcacctttgcgtaacataggcacgtcgtccgttaccgatatataattgtgagtggtaaagattgattcggtgcatttggccttgcacagttttttgagtatggcgaaaatacggtcgcgaattatctgatgattaaaaagagcgtatgcctgggctataatcatatccgagagataaccgcgcaaagcatcgccccaaagatagccgatgtatttcgctcgtttgggattctgtgcaatatttcgccagtgattggcaactttgactccgagatttcgggaaccacaatgaacagtcagccacccctctccagatgctgtatcttctccatattctatgaaatgattgccgccaccgagtgttccgagacttttgtagaagataccttcctgaagttttatgcgacggcagaagtcggtgatgaaacgtccatcaatgcgaggagcctcattgataaggtcaggggtagccgaacgggccttctgatactgtgagttcagaaagcggaacaattctttttcattgagtgagttcttttggcaaatatccgtgcctgtcggaattacctcgcggatgcgatggtcgagcaacggaaagtcattggggttgatagcaaacgaaagtcggtgcatggaaatggtacaaccaatgtcaactcctacatgttcaggattgacatacattccgattggataggctgtgcctacattgcatgaactcccagcgtgaacatcgggcatttgcacgatgggcacaccctccattgccggatgatcgcacagttcagttatccagtcgagagctgacggctctatattatcggtgaatatttcagccgatgttgtttttccatttatattcatgccgcaaagttgagatgtgcgtgcgcaatggatttgcgcactgctgagaaatttgctacttttgtaaaaaatatctgattatgcctatcaatcgcgccactctcatacgaatttccaccattgacaagtgtctccagaaccattatcgccgctggactatcaacgacttgattgacgcctgtaccgatgcgttggcggaatttgaagggcgaagtaatccagtgagtcgccgcacgtttcagaacgaccttgcactgatgcgcagcgaccgtttgggctataatgcccctatagtggttcgaaaaaacaaatattatgagtacgaagaccccgatttcagcatcacgcatctaccgctgaatgatgaaggtcttgatgctctcaactcggctcttgacatattgcgacagttgcagggctttccgcagctggcttcttctatcgacacaataagcaaactcaacgagcagatttcgcgacatatgggcacgtcggttccggctatggatatggagcatgtggcaggatacaggggggcaaaatttataggcgacatatatgacgctgtgcgcaaacagcagactatcattatcgaataccagtcgttcaaggctcgacaatccgaggctttggtggtatatccctatttattgaaggagtatcgtaaccgatggtttctaatcggtgagaaagcgtcaaactgcgtaccgcaggtcaatatctttgctctcgaccgcatccagtcattagcagttgacaaagaacatccgtttaagaaatgtgttgacttcgacccggaacacttctttgatgacacaatcggagtgaccaaagggattcatgacaaggcgcggcgtgtggttattaaaatcgaccgccaacaggcaccatacgtcgagtcaaagccattccataaatcgcagaaagtggagcaacgtttccgcgacggctcaatccaactctctctaaaggtcgtcataaacaacgaactggagcgtttgattctcggctacggaggtcatgccgaagtcattgctccaccggagttccgcgcccggattgcagagagcgtcagcatagctgcacgacactataatgatgcttctaatgactcggcttgtcctacttcaaaataagatagtttcacggaatcattccccttgtatagaacaaaagccatttccgtgtggtcgagttctacactatcgtatatggcatcggtatagccgtaaggtgtcattatgccaattttttcatttttatgtagaatccaaaaagtggttggatggcgtgagtccttgtaattcactttcactaatatcttcatactcacaaggcacaaatggctctatcgagctgagggtgaaaggtctctcgtctgtactggtctcgtcatagtaatcattctttatacggaacacttcccaaagatagtcccattcctgtatgaagaatagttgcttttcccatcgttcactcaggatattctgataggcaaaaggtaatacacacacaccggatttttaccagtcgatatgatgccccaatcatcgtaaactctcactgggatgatcggcaacactcgtaccgattagattatgatctgattaggtgagttgggaacggtatagtcagcgttcataattgcaccattggagaatatgacgccgttttgttccttgattccgtgttgggcatgaatatgaccgaatag

SEQ ID NO: 4562 - DNA, 22841 bp, synthetic construct
  source 1..22841: mol_type = other DNA
  misc_feature 1..22841: note = Synthetic
ctggtggcgggcagtatcgccgtcgcgtttccgctcggcgtaatgtcgggcatctatgtcagcgaatacgcccgcgacaactggctcgtcagagtgatccgcgtcatgacgagcaacttgagcggcgtaccgtcgatcgtgttcggcctgttcggcatggcgctgttcgtccgtacgctcggattcggcgactcgatcatcgccggctcgctgaccctcgccctgctcgtgctgccgatcgtgatccggacgaccgaagaggcaatgcgctcgatcgacaactcgctgcgcaacggcagctacgcgctcggcgcgaccaaactgcagaccgtctggcgcgtactgctgccgatggctttcccgaacatcgtcaccgggctgatcctctcgatcggccgcgtgtcgggcgagacggcgcccattctgttcacggccgccgcctatttcctgccgaaactgcccgacagtattttcgatcaggtcatggccctgccttatcacctgtacgtgatcgcaacgagcggaacggatctggaagcctcccgtccgatggcttacggaacggctctcgtgctgatcgcgatcgtattgctgatcaatctgctggcaaacggactgagacgctatttcggccgcaaagtgaaaacgaactaacgaaaccctatcgtcatgatcaacataagtgcgaaagacgtcaacttctattacggcagcttccacgcgctgaagaacatcacgctcggcatcgagcgcaacacggtcacggcctttatcggcccctcgggctgcggcaagtcgactttcctgcgattgctgaaccggatgaacgatctgatcgagggaacgcgcctcagcggcgagatccggatcgacggcgaggacatctacggccgggacgtcgaggtcgtcgagctgcgcaaaaaagtaggcatggttttccagaaaccgaatccgtttccgaagacgatctatgagaacgtcgcatacggactgcgcgtgaacggcgtccgcgaccgccggctgatcgacgagcgcgtcgagagctcgctcaagggagccgcgctgtgggacgaggtgaaagacaaactgaagaaatcggccttcgagctgtcgggcgggcaacagcagcgcctctgcatcgcgcgggcgctggccgtgcggccgtcgatcctgctgatggacgagccggcctcggcgctcgacccgatctcgacatcgaaaatcgaggacctgatctacgaactgaaaaaggagtacacgatcgtcatcgtcacgcacaacatgcagcaggcggcgcgcgtcagcgaccgtaccgcattcttctacatgggcgagctcgtcgagtacgatcagacccggcagatgtttctgaacccctcgaaagaggccacgcagaactacgtgaccggccggttcggctgattcggtacctttgcgccgcaagcgcctgaaagagaccgctcccgaacgactgcggagagagaaaaaacgacaaccgcaggaccggacgcaaagccgtcctccgccggatcggacacccgcggcgagaggctttcccgtccgaacgggacgctccgtaaaccgccgattgaagcaaaaacaccaaataccgaaaatccatgcgacataccgaagaatcgatcaagcgcgtcaaaaaaagcctggccgagatgtggcttctcgtgcaggggcaggtcgaaaaagtctcagccgccctgctcgagcggaaccgcgaactggcgctcgaagtgcgcagccgcgaaaaaatggtcgatgcctacgagctgacggtcgaccgcgagtgcgagaattttttcgcgctgctgacgccggtagccgtcgacctgcgcatgatgctgtcgatcgtcaagatcaacaacaacctggagcgcataggcgacttcgccgacggcatcgccgtcttcgtcgtcgaaaacctcaacgacaagatcacgccggagctgatcgaacggctcgaactcaaacggatgttccaagagacgctgtgcatgctgagcctgtgcaaggcggccctggccaacgaggacagcgcgatggcgggcaaggtcttcgccaaagacaatctggtcgaccggatcaacgccgacgcgatcgccgtgctggccgagcacatgagcgcgcatcccgacgcgatcgcggactgtctgcacctgcattccgcgatccgccgcatcgaacgtatcggcgaccggtgcagcaacatcgccgaggacatcgtgttctatctggaagcgcgggtactcaaacaccacgataccggaccggccgaagagaagtaacggaccgcccgacgagctccggattttcccgttacccgagaaacctcccttgcgccggaagcgggctgcggcgcccttccggcgccgtttctccgcacatggacacgggaacttccggttactccaacgagggcaagcgtttcaacatatccctgatccgaacggccgtccggggcatcggctcggctaccgtcagaccgaccacctcccgcgcccgggcgatgtcgccgatcagccggacgacctgatcgacggtcatcccgtccggaacgacgcccacggccgcaacgagatcggccggatcgagcacgtccagatcgaaatggatcagcaccttcgaggccccgcaaccttccagccactctacgaccgcgcggctgtcgccggccacgtcctgcggagcgaggtgcgcgatgccgagctccctctgccgcgccctgatttcgtcgcgctcccaatcgcgcagaccgaccagcagcacgcgcgacgggtcgatgcgcgcaggcagttcggcgagtatcttcgcatcgccgagacccatgcaggccgcgagcgccatcgcatgatagccggaataagcgtcgccgggcaaggtgatgtcgggatgagcgtctatccagatcacggccgcgtcatccccgtacttcccggccagaaaggcgaacggagccgcgctgacggagcagtcgccaccgaacgtcacgatccggtcgggatcgccggcacgcagcatgctcacggcggccctcgtctgggcaacgatcgcatcgcggtcgagcactccgtccgtcacccggcgctccgcaatgccgtcggcgacgggaaccgtcagcgtttgcacgctgctgtgcggagccagaaaggcgagcagctgcgctcccagaaaatatcctctcgccgcatcgtcgggattccttatctcgggaacccaccggacgatgtcgccgccctgccactggggataaatcaggcgaaccgttctcttttcgttttccatatcgcgaaatctacaacaagataattaccatatcgatacgccaagagctcccgcatggaatctcacagtcgcggactgcggctacggaccgcgcgtccgatccgctttcccggcaccccttcgccgaaaggaacttcgtttcgggacgaaagcgttgaaaattcgacagccggatacggcaagacatccatgcgggagttctataccgtatccgcagcacgtttccggaacgcagacagaccggcttgcgcacccgacccgcctggcgtgcgggacatatccggtccttcctgtggcgacagggcatccgcgacgccttcgtcatcgctggccccgttcccttcagtcccgccaaacgatccggggaaacgcgcttcgcaatggcttccggaccgcagggaacgaaatgccggcacgcgtcgtccccattcaaccgtatctcgatacgttgcgtccggaaaattgccgacccgcaagccccccgcactcaggagacagaagacctccggacccggaattttcgccgagagccggaaagcgttccggatccgcgcccgaccgaaaggccggccgaacgaccgggagccgtcgggctcgaaagcaagagcggcaagcgttctttccgcacggtccgtcaccagtgcggtgtcatcgcattcggaaaataatgcaggtcgcattccccgtccggccgatactcgaccgtcaccaaatcgaactgcgtatccgtatcgaagccgtagagcgcgacataatgctcggcggcccgcatcagcgccgcgaacttgcgaggcgtcatcgcctcctcgggcggcgagagcgcgccgctccggcggcacttgacctcgacgacatggagcacgccctcgcgcagagccacgatgtcgagttcgtaacgcccgctgcgccaatttcgatgcaacagctcgaacccgttggcaataagccattcggccgccgcctgctcgcccctcaggcccgcctcgcgcgactgcacggctaatccagtaagaaattcagatcgtcgccgggccgcacctcgcagggcgcctgccccttgcggaagatccgcatcggacgttcgcctatcagctcgatccgcccgttctcgacacgcaggatacatccttcgcgaagccctgcgaccgtcatgcacggattggcttcgacatactcgagcagccgctgttcgcgcgtctcgccggcatgaccgtcgggatgggcgtcggtatagtgcggattgatctggaacggaacgagccctgccgccgtgaacgtagccggctcgacgatcggcatgtcgttggtcgtgcagatcgtcggacaggcgacgttgctgccagcgctccagccgacgtacggaacgccttcgggcaccctctcgcggatcaccctcagcaagccctgctcctgcatcgccttcacaagcgcgaaagtgtttcctcctccgacgacgatcgcctccgcctgcgacagcatgcgggccggatcgctctcgcgatgcaccgaacgcacatcgatgccgagttccgaaaaacgggcctgcactttggtcaggtaatcgtcataggaaaacgtcacggccgcataaggcacgaaagcgacctgccggacaccgctgaggaaatcggcgatctgccgcttggggtactcgagataagcctcgccggcattggtcgaattgctgatcagcaacaggcgcatcgatggttttctcttcatatcgcatacgtttagtttgtctatttccgcttcgatcacgagaggataatagcggtactccagagcgtgcaccttctcggccacccgctcgggcgtatcgcccggctcgacctccgtgcggtagcgggccacgatgtcgccgctgtcgtaatgttcgttgacccggtggatcgtgatgcccgtctcccgatcgcccgattcgacgacggcccggtgcacccggtcgccgtacatgcccttgcccccgtgccggggcaacagggaaggatgcacgttcagaatccggcctccgtaagccccgagcagattgtccggcacgagccacaagaatccggccaacacgatgtagccgatcccctcgcgccgcaatctctcgacgacccgatcgctattataaaaggtatcgcggtcgaaaatttccgtcccgatgccgagcctgcgcgcccgttcgagcaccggcgcgtcgggacggttcgacaggatcagcgtcacgcgggccttctctcctgccgcgaaataagaggccacattctcggcattcgtccccgaaccggaggcgaacacggctatctttatcataaacaatgatttacagaatcaaaacccgattaaatgcgcaaaaaacgcttcggatgaccaaaaataatccaaaaagtattacttttgcaaaaatttggctttgaaatagaagttatttttcggaataaacgcaattgtcaaacttaaactattggtattatgtcagacgtttcatcaaaagtagtggacatcatcgtcgacaagctcggcgttgacgctgccgaagtggttcccgccgcaagcttcaccaacgacctcggggccgactcgctcgacaccgtggagctgatcatggagttcgagaaggaattcgagatctcgattcccgacgaagacgctgagaagatcaccaccgtaggcgacgcaatcaactacatcagcgagaaaaagaagtaatttttcaggcctttgaaacaggcgtttgtcgaacgaattgaccgaagttctatgaaacaaagaagagttgtggtaacggggataggcaccatcaaccccttaggcaacagcattgaggaatatttctccaaccttgagaaaggtgtgagcggagcaggacccattactcatttcgacccttccaacttcaaaacgaaattcgcctgcgagctcaaaggctacgacgccgccagtttcttcgaccgcaaggagttgcgcaagtacgacctgtactctcagtatgcgctcgtcgctgccgaacaggccgtcaaggactcgggcgtcgatctggagaagatcgaccgcgatatggtcggagtgatctggggctccggaataggtggactggaaacgttctaccaagaggtaaagagctatgttgagggtggctttatccctcgatatagccctttcttcattccgaagatgatcgccgacctggctgccggacacatctcgatgaaatacggcttccggggtcccaacttctgcaccgtttcggcctgctcgtcgtcgaaccatgcgatgatcgactcgctgaactacatccgctggggcaaggcggacatgatcctgacgggaggctccgaagccgccatcaatcctccgggagtgggcggattcaactccatgcaggctctttcgacccgaaacgacgagccgcagaaagcctcgcgcccgttcgacgcggaccgtgacggcttcgtgatcggggaaggcgccggggcgctgctgttcgaggagtacgagcatgccgtggcccgcggagccaaaatctatgccgaagtggtcggaggcggcatgagcgccgacgcctatcacctgaccgcgccccatcccgaaggagtcggcgcgaagaaatcgatgaccgacgcgatcaaggacgccggcatctctcccgacgatatcgactatgtcaacacccacggaacctcgactcccgtcggcgacgtggccgaggtggccggcatcgttgccttgttcgggaaccacgtatacgatatgaacatcagctcgaccaagtcgatgaccggacacctgctgggcgccgcaggcgcgatcgagggtcttgcctgcatcatggcgatcacgaaggggatcgttcccccgacgatcaacctcgagaacctcgatccgaagatcgacccgaagatcaatctgacgccgaacaaggcgcagaaacgcgatgtgaagtacgcgctgagcaacacgttcggcttcggcgggcataactcgacggtcgtattcaaaaaaatctgacggacgtgctcgaccggatacgattgtactggaagctgcatcacagcagggacaaggcgtattacaaggcactggacgggattttcggcgtctgcccgaataatatagagctttataagctggccttgattcacaggtcagcttctctttttctggacgacggcacgccgatcaacaacgagcggctcgaatttctgggcgacgccgtgctcgagtcaatcgtctcggactatctgttcatcgagtttcccgagcagaacgagggctttctgacgaagctgcggtcgcgcatcgtcagccgagcgtcgctgaacaagctggccgtccgtatcgggctcgaccggcacattatcacgcagggcaactacagttcccagcagaaaaacctctacggcgacgcgctcgaagccatggtcggagcgctctatctggacaaggggtacgatttcaccaacagattgataataaaccatctgttgaatcgatatatcgatctggtcgatatgaccgagcaggagaccgacttcaagagccggctgatcgagtggagccagaagaacaagcgcgccctgtcgttcgacacggtgccgagcccgctctatacacagaaaatcccgcactttcacacgagcgtctcgatcgacggacagccgaccggcaccggcgagggacacagcaagaaaagctccgagcaaaaagccgctctgtcggctctgatccggctccgcgaaacgggcgagcacggcacggcggagcatatcgaagagtaaatgcccgccgcagggcatcacgatcaaagacctggtcatcatggaagatcacccgctttccgacaaacaggtccgggaaaagctcattgcccggggagcctccgcattgacggataccgaactactgagtattctgcttcacggcagcggtcccggcggcccggccaccgagctggccgggcgcctgctcgaccgcttcgagggcagtttggcgcgaatgggccggtgcagtctggcagaactgcgctcggccgagagtctgggcattgcccgggccgccgtactgtccgccgcgctggaactgggccgcagactgagagccgagcaaagccggtcgctcgatcaggtacagaccgaccgcgacgtaatcgagatgttccgtccgctgatcgccgagctgccttacgaagaattctgggccctgtatctcaactcgtcgaaccgggtgctcgaccgtgtacgcatcagtcagggcggcgtatcggccacggtcgtcgaccaccggctgatcgtcaagcgggccgtcgagaagctggcccacgccgtgatcctcgtgcacaatcacccctcaggcagcgaactcccgagcgaggaggaccgcacggtgaccgagcgcgtcgcgcaagccgtctcgctgttcgacatcgcgctgctcgaccatatcatcgtcacgtccggcccctgttacagtttccgcaacgaaggctttttcactgatagagattagcctcctctcggaacatttccatcgaaatcgctcaaaacgtcttccggcacgggataccgtgccgttttttttgatttctgtcgttccgtttgtgctctccgattcggcttcccgacctccttcatctcgttcggttccggacaagaccggccctgtccgatccaatccgcagcccggcggccacgcttaaatccgctcttaagaaaccaaaccccgatcacaaaaaagtctccacggagtacgcggagacataggtataaaaccttcggcctatagccttattgtgataagatgtagaactcttacgtgtcaaatatacgaaaaaaatcttgcgattgcaaaattttatttaattttactacaaacagacaccgatatgacaaaaatattaggattggacttgggaaccgcctcgatcggatgggctctcgtagagcggaacgacacggaatatgccttgctcgaccaaggtgtagacatctttcaggaaggcgtggcacgcgaaaagaacagcgagaagcccgccgtgcaagaccgaaccgcagcccgcgccctgcgccgtcattatgcccggcgacgattgcgcaagatcgatttgctccgtgtgctcgttcgccacgacctctgtcctgctctgaccgacgaacaactgaaagattggaaacagaagaaaatctatccgctgacggacgaattcatccgctggcaacgaacggacgaccgcacggacaagaatccctaccgcgaccgctacaaggcgctgaccgaaacgctcgacctcgacacgcaaagggaccgttacacgctcggccgggccttatatcatctggcgcagcggcgcggattcctgagcaatcgcaaggatgccggcgacgaaagcgagagcggtaaggtccggcagagcatcgagggcctgacggccgacatggagaaggccggatgctcctatttgggcgaatacttttaccggctttacgcccgaaaagagaaaatccgtacgaaatacacctctcgcaacgagcactatctggccgaatttcgggccatctgcgaaaaacagcggctcgccgacgatctgaggaaggcattgcaccgcgccattttctaccaacggccgctgaaatcgtagaagggatcggtcggccgatgcacgttcgaaaaggacaaaagccgatgcccggcatcgcatccgcggttcgaagagttccggatgctctccttcgtcaacaacatccggatcacgacgcccgacgacccggaacctcgtccgctctcgcgacaggaagccgaaacgatcctgccgcttttcacgcgcaaaaccaaaccgcacttcgatttcgaggagatcgccaagaagctcgccggcaaaggccgatacgcctgccaaggcgaccgcggcgaggcgccctatcgcttcaacttcgcgcggacagccaccgtcacgggatgtccggtcacagcttccctcattgcgctgttcggcgacgactatctgacgaaaatatgcgacctgtatacgctcggggccggcaagacccgagaacagatactcggcgacgtatggcacgcgctcttctcgttcgacgacgaagaacggcttagcgcgtgggcaaagcagaaactgcgcctctccgacgacgaggccggacgcttcgccgccatccgcctgccgcaggactacgccgcgctgagcctccatgccattaacaagattctgccctacctgcgtgaaggttatcgctatgacgaggcggttttcgtcgccaacctcaaggcggtgctgcctccggacatctactccgacgaatcggaacgaaacgctatcgaagccgacatcgccgcgctgataaccgatttccgacagaatccgctgaacaggggaacgaccaaggagcaatgcgtccgcgactatctgcgcaactgccggggcatcgacgaaaaacgcctcgggcgcctctatcatccgtcgatgatcgaaatctatcagacggcgctgcccgatgcgcagggcatcctgcaactgggctcgccccgaacgccggcagtacgcaacccgatggcgatgcgggcattgtttcgcttgagggtcttggtcaaccggttgctgcgcgacgggaaaatcgatcgcgaaacgaagattcacatcgagttcgcccgaggactcaacgatgccaaccgccgcaaggctatcgagctgtaccagcgcaaccgcgaggccgagcgcaaagcgtacgccgacgaaatccgccggcaatacgcctcggaatcgggccgggagatcgaacccaccgacgacgacatcctgaagtaccgtctgtggaaggagcagaaccacatttgcccctacacgggcaaacagatcggcctgtccgacttcatgggcgattccgcgcgtttcgatatcgagcataccgtcccccgagcgaggggaggcgacaactcgcaaatgaacaagaccctctgcgagagccgcttcaaccgcgaactcaagcgcgacaagcttccgtccgaactcccgaatcacgccgacgtcatggcacggatcgacgaactcgggtggccgaaggaaatcgccagcttgcaaaaacagatcgaaatacagaggcgcaagagcaaaagcgctacgaccaaatcggaaaaggacggagccatacagcgccgccatatcctgcagatgcgactcgactactggcgcggcaagtacgagcgcttcacgatgacggaagttcccgacgggttcagcaaccggcagggggtcgatatcggcatcatcggcaagtacgcgcgactctatctgaagacggtcttcgagcgaatctatacggtcaaaggcgccaccacggccgaattccgccggatgtggggattgcaggaggaatatgcccggaaagagcgcgtgaaccacacgcaccattgcctcgacgcgatcgtcatcgcctgcatcggccgcaacgaatacgaccgctgggcgcagtacgcgggcgacgaggagcgttacaggcggggcgaaggagcgaaaccccgcttcgaaaagccgtggccgacttttaccgaagacctcgaggccgtcgccggcaggcttctcgtcgcgcatcatacgcccgacaatatgcccaagcagagtcgcaagcggctgcgcatccggggcaggatacggaccggcaggaacggcgagacgctctatgcgcagggcgatacggcccggggagccttgcatcagcagaccttttacggagccatcgagcgtcaaggagaggtaagatacgtcgtgcgcaaaccgttggggcagcttcagccgtccgacgtggataagatcgtcgacgacgcagtgcggcaaaaggtcaaggaagcgatcgacgcggtcggcttcaagacggccatggacacggagagccatccgatttggatgaacgagcggaagcggatacctatccgcaaggtgcggatattcgcaggcaagaacctatctcccaaacccttgggagagaagcgacatcgggatctgtccgctctcccgcacaaaagaccggtttacgtatcgtacggcagcaactattgtatggccgtatacgaaggaaaagacaaccaaggaaagctcaagcggactttcgaaatcgtcagcacgctggaagcggcgcagtatttcaaggcgagcgcggacaaggcggcgcggcccgacctcgttccgcaatcggacgcgaacggctttccgctgaagtgcatcctgaaaaccggaaccatggtgcttttctatgaaaaaacgcccgaagagctgcacgactgcacgcaacaagaactggccaaaagattgtacaagctgacgaaattcagctctatgaccaaaggcaaccgctcttacggcttatgtaccttcaggcaccatcaggaagcccgtcctgcgggggagttggattccaaaggaacagcatggaaagccggagaggcataccgccccatcatcagcctgtaccatacccaactcaacgcttatgtcgaaggcttcgacttcgagctgagcgttacgggaactgttcaattcaaacacggatagtcatgctcaagcgcgcgctcttcttctccacgcccttctgcctgagtctgcgagacaatcagttggttatcgcgacgaaagaagctcccgatctccggaaaagcgttccgatcgaggacatcggcgtcgtcgtgctcgagcaccggcaaacgatcgtcacgctcccgctgctgaacgccctgtcggatcgcaacgtagccgtcgtcttttgcgacggcaaccggatgcccaacgccatgctgatgaatctcgactccaaccgaacgcagggcgagagctaccgggcgcagatcgaagcgagcgagccgctgaaaaagaatctgtggaagcagatcgtcgaagcgaaaatccgcaaccaggccgccctgctgggcaagctgggcaaggacggagacaaactgaagccttattaccgaaacgtcaagagcggcgattcggataatcgcgaaggagccgccgccagaatatactggtcggagcttttcggcagggagttcgtccgtattcgcgagggcgcggagccgaacaacctgctgaattacggctatacgatcctgcgcgcggccgtagcccgctcgctgatgggctcgggtctgttccctgcgttcggcattttccaccggaaccgctacaacgcctttccgctggccgacgacgttatggagccctatcgcccttacgtcgacgagttggtctgccggctgtatctcgagaataaaacgcagttgacgcaagcggtcaagggcgagctgctgagcctgctgtatgccgatacgcgattcgaaaaggtattgcggcccctcgacgtggggttgaccttcacctcggcatcgctggcgcaatgtttcacgggaatgcggaaaaagatcgcgtttcctctactggagtaaaaaagatgtctgaattacgcctgaacgcctatcgtatcatgtggctattcgtatttttcgacctgccgacccataccaaaaccgaacggcgccacgcggcccagtttcgcaaggcattggaaaaggacggtttcgcgatgatgcaatactcggtctacgtccggcactgcgtctccaaggaaaatatggaggtccatatccggcgggtccgccaatcgatgccgccttccggaatgacgagcatcctgagcgtaacggacaaacaatacggcgagattttgaatttctggggcaaggtcgaacgcgccggtcccgaaatacctcaacaactggaatttttttgatatatttgttttgcagaacggaaaaactgcatcgaatcgacttcctcagttcgccgaacatcgcttttttcgcggcacatacggatgtaatacccttataatcaataagtgtagtacctgaggttgtgatttgatgtagaaattggatactatacaacgagaattcattggaggcacctcagttcgagttgtgatttgatgtagaaattggatactatacaacaaggccgaaccgatggaaactgcgtcgcccgttgtgatttgatgtagaaattggatactatacaacccagttcgtcgtcgtcgatgtcatccaccggttgtgatttgatgtagaaattgaatactatacaactacgactatttttgcaaccgaagtagtgcagttgtgatttgatgtagaaattagtttacatatttgaacaaccaatgcagtagtttaaagctcaatagcaattggcgaatagttcttggacaggagcaagaatatgtttataacaaccagatttacaccaaaataattttcgaataataaatctttgcatttttaatatctttgctatgtacagatatatctataacaatgaaattattcgaatattatagcttgcaaaatattgtttcttggattgcgtccgcaaccaaagcattatttagacccaaacatttttttaaagattttgaatctaaatcagcgatagatttattttgccaatactctttttactttattgcgtatgcgtttttatacatactaataagtactgaggttcagagggaaacgctgtttaaaatagcatttcttgatataataaaagcttcaatagcttttatcccagcactaattgttgttgcattatttgcacgaacaaaacttaaagcagttttattttattttgggacactttatttcatatttttctcactcatcgtcatttttacgtctctcttcttgaattttgaagattacacataccaactaattgtaaacatcttaactattgtgttattcatatacgtaaattacgttattgcgtttaacataaacttgaaatgtaaacaaaaaacactttttattatagccaattatatatttctcaatgtaatgtattttatggggaatattgccataatagataagggtgcaccgcaacgtttatttgaccctataatgagcgaatatgtaacttacgaggctaatatggagcctatggatgaattaccaagtttgacctcgtacgcaatatataaggatgattttctttttggatttacaacctgcaaatatgctgatacagcttgggtggggcataaaacaaatatgcttgacaccaaggtatatagaaagaaaataaatgataatttaaactatataaaagagaatactcctcaatattataggaataaagttattgttgagttatacaagaggtatttcaatagcattcaagatgtcattactcaagagtatatgactaagaatgaatttaggtcgggagattacaagttaaccattattggagtacctgttgatacaatattagtttattccaaagtcgttgacttagatgcattaatagtaaaaaggaatgatttagtgaatgttcaaaatgcactaattcaggctcaaaatattgcttatttgccgaatgagtattggggcttggttcaatttggatttgccaagtggctaataggtgttgtttcagacaatagccctaaagataatgcggataacaagtcgaagaattagaagtcaaagagttataattctcgattttcgccagtaatatgccagtaagataaataacaaagcccctaactgcttaaagttaagggcttttgtcgttttaaagtgtacccggagccggttttgaaacgtcaaaaactaccaaaatacaaaccattgaattttgtatataattatctatatatcaataaataaaatttaattccaattggatgtgttttatcctgttttcgatagtttgaaacaaaagtgcccaaaaagtgcccggaatattttgtgtattccgaaggatattataacttgccgaaaaagtaaaaatatgggcaagacgtattataatatcagcagaaaaaaagatgccgccggagaatcggaaatttgtatgcgaatttatgttagcaagaataacagaatccgcatcggcagtggtatttgggtagaggctaaacggtggggaaagaaaaacgagatcaacatacctaatattcccggcgaagaaagagaaatgcttttggagaaaaagaccaaattaaaggctttaacagagcatattgaaaaagaggtacagactacggaagataaatcaattattgataaatcataccttgagaaaatagttcgcaaattccataagccgcccaaagcccagaaagaaagtgaggtttcgtttttcgatattatggagaggtatgttaccacacataaactgtcggagccgcgacgcaaaaatttcaaagtaatcatgcggagcctgcatcggttcgagttgtactggaaaaaagagggacaccggggcttcaaaataactttcgccaatcttaatccggaactattgcgacagatcgagaactttctgctaaacgaacaagaggccttcttgaaatacccggaaatatacgatctatttccgtattccgctaaagtagcgttactgacaccgaagcgcaagcgtccgccgattctcgataaggacggcaatgaaatccccaaaggaatgccgaaaccgcgtgggcaaaactccgttgcggatatgctcacccgcttccgggcttttatcgtatgggctatcgacaacaactacactataaataatccgttcaaacattttacgattggagagattgtttacggcacacctatctatatcagtaatgaagaacgaaaccgactgctcgaagccgatatgtctgatgataaggagatagaaacacagcgggatattttcgtatttcaatgccttatcggttgtcgtgtcagcgacctgtataaaatgacctaccgaagcattattaacgacgcagtggagtatattcccagaaagacgaaagaggacaggccgatcaccgtgcgcgtaccgctgaacgacaccgccaaacgactgatcgccaaatatcaggactatgatagagggagtttgtttccgttcagcacggaacagcattacaaccggaaaatcaaagaggcattcaaaaaggctggcttagaccgtatcgttaccgtcctcaatcagcagactcgacaagaagtacagaagccattatatgaggttgcatcatcgcacatggcccggcgcacgttcatcggcaatatatacaaaaaagtgaaagaccccaacctcgtgggatcattgagtggacacaaggaaggcagcaaagcattcgctcgttaccgcgacatcgacgaggatatgaagcgggaactaatcggctatttagaataaaaacaagaagtgtataataatagcacgccttttgcgttatatatttgaaatggatttgaaagagcgcgcaaagatatgattttttttgcagttaaataaaaacttcatacatttgtaccgtctctacccttggtagggaacctacagaggtttcggacgctgaaccagtaatcagcgtcctttttattttttccattccggactttttataatctgtgctttagtatgaggtgaatcggcattgtaagccgtgataaatttcgcttctgtatccttgattatcccaataaccacaacataatcccctttgacaatagacactcttttgttggtgttataggattttgttttcttatcccatcctacatacatttttgcagaagcatcagccaatacatcctttatccataacattttttctaaccgggcatacgacaaagcatctttattggctttttttctatttgtactttcataaaatgcgtgatcaaattgatcttcataaaatcgtactcgtatgccatcatgagtatgaataacctttctgcaatattcacaacgccataattcccgtaattcagcctctgtatattcgacaggcttaattttctcatatgacataactaccaacctttacgcagattaatgtcaaaaatgttaaacttattctctcctatggaggttggttttataggcttatgccgttctatacaatttctaatctccaattttgccaggctaaccgtttcgtcattaaatttagatgccaccgagcctgttagtatatctgcaagttgtatcgctactgattcgtgagaaggcaaagcctgcaccctgtttacattattcgaataacgtaaaatcttttctaattcatttattcggtatttatatccattgactttataatcaacaaagatgtcatacacattattgggattaagccaatgatgaatcaactgataataaaacttataaaatcccaattcaccacaaccattattgtatttgtcgtggttaatatttgcactattgataataatggctcgaaatctaattttgggacttttgaagaaaagatcaacaacttctttatacatatctaaatatgccggagaaattttattccatttgatttctccccatacattaaatctgtgctttatttcgttaaggtctttctttaattgacccctatattctttaggaatccaaattcctcctatgacagtatatttatgagcatttttatcaaataatgcttctattccgctttcgtcgcaataaacttcgtaattcattatttaacatctttttgcaaagatacgaaaattagtaaatttatagcgatgattagatttacaagtatctcacaatagggaagcaaattgtatatttgagtaattttgaccgtgagaattaattttgtgatataaatggattaccgcaagatcaatagtcatatcatcctgctggcgatagtgattgtcgtcgggttgctcgtggctatggtcgcacggctgatggtgttggggcaaggggtcgatgctggtacggcgaatcttacctttgtcattgttctcggcgtttgtgcggtggtgtatctgattattatgtcggttttctcccatacgatcattccgtgggttataaggaagttaccggagacgaaacgccccgccgtcgaaacggaagccgttccatcaatcgacaacatgcccgtcatgaatgtcgagcagatcaaacaagatgcagacaggcaattcgccgaacgacgaaaagaaaaaatagagttgttcctgcgttacgctcatcggacaataggcccttatgtaacatccgatgaactggttcggcttgatcggtgtgtcgagtattatggtcgagaggaagcatgcccggcagatttcgtacccatccggcccgaaaaactgaaaaatgcggatctgtttcattttggatggaacatggctcattatttcggacagccgaaacaggatgtcgtgccgtggctaaaagccgtatttgtccctttgtccgacttggaagattcttatatcaaaggaaaactgcgggactatcaaaccgagaaatacaccattcctaacatagaggatatcccaaaatacatggccgaacacaacggctaaccacctctttcaagagattataaggagattttaaggagaaaacgagtgtttttgttctccgaaaaatctccttatttatttgccccggattcgattggatgtcggattcagaacccattgtttaacactctaaaaattcgattatgagtttgaaagatttgttggagtccggggcgaacgtaaccgtagcggtcaaactggatgacctgagagagattctcaaagaggcggcgggaagcctcaaacctgttcgacaagaaccacctcccgaagaatttttaagccgcaaagaggtattgtccgttttgcgaatcgactcgtctaccttatggtgctgggaaaagaccgggtatataaagtctttcccgttcggtggacgcaaacggtataaaagggatgacgtcgaggcgatccgcaccggcaagaaaggagtgcgccgtcatggataacgaagaatatatccgagtagggacgtgctatttgaaactgtgccgcgtgccgaccgctacgggtgagttccgggagaaatacttgccgtggaatatagagaccatccggcaggatcattccaaagatttcgtggccaatatcaagaaatacgacggttattgcttttttcctgcccatgtggattatcagcggatgtacggcaattttctgaatatgtatgagccgattccatatcatccggagccgggcgaatttccccatatccgggcatttctggcccatattttcggcccgcagatcgaattggggtatgactacctgcaactgctttaccgccggccacgccagcgattaccgattctgctgctcgtttcgcgggaacgcaatacgggtaagacgactttcatccatctactgaaagccatctttggggccaacatgaccgtcaatacgaacgaggatttccgcagtaatttcaattcggaatgggccagcaaactgattgtcgccaccgacgaggtgttattgaaccgccgggaggattccgaaaggttcaagacacttagtacggcccggacgttcaaactggaagccaaaggcaaagatcggttggagatcgagtttttcgccaagttcgtactgtgttccaacaacgaggacaatcctgtgatcatcgaccagggggaaacccgctattgggtacgtaaagtggggcccattgataaggacgatacggggttgcttgacaaaatgaaacgggagattcctgcttttctccatttcttgcttaaccgggaattaagtgtgccggaagtcagccgaatgtggttcgatccggaactgctcacgacgcctgccctacgccgtattatccaatataatcgcggacagctcgaaaatgaaatgctcggcgtactggaggacatatttcaggtgcatgacaaggacgaatatgtgttctgcatacaagatatgcagaatatgcttagtgtccgggatataaagaccgagccggtaaagataaagcgggtattgcaggatagttggaggctgaaaccggacaaggttactcgctacatctcctaccgtctatccggcgatggctcgctgttcccggaaccgcgtaccggcagaccctattctgtcacccgcagtttcatttctgaaaaactgttattctgtaacagtgaagaataaaatctttgaaaatcaataatcaacacctcgttacaaacctgtaacaaatgtgtaacaaaatagattcgttacacggcgtgtaacaattctccaaaaccgttacacaactgttactgcccttaaacatttcttttactgaaagttggaggcgcaatataacaagttaacaaaaaatccgctaccatgaactacgaagaaataaaacgacacatcagtattcgggcttacctcgcggcacggggaatcaaaccccggtgggaacgcggcaaccggggcatgtacctctcgccgctgcgtaaggagcgcaccgccagcttcagcgtcagttacgataagaacctctggcacgacttcggaacgggcgagggcggctcgatcatcgaccttgtagcccgtatggagggctgctctgaggccgaggccgcacggcggttgtgggagaacaaacacggaacgttcatacccatctatgctgaaccgtcaagagtaagcgaaccgacaccatcccgcctcgccgtcctctccgaccgcgaactgacccatccggcattggtcagctacctgacagggcgaggcatagacccagccatcgcccggacttattgtcgcgaggtgtgctacacgatcggcggcaaggagtatttcgccatcgggttccgcaacgatgccggaggctgggagctgcgtaatccccgattcaaaggaagcagtacgcccaagaacattaccaccctcgacaacggcagcgatacggcgatggtgttcgaggggtttatcgactttctatcttatctctcgctgaaaacaaacccgacacccgccatcgacaccaccgtactcaattcggtgacgaatctgcaaaaggccgttccatttctctcgcaccacagagtcgtccatgccttcctcgacaacgacgacgcggggcggaaagcgttggcccgactggaagaatccttaccctcgaccgaagtgatcgaccaatccgttttttaccgtaactacaaagacctgaatgactactggcaggagaaacgaaacctcgccaccccgcaaactcctccgcacgaacggcaacggaaggaaacagaacgggcacatcttactgttccgcaatgtgtcccgtccccggcgaaaaagagaggccccagtcggaagttctaaccccgttgcgtaccctcggcatttacgcccccggaaaagccatagcctattagggctttttcttttcgcatcgctgcggcgacgcggaaaaagccccaataggccagcagggagaaccccgctggacaccccctctgcggtcgttccgaccgccggacgctcccgcgtccgaaaccagccaacccaatcatccaccgcattgacagagaaaatatatgggatacgtagtattgcatttagataagtcgccgagtaacgaagcggcgatgacagcccacatcgcacgaacgcagatgcccccgaatgccgatccctcgcgcacgcacctgaaccgg

SEQ ID NO: 4563 - DNA, 22076 bp, synthetic construct
  source 1..22076: mol_type = other DNA
  misc_feature 1..22076: note = Synthetic
cccgacggagcgtacaagacaaatctgtcggtaaagtggtacgttaaggaaaacaacctagacgaacgcgacaagacattgagtatatttcccttattgcgtacctccgagatgcgatacattgttgccgaaaccgaagctcgtagaaataacttcgctgcagcctacgaaataatcaacgccatgcgtgaacgacgtggactaacaggacaccctttggcggtaaaaaacacttttggcgactttcaaaaagactttgtaagagaagctcaacgagaatggataagcgaaggacaactgttctacctttataaaagactaggagcagacgtgaaacgcgatgacaagacggtgaaaccattcaccaaagcagaaacgatattacctacatctgttgatgaaaatctctgacccataacatatatcattatgagaaagttattgtttacgctgcctttggcagcaatcgccttgttttcttcttgtcgggaggaggcgctgacaacttttggcgatgaccattacctttatttcgacaaatattatgtaaacgagaaagaaccgggcaagcatacggccgactctacttttgcgtcattcttcttccttagtgatgatgtagatgctgtagatgccatgcttgaagtacatctggcagggagaaacctaaccaaagacgaaacttttaggttaagagtagtacccgaagggaccacagctatacccgatgaatataagatagcagatagctatacgtttagggcaagatctgtcgctgcagatgccacaaaccgtacagacaccgttgtgataaagatgtatcgcagacccaggcttaaagacatgcctaagggagtgcgcctgatggtggaattggttccacttggcaacttacaattgggccagaccgaacgcacaaaggctatcgttatactaacacgcgatgctattaagcctgcttggtggaacactgaagttacagaactgctgttgggagagtattccagccgtaagtataagcttttcgtgacccacatcgacccaacagcgtcgctaaatggagaaatgctatccgatgctccttggaaagcaagaaagctggttcagaagtttaaggaatggctgggcaagcatcccgaccaggctgtagaggaagacgctcgccaatgaccgttaaagtgtgacaccttaaaaaatagaaaattatgcggaacttaaaatatgcattcgtagcaatgcttatgccactgatgttggcatcctgttttagtgacgacgggaattacgaatacgagtcgctgaagccacctacatggctcgacaactttatgaacaggccaatacaagtgttggtctatggtggccgcgccgtgaaactggatggctcaagatacttcaattggggaaaactagattcgttacagcgcagccaagaggtgcgctatgagtggcgaatgaacgggaaattatatagcgagcaattgaaggaagaaatgaccactgatgaatttctgaagagagtgggcctcgaagaaatgccagtaaaagaacagtctggagacttctccattatcgagaaatcgtcgggcgtaacattcaaggtgagatgtacactgttttttaaacctgctattggaggtggcgactttgtcgtttactctactaagtcgcctaacgagccaaacgtaggtaaactaacggtgtttaggcttaattacttgaaagaacaaggtaagctgaaagagaactttgagtttggcaagtatatgcttgacaacattcccggcacacctaggtctttggatgtagctgtagcgaagaacgtcggtgcagcaggttcactcacagtgataaccgaagaaggtgatgcaatggtatataacgccggcaacttgaagaaagaatgggatttgagctcgcagtttgccgatgggacacccgacaactttaaggttagtggtcgaaaagatcaggaagatggtggtatgaatacgcccgcattgacctgggtcgccacgaaagacggccgattgttctcacgccaatttggcaagaactacttaggtggtaaattcatcaccgaaccttattatattgactcattgggctataagatcactaaattcgggcatacaaactggggagtgaccaatattccttgttatgatgagaaaaaccgaagagtagttttggcaactactaccaacacctctgacttttataagcatcgtagttttgtggtcacactccattccgatcaattcaattcgcctgctgaaaagatgcctgaagacgcaaaggtgtattttcttacgacaatgaatggggacgaataccatgacaatcgaaatagttggttccaagcttactacacaacagggggaaaatccatggtgtcttgtttcgcagtggacaactacggacgtaggttgacctatcttatgaaatatccaaggccgtatgagatacctggacacttgttcacaaacgaaactgtgttcttgacagcatctggcgagcaccttacaggtaactcttctaaggcctataccgacctgttctccgaggggaaagacctttatggcattcaacgggacgctaatagggcatactttggcgcagaagaaatagaaattaagaaaatacctttggagggaataacatccaagataacctttatggtatacgatgttatggactactgggtaggtctgtctggtgaatatccccatcttatcgtgggctgtgagaatggcgacgtactgatttactatgctgttcccgtttcgcatccacgattagtgaagaagtataatgtgggtggacgcgtatgcgccatcaagcaagtggccatgcctagtggttatcttgacttatattaatgaatacaataacgcggctacccttgcccaaggtggcggggtagtcgcaaaacaaaaacagataaaatgcagaacatgatgtatttaaagagaagtgccggcgcgctatttatgctattggctggcgcgtttgccgtgcaagcgcaaagtgtagataaggtaagtctgaacgttagcgttgccaacaaaggcggcgcaccaacagttacgctcaaaaagtcggccgaatgccaagcgtattgtctagccttgttcacatcagacattgctggcatcatcaaagacgaagttgttgacggatattttaccggacaaaagaaacccagatacaccgaaaacgccaaggataagaagctggttgactacggactagtggttgttcccgagaaagaatacaccctcatcgcccttggttatggcaaggacggcaagccaggcaaggtctctcgcacgcagtttacggcccctcgcagacaaggattcgcttcagcgcaggtgctggctcaagtaataaacatcggaccagatagtgttacggtgaagtttacccccaacaccgacgtggcaggctatgccctatgccagtttgagggcggaaccatcgaacaaaccgtgaaagaacatggtcctatgatgggcttctctaacgcttacgacatgattaagcagttcagtggcaaagactacaccaccgaaaagatacacacttggcgcgaaatggtgcccgatgccaactacgaactttgcgtgttggcatgggataagaacggtgttttccaagaaataaccaaggttcccgttaccacgaagaagctgggcggacctggtgaagccactgttgacataaagattggcgagtttggcggaagcaagaaaggtggatactaccaagatgtggtgtactcgcccaacgaccaagcatcgcttcaccgcgacatcatcatcaccgaagaggcctttaacaaacccgacatgggcaacatcggcgttatcaagatgctgcaaaccgaccatcccaaagacatctactggaaccaataccgcgtagacagggctagatggaacgcaacacctctcaccacctactacgcttgctcaatagccaagaacgtggacggcaagtggggcgagcttaaaaaggtgaagttcaccacgcccgctgctaaagaataacgcgaaagatataaaccgctcttgatgaaacgtatgactttagctggcagattttgctcatcgctatacggttcatggccaaccgtgcacccaaaagcatgggcaaaatatgcccgctaaggttatgctgttaacaaaaagagtagttacaaacaaacgtatattactatctggcaacccaagtaaggattaaatcccatcttggtagcaggcaagacgaacccgctcccggtgtgttcctctcctccaaccgcatatcgctctatcaactcaacttttcgatgaagaagaaaagaacataacctagggggacgtttcctaatgcatccttccccataaccttgcgaatgcgaaacgagaaacagccggggcggattttccatgccgcgttttctgcgaaaaaaacaatagtttcgcaccactaacaaataaccgatttattgaaacaaaatgagtaacctaaaaacaattttgtctggctgggcgctattagctttgctttttcccaccaacttgcgtggacaaggcactaatcaagcaccacccatacccgtggacactgccgtaaggataggcaaactgcccaacggactgacctattatatacgccataacaactggcctgaacatcgcgccgacttctatatcgcacagaaggtgggctcgatacaagaagaagagagccaacgaggtttggcccacttcctcgaacacatgtgctttaacggcacgaaacatttccccggtaacgaactcattcgttacttggaaacactcggtgtgaagtttggcggcgatctcaatgcctatacctccatcgaccaaaccgtttacaacatatctaacgtgcctaccacacgccaaacggcactagactcgtgcttgctgatactcagcgactgggcaaacgcactaacactcgaccctgctgagattgacaaagagcgcggagtgatacacgaagaatggcgcgaacgaactgggcctaacatgagaatgctcgaacgcaacctgcttaaactgtattcgggcacaaaatacggtgcgcgcttccccatcggactgatgagcgtggtagataacttcaagcctaaggagctacgcgactactacgaaaagtggtatcacccctccaatcagggtattatcgtggtgggcgacatcgacgttgcccacaccgaggccatgattaaaaagcttttcggcccgttgaagaaccccgataaccaagcgaaagtggtagatgtacccgtgccagacaacgaagaacccatcatcgttgtggataaggacaaggaacaaccaagtagcgcagtcgaggtgtcgttcaaacacgagatttggcccgactcactcaagcgcaacatagactatctcttggccaattatgccaaaaatatggccctaggcatgctcaacgaccgctacgccgaagccgttcaaaagtctaccgattgcccttatctgggcgcttcggcctcggatggcaacttcatcttcgccaaaacaaagggcgccttcaccatcagcgccaccccgcgcgacatggctggtacagccgcagcactgcaagctgcccttatcgaggcgcatcgcgcggccaagttcggattcacacagagcgagtacgaccgtgccaaggccaacttgctcagtgcattagaaaaggcatataatggtcgcgacaagcgtgctaacgcctcgtttgccgacgattacaaaggccatttcctatcgcaagagcccatccccgccttcgaagactattacgagataatgaagcagttggtacccaacattccgttgaccgacatcaacgccatgttgccacagctgttgccacaaacggatcacaatatggttatcgtaaacttcaacaacgagaaggaagggaacgtatatcctacacccgaatccctcttgcaagctgtgcatacagcacgccaaaccaaggtggaaccttacgtagacacggtgaaagaggtgccattgatgatcaagttaccccgtcctggcaagattgtaaaggagaaaaagaatgccgaactgggttataccgagctgaaactagccaatggcgtgaccgttatattgaagaaaaccgactttaagaaagatcaagtgaacttcgctgcaagtgcacatggtggcaaatcgctttatggaccgaaggattataccaatctagccgtgttcaacgacattgtagccatcagtggcttaggtggattccgcaacatggaactacccaaaatccttgcaggcaagatagctaacgcaggactttccatcggcgataagtacatgggtatgtcgggtggatcgtctaaacgcgatgtcgaaacgatgctgcagttggctcacctgtatctatcgggtggcatcaccaaagacgcacagtcgtttgccacacttatggactcgtggcgtacggcccttaaaaaccgtgccctaaaccacgatatcgcctttaacgactcgctcgtagcaaccgcctacggtcataacccacgtctgttgcccgtgttggagaaagatttacccgacatcaactacgatcgcatactgcaaatagcacgcgaacgtacgaataacgccgctgcatggacgttcagtttcattggcgacttcgacgaaccgcagctccgcaagcttatatgccgttatctcggctcgctgcccactaagggaaaggtgattaagggacatctcaccagctcgtttagcaagggtaagatagagaatgtattccgtcgcaagatggaaacacccaaggccatggcttgcgttatgtggcacaccaccgacgtaccatactctgtagagaatgccgtacgtatgaacatgattggtcaaatactctccatggtctacatcaagagcatccgcgaagacgcatcggcagcttactcggtatcggcagagggtggatcaaccatcgagggcgactatcacgactactccgtgctggttacttgccccgtaaaacccgagaagcgcgacaccgctatggctatcatctaccgcgaagcagagaacatgacgcgcacttgcgatgctgccatgctcgacaaggtgaaagagtatatgctcaaaaatgtggctagtgccgagaaaaccaatgcttattggagtggcgttatcaacatgtatcgccgccatggcatcaacatgcacacccgttatcgcgacatgataaagcagcaaacacccgaaaagctgtgcgcgctgatgaagcaaatcttgcagagcggcaaccgcatcaccgtcgaaatgctgcctcaagaatagcagataataccgcttaaacgcgaaaacaagtactattagaatcatagagttagtttaaaaaagtttgtgatttaatggtttgatgaattaatggaataacaagctggttcgagaagaataggttaggcagagaagcagattgggggaaggttggtcttcatgtccccattgtacggcagaatcccctttttaacttctctgctccattaattctttgatggtttttataaccatcttcaaggcttcgatgccaaactttcaaggcgaaagccacacaacagactgcttattgtatgcggccaaaactaaaaaggccgttatataacccgcccctgtgttaggttaagggcactaaatggacctattgtctaagttaaacgccgacaatcgcccattcaatgccctgcctaaaactggggctttttatatcaaatgcctattacgacatcatttaacccccaatcggtcattagaacccgtacatagcttaacgtaaattcgggataagaggcggtgttttttgacgcaaaattagataagaaacgcatggctacctcaccaactaccgcgtggcggttggcgcaacatcccgcacatgtacataggctatgatgatttgttccttatcccgaactcgccaattaaccattccatcgttcgcattttcatagtcccgaaaatgccctttctaagccttgattatgcattattacattaaccaccgtgttatatatgctttggacggctgttccatgtcatctggaatgctgttccagttgaattggaacactgttccaacttatctggaacaaggttccatcttagctgtaacaaggcgagaggttaaaaagctcactacacgagcttataacgtggggaacgaaagatggcgtttggaggtaggaagggtgattagttgggggtgagaggctgtggaatgagccacctagatagtgccaagctaatatcaaacgctacgagaatttgggataagagaaattcgttgtgctaactaccgcgtagccctaattggtgaggtagccttttgttcttatctaattttgctcaaaaaaacatcgtcgcttatcccgaactcacgccgttactcttatctcaaacaggcataaacaaattattctgaataacaaaacatgtttataacgtatttttttactgcaatcagattgaacgactatactttatagctaaagcaatgccactccgcttagagcacgttataaaacacataagcccctccgaagaggggcaatagggtctaagcccttcggcatatagccttattgtgataagatgtagaatatcttatgctgcaaatttagcaataacatttggctctaccaaatatttaatgtaattttacacctaaatcttaatacgataataaacaactaggaacaaacaactccataactaacgattatgattacacgaatattaggccttgatacaggcaccaacagccttgcttgggctgtggtagacagagatgccaacggcaattacacactggtgaaacgtggcgacgttatctttaccgaaggcgtaaagatagagaaaggtatcgaatcgtccaaagcagccgaaagaactgcgcacaaagcattgcgagtacattattccaggcgacgtctacacaaaattgatacgctgaaagtacttgtagaactcgacctatgcccttatctttccaacgaacaacttaacctatggaaggctaagaaaacttatccgctcaccgatgactttatgctttggcagcgttcgggtagtgccgaagagaacaatccctattattgccggcatcgttgcctaacccaaaagctcgaccttaccgaccaaagccagcgctttcttcttggtcgggcattctatcacttggcgcaacgtcgtggatttcttagcaacaggctcgacaccagtgccgattccgacgagtcgggcaaggttaaatcgggcatagcagagctttctgtcgagatggaaaaggcaggttgcgagtttctaggcgagtatttctatcagctctacaagcaacacggcaacaccattaagctaagaagccgatacaccgacagggaagaacactataaaaaggagtttttggctatctgcgaaaaacaagaactagatcccaaatgggttgaagcactgcaaagggccatatatttccaacgcccgttaaagtcgcaacgcaagggtgtaggcaagtgtaccttcgagccaaagaagccgcgttgcgccgaatcgcaccccgattacgaagcgttcaggatgctctgcttcctcaataacgtcaagatacaaaccccaaacgacacttcgctacggcctctaaacgaagacgaacgcgaaaagatatggccactattcttcagaaagtctaaacccaacttcgatttcgaagacattgcaaaggcgttggcgggaaaaaacaactatgcttggtataaggatgcaggcgagaaaccattcaagtttaactaccgcatgcaacaaggcgtgtcggggtgtcctgtaactgcacagctgatagacatcttcggcagtgattggcagacagccattgccgagacatacacggccgttgaaaagaaaaacggtacgaaaaccatcgacgaaatggccgatgatgtttggaatgtgctctattcattttcttcgaaagacaagttaaagctttcgccaccgaaaagttgcaactcgatgaagccagcgccacgaagttcgctaacgctaaacttcctcatggctttgcttcgttaagccttaaagccattcgcaacatcttgcctttcttgcgtcaagggttcatttatgcacatgccgtgcacttggccaagatacccgacatcgttacaaaagccgtttggaacgatgccgacaaacgcgagatgatactttcgggactaatggagattatcgaaaactataaccccaaagaccgtggcgttgagggtacgatagacttctgcattaaaagtcacttgcaagacgtgatcgacctgcgccctggcgcagccgatgcgctttatcacccctcgatgatagagacctatcccgatgcaaagctcaacaagatgggcgtgtttcagttgggtagtccccgtaccaacgccattcgcaaccccatggccatgcgctcgctgcacatcttgcgcagtgttgttaaccagctgttgcgcgatggcattatagaccgcaacaccgaggtgcatgtagaatacgcccgcgaactgaacgacgccaacaagcgcaaggccattgccgactaccaaagagaacaagagaagaaacgaaaacaatatcgcgatgacatcatcgccctctataagagtgaatgtcacaaagagatagaacccacagacaccgatattctcaagttccaattgtgggaagagcaagaccatctgtgcttatatacaggcacccagattggcatctgcgatttccttggcgacaatcccaagttcgatatcgaacataccgttccccgaagtgttggtggcgacagcacgcaaatgaacctaacgctctgcgatgccacttttaataggcaggtgaaaggtgcgcaactaccctcccaactatctaaccatgctgacatattggtaagaattgaccattggaaaagcaagtgcgaagacctgcgaaaacagctagacaagatacgcacctatggtggtatggagaaagcaatgaaagatcggctgatacaaaagcgccatcgtctgaagatggatctagattattggcagggcaaatacagccgatttacgatgaccgaagtcaccgaattcagtcgccgtcaaggagcgggcatcggtttggtatcaaagtatgcgggattgttcttaaagtcgctcttccacaacgaacaaaatcccaacaagagcaacgtctacgtggtgaaaggcgtaaccacagccgagtttaggcgtatgtggggacttcaaggcgagtacgaaaagaaatcccgacttaaccattgccaccattgcatcgacgccataaccattgcctgtattggtaaagccgaatacgacaagatggctcaatactatcatgatgaagagcttttccaatggcgcggcacaaccaccaagccccatttcaataaaccttggcccacctttaccgaagatgtgttggccatagagcaatcgctcttggtgaaacacctcaccaaagacaacatgcccaaacaagccaagaagcgcgtgcgaactgcaacgggtaagtatctcgctcaaggcgatacggccagaggctcgcttcacaaagacacctattatggtgctatcgagcaagatggcgaaattcgctatgtgcttcgtaaacctttaaataagttcgagaatgaagcggagcttgaaaaaatcgtagaccaagccgtaaaggaaaagataaaggaggctattgccggtaagaacttcaagacagccattaccgaacccatatttatgaataaggaaaaaggcataaggataaataaggtgaggtactatgtgaaagctcaggagcgtttaaagattcgccaacagcgcgatctctcctcaaaggaatacaaacaatttttctgtgtagaaaacgaaagtaattatctattggccatctatgagggagaattgaaagggaaaaaagaaacgcgatttttgtgttgtcaacaacttggagtctgccgcttgtttaaagaggagcaacaaaggtaaagcagccccacttgtacctgaacggagtgaagaacgaaatctccctttattagccgtactgaaacgaggaacacaagtacttttttatgagaactctcccgaagagattttgtttgacaatccacaagatttggtaagacgactatataaggtcacaggaattaataccaaaaaggatgtaaagaatgggaagacgtacctctatggtaatattgagttgaggtttcatcaaaacgctcagaagaaagatgacgtgaagatgcaaagcggggtatataagaataatgaggttctacgccaaggcatagtgctttcgcataagcaatttaaagcccttgtcgagggtgtcgactttgagtttaacgtccttggggagataaagaagaaagagcgtcatgcttaaaagatgtctcgtttttacaacaccagctgccctttcgttaaaaaatgcacagctggtgataaccttaaaggaacagcccgacgcttgtcggactgttcccattgaagaattaggggtcgttttggtggatagtccaatggtaaccctaaccatacccttgataaacgctttggccgataacaacgttgcccttattttctgtaaccaaaagggcatgccaaatgctcttttgcttagcttacacgccaacgccagtcaaggcgagagctaccgcgaacaaatatctgtaagcgaaacactaaagaaagcattgtggaaacaacttattgaggcgaagattagaaatcaagcgcgtttgctcaacaagttgggtaaacgaggagagctgttaaaaccgctttatatgaacgtgaaaagtggcgacacggacaataaggaaggtgtggctgctaaactgtattggactgaattgtttggtaagggctttcggcgcgaccgcgatttaccaggcctcaacaccttacttaactatggttatgcggtgctacgtgcagccactgcacgcgccttaatggcttcgggcttgcatcccgcctttggtttatttcatcgcaaccgaggcgacgcctttcctttggccgatgatgtaatggaaccctaccgcccttttgtcgatgaaatagtatgtaagctggttgcagaacaagcacttagcctagataagaacgtgaaaagccaactaatcagtgtgttgttttgcgatgtctcgttctcgaaagttgttcggccactcagcgttggcctaacaatgacaaccgcctctctagaaaaatgtttctcaaaagaagccaataagatgcaactacctatactcaaatgacctaccttcgccttaatcgttaccatatcatgtggcttttcctaatgttcgaccttcccacaaacaccaaacttgagcgtaaagaagctgcccgttttaggaaagacctcgaacgcgatggcttcaccatgtatcaatttagcgtgtacgtacgctattgtggttcatacgagagcatgaacgtacacatcaaacgggttaaatcgcttgctcccaccaaaggtatgataagcatcttggccgtaaccgataaacaatattccagcattatcaacgtatggggagaaattgcagcaaaacaacacccaaagcccattcaactagagtttttttagtaactttgtattaaataagcctcatcaaacaacttcatatcgcccaatatggttttcaaacagttgaatatcagtaatgtaagtggtatatgttgtggtttgatgtagaatgaagatataatacaaccagggcctgcgcacacagcagcaactcgcagttgtggtttgatgtagaatgaagatataatacaacaacgcctcgctacttgcttttggtgcaacggttgtggtttgatgtagaatgaagatataatacaactgtttcaagcatcacaaccaatgggaaacggttgtggtttgatgtagaatgaagatataatacaacggcataagattttcaagattatacttcttgttgtggtttgatgtagaatgaagatataatacaacataaatcgtgtccatatattataatgctaagttgtggtttgatgtagaatgaagatataatacaacagattgtacccgttagaagcatgggcgtaagttgtggtttgatgtagaatgaagatataatacaacaaagtagcccacgatgcacatgcacgccggttgtggtttgatgtagaatgaagatataatacaacttggcaggtattccgcactatgcaggcggagttgtggtttgatgtagaatgaagatataatacaactgagagaaccaatctctgggagaatagacggttgtggtttgatgtagaatgaagatataatacaacggtgaccgctgcgcttgtcaggctgaaatagttgtggtttgatgtagaatgaagatataatacaaccaatatgaacgaacaaattcaaagcatcctgttgtggtttgatgtagaatgaagatataatacaactacgcgtcaccgaacttgcacgcatccacggttgtggtttgatgtagaatgaagatataatacaacctcgcgtatggaatgacattgcccacatcagttgtggtttgatgtagaatgaagatataatacaacgaataaatcttattataagcagcgatgcggttgtggtttgatgtagaatgaagatataatacaaccaggtagcaataaaaagaaagtggacaagggttgtggtttgatgtagaatgaagatataatacaactcataaaatgaattagcaaaaaacttgtcagttgtggtttgatgtagaatgaagatataatacaaccgtgtcagttttcgtaatatagaacaaggggttgtggtttgatgtagaatgaagatataatacaacaaccattggcgcacgtgatcaacatcaacgttgtggtttgatgtagaatgaagatataatacaacattatatatcttattataagcagcaatcctgttgtggtttgatgtagaatgaagatataatacaacccacatgcagcgtgacgatggctgagcgcggttgtggtttgatgtagaatgaagatataatacaactaacatccttaatttctcttgcaataacctgttgtggtttgatgtagaatgaagatataatacaactatacgagtatgagcggaatatcacccgcggttgtggtttgatgtagaatgaagatataatacaactggtcttataatatttgttgtcggcttctttttgtggtttgatgtagaatgaagatataatacaacgcacgttggggttgttcttgttgtagggcagttgtggtttgatgtagaatgaagatatattacaacagaaaaaggccatcgtagctggacttgacagttgtggtttgatgtagaatgaagatataatacaacaaaagacgggtttcagggaaagcattgtcggttgtggtttgatgtagaatgaagatataatacaactgttggtgagccaatcatagaggttgcacagttgtggtttgatgtagaatgaagatataatacaactacgcagaacttctactcggcgcgcaataagttgtggtttgatgtagaatgaagatataatacaatggtgaggtccatcttgccgaagggcgagtgttgtggtttgatgtagaatgaagatataatacaaccggccttatccgtcatgtgaacgtgcagcggttgtggtttgatgtagaatgaagatataatacaacaaagcactggaataaccaacctagcaaatgtccattactaaaacccgagaggttttcagcctacaaaatgtccattacgccatatgatacaactactgcactttctatctcaatagtacttgggacaaacaacttacgttgttctgaattcatcgagctcacattaattatggtgtgtccttttacgccttctgtttgttgtaaggataggcgcgtagggaaaagtgattggggatggacaataacgaaaaggggatggcagaagctaatctgccatccccttttgggttttgccacttggcaaatgtgtgagacttatttcaccattaccttggcaaccttattgtttattgtaacaacatatacgcctttgggcagagagaagctttggcttgtgccgttcatcttggccttctgtaccagaccgccatttatgccatacacgttaaccacgcttcctgctgcggcttctaccacgataccgccttcaacaaccttgataaaggtgtccgtgttgtcggcatttacgccctcgatacctgttgcatcgggtatgaaacggatgtgtttggtgtgtaggagcagtttggggaacttggcattggtcattacgcaaaccaagtcctcgtaacgtttagtcagtttcagcgtggtaacaccgttggtgacggtgtattcggcgtctacatcaaattcttcgccttgtaggtttccgttcttatccacgttcacattgccagtaaaccagcggtagacggtgggtgttccgtcgataacagcctctgaactgaggtctaccttgttgccgtttacgctagcgtcaacggggttttgcctttgataagcatacgatgtacggtaggaaccagttgtgggaggcagcgcagagaaacggaggttgttggcaacaaggttcagcgcacgcaagtgggcattgttcttcacgttgatagacgtgagtttgttattgctaacgaagagttggcccaagttgggtagtcgactacaatcgagcgatgtcatcgagttggctgttaagtcaagactctccaatgcagtaagtccacggaagttaacctctgtcagattgtttcggctaaggcttaccacaatcagctctttgttcttagaaaggtcgagcttggtaagcttattgtcggacattgacaagtattcgaggttgggatacttcgaaaggtctatttcagagatgttgttgcggctaaggtctagctgtttaagagcggtgctaggcgcaaagtcgaacttggaaaggccaacgttgtctaatgtaatggctcgtgtgtctgccaacttgctgatatctaccgaagacatcttagcattggtaatactaaatacggtaagtttctcttcgggtttcgacaccaagacgcgcaccttcacgcctttgttggtaagggcggtgaagcgtgtgtaggtattggccttcaaaacgtattggctcatggctccgtcgccacgccaatcgaagtaaacagacatgccatcgatgttgccacgtagtgatagctgaacactatctctgttgtttgtggtggtaaaagatgccagttcgtttgttggtgtggggatgggttgcaccaaggtggtctttaaaatattcttgccagtgaatgcgggataggcagggtgtgatatttcgcaatacactttgcctttggttaggttcttaaacctagtagagcccttgtcgtttaagtagtcggttcctagaacgtagcttgtccgccttcagttttccaaacgaagttagtggtttggttgttgatggttacgtattgctcagtgaggtcgataccaggtgatgtggtggcaatcaccacttcgcgttgcggtgcatatatgaagtgagcctcgtctagaccgaacctgttgggcatgttggccagtgtgaagtggttgttgctaatgtcgagtttggcaactggtgcgagggggataatgcccagcaaggtaagctcgttgttagaaacgtttagttctttgagttgctcgctgtggtcgagaatcaggcttgtaagcttgttgtgcgataagtttcctcttaccagtgcgtcagcgcgtcgcaggtcgatgttggccaagttgttgtggcttaaatcgaagtcggtaatagtgaagtaatcgtctaccgtgatcgtttcaagcttgttatgactgaggttcacgtgtgtgagcagactcttgtattgcgacttagacttgccttttagcgagatggttttgaactggttgtgcgataggtcgagcctctcgagctggttgttgcgtcccaagtcgatggtggtaagccccgtgtttacgagcgacagcacacgcaggtctgttagttcggtaacatctatgctcgtaatgttcaagtctttcacttcaagtgccgtcacatagttgtcttgcggaacggtcaccacgatgtttccgttccctactcgctggccagtgatgttggtagcagtgggcttttcggccgtgatgtctacttctttttgttggccgttgccaaagtcaaccttaacttttacaggtttttgtggcgttgcacccttcattcccacggttaggctgatggtttgccctgccgttgcggtggtggcaaagtcaatggcccttacgtccttaccaaattcgttatcgtctttaacggtgaatggctcggtgaatagcggatattcgttgaaaacgttgttggtgaagataagcaccaccttgccatctacgggcctaagcagtgtaacctttccgttttcgtagtaatagtagctggcgtctagctcagtacgtttggccaacgtatctttatctagcttgtagagtttgcccaatgtggcagttccttcacgcaacacttgtttagagaagtcgagtacggtgcccaccttataggtatcatccagcactaggtcgcgttggtcatagtaatactcgcgccaagtgttctgcggtttgggcaacgaggcgaaagtcatcaagtttttgcgtatgttgaagatgtacaagtcgggacatttgctcacatctatagaagtgagtttattgtggtttgctcccaaagtaaccagcttaggcacattgctcaggttaatcgagcgcaggttattgcctgcacaatataagtggcgcaggtctggacagtgggtcaggtcgatgtcatcgaacttcacatcggtattaatcgaacccgaagcatgctctatgtagagttcgttcagtttggagtttttgcttatatctagcttatttactcgcgtgtcactaacgttcagtacattgagattggcgttatgcgaaacgtcaatggtgctgatgtcagtcatgtcaaggctcaatcggcgcagcgtggtgcaacctttggtatctacctctgtgatggtgcgacagtggtaggcgtcaaaagaaaccagtttgggaaagttctttaactcgaacttagactgtacgtatgcgcattgtgcaatttccagttccaaaagttcgggcatgttgcccagcgcaagcggcgtttgtgccgagaagggattgtctcgcaggtagaggaactgcaacgatttgaggttggaaaggtctatctgcttaatggagttgtaggccaatcgcaggtaagacagtttcaaatccttatgaaaggtaatttggtctatcttacaacccgtagcgttgaagaagtcgattttgcttggatcgccgtaaatctttacgataccgtccttcgtaaccgttcccgagtaatctgttccagtgggcacttctgcgccttgttgcagtttggcaacgccaacggccaattcttcgggtccgttaccgcagtctatgtctacatattcgttcccttgtgtgctaccaagcgagaaggttacgataggcgtttcgcctttattgtcgtcatacacggtggtatggaatgagatgatgagttgctgatttttgttctgtgcgaacgccggcagacccatcacagccatcaatgccaacagcaaagatgcaagtagggtttgtttgtaattcatacgctgttagtaaataataatttttttcgctgattttccgttcacttggataaggtaaacgcctttgctccacgcgttggcgtcgatggttgtttcgtctcctactgccgacatggcgtgtgcaagttgccctgccatagtgaaaacgcgcacttccaattgcttttcgccagccctaaacacgttaaagcgccttggtccagctggggtgataatggttttgttgtcgacttcggctgtgttgatgcccgttaagcctgacttacggcgtagcacttctttcagtccagcataggcatcgaactttcctgcgccccattgtacggggtctccttctttcacatcactgtctacgacggccgtcttgcggatgatgtcggcgatgtctgcaggtttaagtgttggatcggcttcgagccaaagggcgatagaacctgccacaactggcgttgccatcgatgtgccaagggtttgatgccagtaatagctcttgccgttaactgtgtgcttagcttgcaagccgacatcggagtagccgttcttggggtcttcaaccgtgtaggtgttaaccgatgatataaccactgcaccaggtgcacaaactagtggcaggttgcgaccatcgagcaatgtaccgaacgacgagaagcgcgaactcttacctttgggaaattcgttattgttgtaaccatacacatatccgtccatagctgcccagtggtcgcgaacgttatagcttcctacggtaatcattcccgcggcacaggccatgtcgttgatggtgccgttgcgtgagcccttcgaccaaattccacttccatcggcatcgttgtatgcgccatcgtagtcgtcgaagtaaacaaactgcgcatcgccatataggtctacacgtttgccggcctttccttttacaaggatacccagtttgtagttcccgttggcgttggtcttttggttgtcgctagttaggaaacgggcaatggcgtagtagcgacccgtttctggatcctttgttccacccaccattacgtatccttcgaaagcttggttgaaaaccgagttgttagttatcgctccttcttcggcatattcaccacccgaggaatacatggttagcttaccgttgggactgggttctacggtaatacgtgtggctatacgacctcgtttctcgttaaagacaaccacttgcatctcaaactgggtggcgtccgaactgtaagcatacacctgcccattgcgcagattgtagtaatctttgtttcctacggtttgttttcctgctgccatcgggcgtataaaggtttgcaacaggttgtcggtttgggtgaaagttttgttaagtgccacgggatagtcggcctcgttacctgctgccacacagatgatggcactgtcggtgcagctgcttaagaagcggttcatcacgcttgtgctgtcgtgcgaacccaggttactgcctaacgagagattgatgacacatggtttggcctgtggtccggataggcgtgcgtattgataaacgtcgtcgatgcccagtgcaatgaacatgtcgcgcaggtctccgcacgaagccaccaactccgattccgttgctattccataatagggattgtccatctctatgtttttcgaagtcttgttgtcctcggtatgggcaacggtggctttccccttataccctccggccattattcctgtggtgtgggtaccatgaaactgccctctgttgtcggtttcaaagttttcaatggcaaacacgttgtccatagatttcctgtgtttggcaatttcgggcaactgctccttagggaaataactctcccaaatgtatccgtctttacctgcactgctggtgtaaatcttgctgacataaccatatcgtgtgcttccgtcgggtttaagaaagttgatgttgttagggtcgatgcctccgtctacgatgcctgttaccactcctttacccgtgtaggcttgtggcaggccaacgccttggtgtattttgtttacgccaacggcttctctaacgaggttcattttctgtgcaacaggacgcgagagttgtattctgcgtacgcatttcagttcggcgatgcgttcaacgccatttagcggcatgctaacgatggcgatgttgccttttacccgaagtacgctcacatcgtttttggcaagtgttccaagagcttctttcccgtcaaactcaatcatgccaatcgttcgttggggctttgcattaccctttacgatgc

SEQ ID NO: 4564 - DNA, 21704 bp, synthetic construct
  misc_feature 1..21704: note = Synthetic
  source 1..21704: mol_type = other DNA
  variation 19608..20073: note = note, n is a, c, g, or t
tgccatcaagcctgcttggtggaacaaggaggttacggaattgctgctgggagagtattccagccgtaagtataagctttttgtgacgcacatcgacccgacagcgtcactgaacgagagtatgttgtctgacgctccttggaaagcaaggaagttggttcagaagtttaaggaatggctgggcaagcatcccgaccaggccgtagaggaagacggttcgccaatgaccgttaaagtgtgacaccttataaaatagaaaattatgcggaacttgagatatgcattcgtagcaatgcttatgccgctgatgctggcatcatgttttagtgacgacggaaattacgaatacgagtcgttgaaaccgcctacatggctcgataattttatggatagcccgatacaggtattggtttatggcggtcggcccgtaaggcttgatggctcacgctatttcaattggggaaaactggattcgttgcagcgcagccaagaggtgcgttatgagtggcgaatgaacggaaaagtgtacagcacggaattgaaggaggagatgaccactgatgagttcttgaaaagaatggggcttgaagaaatgcctgtcaaagagcagtctggtgacttctccatcatcgagaaatcttcgggtgtgacattcaaagtgaaatgtacgctgttttttaaacctgcaattggtggaggcgactttgttgtttattccgccatgggggccaacatgccaaatgtgggtaaactaaccgtgtttaggcttaattacttgaaagagaagggtaagctgaaagaaaattttgagtttggcaagtatgtggtagacaatgttcctggaacgccaaggtctttggatgtggctgtagcgaagaatgtcggtgctgccggctcgctcacgttgataaccgaagaaggtgatgcaatggtgtataatgcaggcaatttgaaaaaggaatgggatttaagttcgcagtttgccgatggctcacccgataactttaaggttagcggacggaaagaccaggaagatggtggtatgaatacgcctgccttgacttgggttgctacgaaagacgggcgattgttctcacgccagtttggtaagaactatttgggcggaaaattcatcagcgatccatattatatagactcattgggctataagattaccaaattcggacacacgaattggggagtgaccaatgtgccctgttatgatgagaagaatcgaagggttgttttagcaactaccactaactcctcggatttttataagtatcgcagctttgtggtaacgcttcattcagaccaattctattcgcctgcggaaaaaatgcccgaagacgcgaacgtttattaccttacgacgatgaatggggatgaataccgtgacaatcgtaacagttggtttcaggcttactacaccacaggaggaaaatctatggtagcttgtttcgccgtagacaattacgcgcgccgattgacttacacgatgaactatatgagtccgtatgaaataccagggcacttgttcacaaacgagactgtgttcctaacggcgtcgggagagcagcttagcggaaactcttcaaaggcctataccgatttgttctcagaggggatggacatttatgctattcaacgagacggcaatagaacaacttttggtgcaaacgaaataacaattaagaaaatccctttggaaggaataacatctaaaatcacctatatggtttatgatgttacgggctattgggtggggcttgatcacgaatatccccatctagtggtaggttgcgaaaatggcgacgtactgatttactacgcggttcctgttgcacatccgcgattaatgaagaaatataacgtaggcggacgcgtatgcgctatcaagcaagtggccatgcctagtggttatcttgacttatattaatgaatacaacaacacggccatccccttacccaaggtggtggggtggccgcaaaacaaaaacagataaaatgcagaacatgatggttttaaagagaagtgccggcgcactgatgatgctgttggctggcgcgtttgccgtgcaagcgcaaagtgtagataaggtaagtctaaacgttagcgtggccaacaaggatggcgcgccaactgttacgctcaaaaagtcggccgaatgccaagcgtattgtctcgcgctgttcacatcagacattgccggcatcatcaaagacgaggttgttgacggatatttcacgggtcagaagaaaccccgatacaccgacaacgtcaaagataagaaactggtagactacggattggtggttgttccggagaaagaatacaccctcatcgcccttggctatggcaaggacggcaagcccggcaaggtgtctcgcacgcagtttaccgctcctcgcagacaaggtttcgcctcggcgcaggtgctggcacaggtaatgaacatcggacccgacagcgttacggtgaagtttacgcccaacaccgacgtggctggctacgccttatgccagtttgagggtggaaccatcgaacaaaccgtgaaagaacacggccccatgatgggtttctctaacgcttacgacatgattaagcagttcagcggcaaagactacaccaccgaaaaacaacacacttggcgcgagatggtgcccgatgccaattacgaaatctgcgtgttgccatgggataagaatggcgttttccaagaaataaccaaggttcccgttaccacaaaaaagcttggcggccccggcgaagccacagtcgacataaagattggcgagtttggcggaagtaagaaaggcggctactatcaagatgtagtgtattcgcccaacgaccaagcatcgttgcatcgcgacatcatcatcaccgaagaggcctttaacaaacccgacatgggcaacatcggtgttatcaagatgctgcaaaccgaccatcccaaagacatttactggaaccaataccgcgtggacagggcaagatggaacgctacaccgctcaccacctactacgcttgctcgatggctaagaacgtagacggcaagtggggcgaacttaaaaaggtgaagttcactacgcctgccgcaaaagaataacgcgaaatctataaaccgctcttgatggaaccttgattttagctggcatactttgctcattgctaggtggttcatggcaatcgtgtacccctagccatgagcaaatggtgcccgcctaggcaaggtatggaataaatgggcggcaacgaacaatcgcaaggtggcatttcggggtagcttaaagccagttctaaaaagccaataaagtttatttcaggagccagcctttgtaaataacggcagccctattcgataacagagcatatccagaacatgccttaaacccaaactaaatagcaggtaggacgaaccgccctcggcgcatttctcctccatctcggcatctcgcgctatccaaactatacataacctaggggtatttcctaacactttcgcccccataaccttgcggatgccgaacgagatgcagctgggacgggcctgccgtgctacgtttgtcgagggtaaactgatgacttaacatcgctaacaagtaaccgatttattgaaacaagaatgagtaacctaagaacaatcctgcggggctgggcactcttagccctgcttgtccccatcaacttgcgtggacaaggcgttaaccaggccccacccatccccgtggacactgccgtaaggataggcaaactgcccaacggactgacctattacatacgccataacaactggccggagcatcgtgccgacttctatatcgcacagaaggtgggctcgatacaagaagaagagagccaacgtggactggcccacttcctagaacacatgtgctttaacggaacaaagcatttcccaggcaacgaacttatccgttacttggaaacgcttggcgtgaagtttggcggcgacctcaatgcctacacctccatcgaccaaaccgtttacaacatatccaacgtgcctaccacgcgccagacggcactcgactcgtgcttgctgatactcagcgactgggcaaatgcgctcacactcgacccaactgagattgacaaagagcgcggagtgatacacgaagagtggcgcgaacgcaccggtgccacatcgcgtatgctagaacgcaacctgcctaaactctattctggaacgaagtacggcgcacgtttccccatcggactgatgagtgtggtggacaacttcaagcccaaagagctacgcgactactacgaaaagtggtatcatccatcaaatcagggcattattgtggtgggcgacatcgacgtagcccacaccgaggccatgattaaaaagcttttcggccccttgaagaaccccgacaaccaagcgaaagtggtggatgtgcccgtacccgacaacgaagaacccatcgtcgttgtggataaggatagggaacaggccaacagctcggtagaagtatcgttcaaacacgaggcctggcccgactcgctcaagcgcaacgtagactatctcttggccaactatgccaagaacatggccctaggcatgctcaacgaccgctatgccgaggccgcacaaaactctaccaactgtccttatttgggtgcatcggctgccgatggcaacttcatcttcgccaaaacaaagggagctttcaccatcagtgcaacgccgcgcgacatggctggtactgccgccgcactgcaagccgcactggttgaggcccttcgcgctgccaagtttggtttcacccaaagcgagtacgatcgcgccaaggccaacttgctcagtgcattggaaaaggcgtacaatggtcgcgacaagcgtggcaacgcctcgtttgccgacgattacaaaggtcatttcctctcgcaagagcccatccccgccttcgaagactattacgagataatgaaacagctggtgcccaacatcccgttaaccgacatcaacgccattctgccgcagctgttgcccgaaaccgatcgtaatatggttatcatcaacttcaacaacgagaaggaaggcaacgtatatcctacgcccgaatccttgttgcaagccgtgcacgccgcacgccaaaccaaggtagaaccctacgttgatacggtgaaagaagtgccattgatgaccaagttgcctcgtcctggcaagattgtcaaggagaaaaagaatgccgaactgggttacaccgagttgaaactggccaacggcgtgaccgttatattgaagaaaaccgactttaagaaagaccaagtgaactttgccgcaagcggacatggtggcaagtcgctttatggtccgaaagactacaccaacttggccgtattcaacgacatcgtgtccattagtggcttaggtggattccgcagtatggagctacccaaaatacttgctggcaagattgccagcgcaggtctttccattggcgataagtatatgggcatgtcgggtggttcgtctaagcgcgatgtcgaaacgatgttgcagctggcccacctgtatctgtcgggtggcatcaccaaagacgaacaagcgtttgccaccctgatggactcgtggcgcacggcacttaaaaaccgcgccctcaaccacgacattgccttcaacgactcgctcgtggccacggtctacggccataacccacgtcttcgccccgtgttggaagccgacctgcccgacatcaactacgaccgcatactgcaaatagcgcgcgaacgcacgaacaatgccgccgcatggacgttcagtttcatcggcgacttcgacgaaccccagctccgcaagcttatctgtcgttatctcggctcgctgcccactaagggaaaggtggttaagggtcatctcaccagttcgtttgtcaaaggaaagattgagaatgtgttccgccgtaagatggaaacacccaaagcaatggcttgcgttatgtggcacaccaccgacgtaccttattcagtggagaatgccgtacgtatgaacatgattggtcaaattctctctatggtttacatcaagacaatccgcgaagacgcatcggcagcctattcggtgtcggcagaaggtggagcaaccatcgagggcgactaccacgactactccgtattggttacttgtcctgtgaaaccagagaaacgcgacacggctatggccatcatctatcgcgaggcagagaacatgacgcgcacttgcgatgctgccatgctcgacaaggtgaaagagtatatgcttaaaaatgtggctagtgccgagaaaaccaacgcttattggagtggcgttatcaacatgtatcgccgccacggcatcaacatgcacacccgttatcgcgacatgattaagcaacaaacacccgaaaaactgtgtgcgctgatgaaacaaatcttgcaaagcggcaaccgcatcaccgttgaaatgctgccgcaagagtagaaagacgtttaaaggtgaaagggtgtttaaaggtgaaagggtgtttaaaggtgaaagggtgaaaaggtgaaaaaatggtttcgcccaccgatgaacgagtatagttggggctagtttaactggaaagctggcaggtctaaaaagctagcatgcctagaataactagaactcctagtataactagaactcctagtataactagaatgcctagaataactagaatgcctagtacaactagataggctagccccactagcaagctaaactaaatgcttgtcaactcgttaactcttcacctcgtaaccccattcatctttaagtgcggataaacgccaagaaatcatagagtgatgataaaatgtttgtgattttaatggtttgatgaattaatggagaaacaaactggttcgtagacgaataggtttatcagagaagttgcggagaaatagttggtcttcatgtccctttttgggcagaattctcttacacttctttgctccattaattcttttttagctcttccttacagcatctgccatgcaacaaacacgggagggcagccaatatctcgattatacgcaaagcacaaatgggcgttagctaatttatccctatgttgggtaaagggcgttgaatgcaacgattgtctaagttaagggttggcaatcgcccgttcaatggtcttcctggcatagggactttttatttgggtttgttatagttataccccaatcggccattatagtcaaaaagaataggattaggaaagccatagatacaccgtaagcagaccaaagcgttcctttgccccgctaagggtatgctgaaaccatgctatgcgcatcttgctagttgctaacaacaattttccaaaagcaattctgtttggccataaaggttgtaaaaacaaggtgttacgataatcttcctttggtgccgcgaatgcaagcggcgagctaacaatttgcgtatattcagtgtttcccttttggggaaaatgagagcgaatatgttaatgccccatttgtgttaagccctaactgttcattgtccagcaccctttcaatcttccatctttccacccttccatcttttcacctttaaagggcgaagccattttttcacctttcccatcttttcaccttttcactttttcactttttcacctttcccttctttccacctttaaagggcgaagccattttttcaccctttctagttaacaagtttacgagttaacaagtttacaagttaatgagttggtgggcgttagccattttttcaccttttcaccttttcaccttttcacctttcccacctttccgtcacctcctaaaacaaataagcccctccgaagaggggcaatagggactaagcccttcggcatatagccttattgtgataagatgtagaatatatcttattgctgcaaaattaacaaaaacattttgccctaccaaataattaatgtaattttacacctaaatcctaatgggatagtaaataacaagaaacaaacaacaccataactaacgattatgattacacgaatattgggccttgatacgggtacaaacagccttgcttgggctgtggtagacagagatgctaagggagattacacgttggtaagacgtggcgatgttatcttcaccgaaggcgtaaacgtagatgggcaaccggtatcctcaaaagcggccgtaaaatccaaatacaagtctttgcgcgtgcagtatgccaggcggcgtctgcgtaagattgatacgctgagagtgttggtaagtctcgacctatgcccttatctttccgaccaacagcttagccaatggaaagccaagaaaacatatccgctaactgatgactttatgctttggcagcgttcgggtagtgccgaagagaacaacccctactattgccgctaccgttgcctaacgcaaaagctcgatcttaccgatcaaagtcagcgttttcttctgggccgggcattttatcatttggcgcaacgtcgtggatttcttagcaacaggctcgacaccacggccgattccgccgagtcgggcaaggtcaaatcgggtatagcccagctttctgtagagatggaaaaggctggttgcacgtttctaggcgagtatttctatcaactctacaaacaacatggcaacaccgtcaggctaaggagccgatataccgacagggaagaacattatataaaggagttcttggccatctgcgaaaaacaagaactggatgcccaatgggttgaaaagctgcaaagggctttgtatttccaacgcccgttaaagtcgcaacgcaagggtgtaggcaaatgtacattcgaacctaagaaaccctgctgtgccgaatcgcaccccgattacgaagcgttcaggatgctctgcattctcaataacattaagataaaaacccctaaagacgtttcattacgaccgctaaacgcggaagaacgcgaaaaggtgtggccgttgtttttcagaaagtctaagcccaacttcgatttcgaggacattgcaaaggctttggcaggcaaaaacaactacgcctggtataaggatgcagacgaaaagccatacaagtttaactaccgcatgcaccaaggcgtgtcgggatgtcccgtaacagcacagctgatagacatcttcggcagcgattggaaggcaggcattgccgagacatacacggctgttggaaagaagaacggcacaaagaccatcgacgaaatggcggatgatgtatggaatgtgctttattcattctcgtcgaaagacaagttaaaggctttcgtcaccgagaagttgcaactcgatgaagcctgtgccacgaagtttgccaatgcaaagctgctgcatggctttgccgcgttaagtcttaaagccattcgcaacatcctgcctttcttgcgccaaggcttcatctacgcccacgccgtactcttagccaagatacccgatatagttactgcggtcgtttgggatgatgccgataaacgcgagcagatactttcggggctgctggagattatcgagaactataaccccaaagaccgcggcgttgagggtacgatagacttctgcattaaaagttacttacaagacgtggtcgacctgcgccctggtgctgccgatgcgctttatcatccctcgatgatagagccctatcccgatgcaaagcttaacaagatgggcgtgtttcagttgggtagccctcgcaccaacgccattcgcaaccctatggccatgcgctcgttgcacatattgcgcagcgtggttaaccagcttttgcgcgatggcgtaatagaccgcgacacggaggtgcacgtggaatatgctcgcgaactgaacgatgccaacaaacgtaaggccatagccgataatcaaaaggatatcgaacgcaagcgtgcggattatcgcaaacgtattattgaactatataaagacaaatgccacaaagagatagaacccacagaaactgacattcttaaatatcaactgtgggaagaacaaaaccacaggtgcctatacacaaacggcgagattggcatctgcgatttctaggtgacaatcagaagttcgacatcgagcataccatcccccgaagtgttggtggcgacagcacgcaaatgaacctaacgctctgcgatgccacttttaataggcaggtgaagggtgcacgcctaccctcccaactgactaaccatgcagacatattgaaaagaattgctccctggaaaagcaagtgcgaagacctgcgaaaaaaactagacaagatacgcacgtatggtggcatggagaaaaaaattaaagacaagctgatacaaaaacgccatcgcttgaaaatggagctatcctattggcaaggcaagtacgaacggtttacgatgaccgaggtacccgaagggtttagtcgccgtcaaggtgcgggcattggtttgatttcaaagtatgcgggtttgtttttaaagtcgcttttccatagtgcaggtaatcccaacaagagcaatgtgtatatggtgaagggcgtactcacagccgagttcaggcgtatgtgggggctacaaggcgagtacgaaaagaaatcgcgacttaaccattgccaccattgcatcgatgccataaccatagcctgcatcggtgaggccgaatacgaaaagatggctcaatactatcacgacgaagaagtgtcgcgctggtatggttcagccaacaagccccatttcaaaaagccttggactacttttaccgaagacgtattggccatagagcaatcgctcttggtgaaacatctcacaaaagacaacatgcctaagcaggctaaaaggcgtgtgcgtacagctaagggtaaatatgttgcccaaggcgatgccgccagaggttcactacatagggatacttactatggtgttattgagaaagatggcatcctttaccatgtgttacgaaagccaatagacaagttcgagaaagaatcggagcttgaaaaaatcgttgaccaagctgttaaggaaaagataaaggaggctattgccggtaagaactttaaggcagccattgccgaacccatctttatgaataaggaaaagggcataaggataaataaagtgaggtgttacgtgaaagctcaggaacgcttaaagattcgtcaacagcgtgacctatcgacaaaggaatacaaacaattcttctgtgtagaaaacgaaaataattatctattggccatctatgagggagaattgaagggaaagaaagaacgcgacttttgtgttgtcaacaacttggatgctgccgcttatttaaagaggagcaacaaaggtaaagcagctcaacttgtgccggaacggagtgctgaacgaaatttccctttgttggcagtattgcaacgaggtacgcaagtacttttttatgaggattcccccgaagaaattttgtttgataacccgcaagacttagtgagacgtctgtataaagttgtgggaattaatactaaaaaggatgtaaagaaggggaagacctacctctatggcaatattgagttgaggtttcatcaaaatgctcagaagaaagatgacgtgaagatggaaagcggggggtacaagaataatgaggctccacaccaaggtatagttctttctcataatcagtttaaggcacttgttgaaggcatcgactttgagtttaacatccttggcgagataaagaagaaagaacaccatgcttaaaagaagtctcgtttttacttcgcccgcaactctgtcgttgaagaatgcacaactggtgataactttaaaggaacagcccgatgcttgtcggactgttcccattgaagaacttggagttgtgttggtgacaagctaagccttgataaaacaacgaaaggtagtttaatcagtgtgctgttttgtgatgtgtcgttctcaaaagtggttcggccgctcagcattggcctaaccatgaccaccgcctctctggaaaaatgtttctcaaaagaaaccaataaaatgcaattaccgatactcgaatgacatacgcccgccttaatcgttatcatatcatgtggctttttctgatgttcgaccttcctacgaatactaaattggaacgcaaagaatccgttcgttttaggaaagaccttgaacgcgatggtttcacgatgtaccaatttagcgtatatgtacgccattgtggctcgtacgagagcatgaatgtacacatcaagcgagtcaaatcgcttgctcccaacaagggcatgattagcatcctcgctgtaaccgataagcaatactccaatattgttaatgtgtggggcgaagttgcggcaaaacaacaggcaaagcccattcagttggagtttttttagtaactttgtgtcatgataagcctcatcaagcaacttcatattacccagtaggagaatcaagtaattgattaccaaggatgtaagtggtatatgttgtggtttgatgtagagaaacgatataatacaaccgtcaatgatgcagcagggtggagcaatgagttgtggtttgatgtagagaaacgatataatacaacggatgcgcaaaagcaatacacctccgagggttgtggtttgatgtagagaaacgatataatacaacagattggagcgatagtagcaataccaagcgttgtggtttgatgtagagaaacgatataatacaacctttgacgtgaaagtcgggcagtggtggctgttgtggtttgatgtagagaaacgatataatacaactaaattcggtgcttattgtcgatatgccaggttgtggtttgatgtagagaaacgatataatacaacgcacgatttgccagcaaggttaataattctgtagtggtttgatgtagagaaacgatataatacaacaggttgtggagaataaattaatgtgttgtggtttgacgtagaaaccggctagacatttaatgtttctataaatagggaggggcttgttgcctttgtgttccaacacaagataaacacccctctcatgtatgaagtggagcgcaaatcaacttgttggcttatgaactcgcgaagacccagcaactggcaaggacatgaactcatcaaattgcaatcgcaagaactcatcaactattcaactcatcaaccatttaactcacaaaccatttaactcacaaactgctcaactcacaaactaatcaacttacaaacgcacgacctcacaagctcatcaaccaatcagctcatcaaccaatcaccttgcaaactcacaaactcacggcctcacaaccgcatcagctcatcggttcatcagttcatcaactcccaacctcacaaaacttaatttgttgttttaattttacaatatcgttctaattctcgctccgttctagcgaaaatgttggcaataaagtaggtaaaaagccacattttttagcctttcacggtttttgttttgtctgtttttaagcaaaatgcctgcattttgcaccattttgcctttctagattggttgacagcccgccgttttcactcccagaaaacggccttttatccctaaaatatactctatttactgccatttagcgccttttctgcacacgttttcaatcgggcagaaaggtttttgcacctacatccacagcatatttatacatttagccttgtatttaggggcaaatcacggtgcatttagcagcattttaccttgcatttagcaccaaaacgcagtgcatttagcaccaaaacgcagtgcgtttagcaccaaaatgcagtctattttgcatcaaaacgcagtgcattttgctacaaatagcccaaaatctggtgcaaatgaggttttcttgaaataaatattcattttgccgcattcacatcctagcccctttttgcatcaaaacaaaccctcgcgagaatcgattttttgcggcaaggttagtggttggtggataaaaagggcactcttagtgttaaatttcttgctgaaaagcggacaaaaaagagtggctgacgagttgacaagctggcgggttgaaaagctaaggagcgaataagttgattgccgaatcatctttctcatcatgttctgtgcccatcaattcatcaactcatcaactagagttgatagccgaggcatcttttcatcgtgttctatactcatcaattcatcaattcatcaactcgagttgattgccgaagtattcttttcatcatgttctatactcatcaactcattaactcgtcaattcgagttgacagccgcagcatctttcttatcatcttccatactcatcgactcatcaactcatcaactagagttgacagctgaagcttctttctcatcatgttctaaaatacccccgacgggtagttatacggcttatcaattgttttaggttgtttgcatcgctgcctgttcatctttcctttgcttgtcggcatcttgcctgccttgtccttttgacgtaacacgctacgccttcaagaataatataggaaagatgctccacaatacacaagggctgagcaggctctaacggccgattgggataaggcaattgggggctgcgcaataacgaaaaggggatggcagaaaccaatctgccatccccttttgggatttctgccactaggcaaatgtgtgaggtttatttcaccattaccttggcaaccttattgtttacggtaacaacgtatgcgcctttgggtagagagatgctttggcttgtgccgttcatcttagccttctgtaccaaaccgccatttataccatacacgttaacggtgcttcctgttgcggcttctaccacgataccgccctcaacaaccttgataaaggtgtcggtgttgtcggcatttacaccctcgatgcccgttgcgtcgggtatgaagcggatgtgcttggtgtgcagcaacagtttggggaacttggcattggtcattacgcaaaccaagtcttcgtagcgtttggtgagtttcagtgtggtaacgccgttggttacggtgtattcggcatctacatcaaactcctcgccttgcaggttaccgttcttatctacgttcacattaccggtaaaccagcggtacacggtgggtgttccgtcgataacagcctctgaactgaggtctaccttgttgccgttggcactaacgtcaacggggttttgcctttgataggcatacgatgtgcggtaagtgcccgttgtgggaggcaatgaagagaaacggaggttgttgccaacaaggttgagcgcacgcaagtgggcgttgttacgcacattgatagacgtgagcttgttgttgctgacgaagagctggcccaagttgagcagcggcttacaatcgagcgacgtcatcgagttggccgttaggtcgaggctctccagtgctgtaagtccgcggaatttaacctctatcaggttgtttcggctaaggcttaccactatcagctctttgttcttagtaaggtcgagcttggtgagcttgttgtcggacatggacaagtattcgagcttgggatacttcgagaggtctatgtcagagatgttgttgcggctaaggtctagctgtttaagtgctgtgctaggcgcgaagtcgaacttggagaggccaacgttgtctaatgtaatagagcgggtgtctgccaacttgctgatatctaccgaagacatcttggcgttggtaacgctgaacacggtaagtttctcttcgggtttcgacaccaacacgcgcaccttcacgcctttgttggtaagggcggtaaagcgtgtgtaggtatcggccttcaaaacgtattggctcatggctccgtcgccgcgccaatcgaagtaaacagacatgccctcgatgttgccacgcagtgacagctgtacgctgtctttgttgtttgtggtggtaaaggatgccagttcgtttgttggtacggggatgggttgcaccaaggtggtctttaagatgttcttacccgtgaatgcgggataggccgggtgtgatatttcgcaatacactttgcctttggttaggttcttaaacctggtagaacccttgtcgtccaggtagtcggttcccagcacgtagggttgtccgccttgggttttccaaacgaagttggtggttttgttgttgatggttacgtattgctcggtgaggtcgataccgggcgatgtggtggcaatcaccacttcgcgttgcggagcgtacgtaaagtgggcttcgtctagaccaaatctgttgggcatgttggccagtgtgaagtggttgttgctgatgtcgagtttggcaactggtgctagggggataatgcccagcaaggtaagctcgttgttagaaacgtttagttctttgagctgttcgctgtggtcgagaatcattcttgtaagcttgttgtacgagaggtttcctcttaccagtgcatcggcacggcgcaggtcgaggttggccaagttgttgtggcttaggtctaagtcggtaatggtgaagtaatcgtctaccgtgattgtttcaagctggttataactgaggttcacgttggtgagcagactcttgtattgcgacttagacttgcctttcagcgagatggttttgagctggttgtgcgacaagttgagcttttcgagctggttgttgcgtcccaagtcgatggtggtaagccccgtatttacgagcgacagcacgcgcaggtctgttagttcggtaacatctatgcttgtgatgttcaggtctttcacttcaagtgccgtcacatagttgtcttgcggtacggtcaccacgatgtttccgttgcctgctcgctgaccggtgatgttggcggcagtgggcttctcggcggtgatgtttacttctttcagttgtccgttgccaaagtctaccttaacttttacgggtttctgtggcgttgcgcccttcattcccacggttaggttgatggtttgcccagccgttgcggtggtggcaaagtctattgcccttacgtctttaccaaattcgctatcgtctttaacggtgaaaggttcggtaaatagggggtattcgttgaaaatggtgttggtgaagataagcaccaccttgccgtctacgggcctaagcagcgttacctttccgttatcgtagtagtaatagctagcatctagctcggtacgtttggccagtgtgtctttatccagcttgtagagtttgcccaatgtggtagttccttcgcgcaaaacttgtttagagaagtcgagcacggtacccaccttgtaggtgtcgtccagcaccaggtcgcgttggtcgtagtaatactcgcgccaggtgttctgcggtttgggcagcgaggcgaaggtcatcaggtttttgcgtatgttgaagatgtacaagtcgggacatttgctcacgtctatggaggtgagtttgttgtggtttgctcccaacgtaaccagcttaggcaccttgctcaggttaagcgaacgcaggttgttgcccgcacaatagaagtggcgcaggtctggacagtgggtcaggtcgatgtcgtcgaacttcacatcggtgttaatcgtacccgaagcatgctctatgtagagctcgttcagcttggagtttttgctgatgtctagcttgtttactcgcgtgtcgctaacgttcagtacattcaggttggcgttgtgcgaaacgtcgatggtgctgatgtcggtcatgtcgaggctcaatcggcgcagcgtggtgcagcctttggtgtctacctctgtgatggtgcggcagtggtaggcgtcgaaagaaaccagcttggggaagttctttaactcgaacttagactgtacgtatgcgcattgtgcaatttccagttccaaaagttcgggcatgttgcccagcctaagcggcgtttgtgccgagaaggggttgtcgcgcaggtagaggaactgcaacgatttgaggttggaaaggtctatctgcttaatggagttgtaggccaatcgcaggtaagacagtttcaaatccttgtgaaaggtgatttggtctatcttacaacccgtagcgttgaagaagtcgatcttgttcgggtcgccgtaaatctttacgatgccgtccctggtaaccgttcccgagtagtctgtacctgtgggcacttctgcgccttgtttgagcttggcaacgccaacagacagttcttcggagccgtttccgcagtctatctctacgtattcgttgccttgtgtgctaccaagcgagaaggttacgatgggcgattcgcctttattttcctcatacacggtggtatggaatgtgatgatgggttgctgatttttgttctgtgcgaacgccggcaggcccaccactgccatcaatgccaacagcaaagatgcaagtagggtttgtttgtaattcatacgctgttagtaaataataatttttttcgctgattttccgttcacttggataaggtaaacgcctttgctccatgcgctggcgtctatggttgtttcgtctcccacggtcgattgggtatgtgcaagcagccctgccatggtgaaaacgcgcacttccaattgcttctcgccagccctaaacacgttaaagcgccttggcccggccgggttgatgatggttttgttgtcggcttcggcggtgttgatgcctgttgagccggccttgcggcgtagcacttctttcagtccggcgtaggcatcaaactttcctgcgccccattgtacggggtctccttctttcacatcattgtcaacaacagccgttttgcggatgatgtcggcaacgtctgcggctttaagcgttgggtcggcttcgagccaaagtgcgatagaacctgccacaacaggtgttgccatcgatgtgcccagggtttggtgccagtaatagctcttgccgttgacggtgtgcttggcttgcaagttcaccggggcgtagccgttcttggggtcttcaacggtgtaggtgttaaccgaagatataacaactgcgccgggtgcgcaaactaatggcagattgcggccgtcgagaagcgtcccgaaagaagagaaacgcgtcaccttgccttcatcatattcgtgcctgttgtagccgtagacccatccgtccatagctgcccagtggtcgcgcacgttatagcttcccacggtaatcatgcctgctgcacaggccatgtcgttgatggtgccgttgcgcgaacccttcgtccaaattccacttccattggcattgttgtaggcaccgtcgtagtcgtcgaagtaaacaaactgtgcatcgccgtacaggtctacgcgtttgccgtccttcccttctacaagtatacctagtttgaattttccatcggcgttggtcttttggttgtcgctggttaggaaacgggcgatggcgtagtagcgacccgtttcagggtctcttgttccgcccaccattacgtatccttcaaaggctttgttgaagaccgaattgctggttatcgctccttcttcggcatattcgccgccagatgaatacatggttagcttgccgttgggactgggttctacggtgatgcgtgtggcaatacggccgcgttcctcgttgaacacaaccacttgcatcttaaactcggtggcatccgagctgtaagcgtacacctgcccattgcgaaagttgtagtagtctttctttcctatgtgttgttttccnnnnnnnnnnnnnnnnnnnnnnnnnnnnnnnnnnnnnnnnnnnnnnnnnnnnnnnnnnnnnnnnnnnnnnnnnnnnnnnnnnnnnnnnnnnnnnnnnnnnnnnnnnnnnnnnnnnnnnnnnnnnnnnnnnnnnnnnnnnnnnnnnnnnnnnnnnnnnnnnnnnnnnnnnnnnnnnnnnnnnnnnnnnnnnnnnnnnnnnnnnnnnnnnnnnnnnnnnnnnnnnnnnnnnnnnnnnnnnnnnnnnnnnnnnnnnnnnnnnnnnnnnnnnnnnnnnnnnnnnnnnnnnnnnnnnnnnnnnnnnnnnnnnnnnnnnnnnnnnnnnnnnnnnnnnnnnnnnnnnnnnnnnnnnnnnnnnnnnnnnnnnnnnnnnnnnnnnnnnnnnnnnnnnnnnnnnnnnnnnnnnnnnnnnnnnnnnnnnnnnnnnnnnnnnnnnnnnnnnnnnnnnnnnnnnnnnnnnnnnnnnnnntcctatgtgttgttttccttctgccattgggcggatgaaggtttgcagcttgttgtcggtttgggtgaaagtcttgttcagtgccacgggatagttggcctcgttgcctgctgccacgcagatgatggcactgtctgtgcagccggctaagtagcggttcatcacgctagtgctgtcgtgcgagcccaggttgctgcctaacgagaggttgatgacacagggcttggcctgcggccctgataggcgggcgtattggtaaacgtcgtctatgcccagtgcgatgaacacgtcgcgcagatctccgcacgaagccaccaactccgattccgttgctattccgtaatagggattgggcatctcgacgtttttcgaggtcttgttgtccttggtaacggcaacggtggcctttcccttatatcctccggccataattccggtggtgtgggtgccatgaaactgccctctgttgtcggtttcaaagtcttcaatggcaaacacgttgtccatcgatttcttgtgtttggctatttcgggcaactgctctttggggaaatagctctcccagatgaacccgtctttgcctgcactgctggtgtacagcctgctaacataaccgtatcgtgtggttccgtcgggtttaagaaagttgatgttgttgggatcgatgcctccgtctacgatgcccgtaaccactcctttgcccgtataggcttgcggcaggccaacgccttggtgtattttgtttacgccaacggcctctctaacgcggtccattttctgcgcaacaggccgcgacagttgtattctgcgtacgcatttcagttcggcgatgcgttcaacgccatttagcggcatgctaacgatggcgatgttgccttttacccgaagtacgctcacattgttttcggcaagagttccaagagcctccttcccgtcaaactcaatcatgccaatcgttcgttgggggttagcgttgcccttaccgatgcttctggtttgtgggttgtaacgtggaattttaaaattaagctcttctttcaacgtaacttggctttgcaagtcgattttcgactgtgcatagcctcccaataggaggccagcacaaatggtagtgagaaatgttcgcttcattacttgttgataaaaattttctttccgttaatgatatatagcccttttggaaggttcttttgttcatcaacgcgcgttccgtcgagtcggtaaaccacgcgcttgttggttttgttggctgcggctgggttggcaatgccgttggtggaaatcccgttgaaccatatttcaaggcggtcgccgttagcaaattcaagttcgtaggtgtgtcctcctccgcccgttgcttcaacttcttttccgttgagccgcactttaagtttgctcaggtcgtttccgtcgaaggccagtgtgaaggggttgtcgtcttcaccgaatttgatggtgttctctccgttgttcagttgtacttccgttcggtcttgtcggttgaagtagaagaagcggtcggccagttgtttgctgtctataaacaccgtagccgttttgtcgcgtttgggtgccgaagtctcaacgccgatgttcattccgtttttcagcgttatttcgtacacgccgtc

SEQ ID NO: 4565 - DNA, 18100 bp, synthetic construct
  misc_feature 1..18100: note = Synthetic
  source 1..18100: mol_type = other DNA
aacagctcgaccgcgccgcggccctgctgcgcgaatacttcccgacggtggtggtcaactgacccgaaggggacgtccgccggagggagtgcggacaaccaaaaatccgggacgccgcggcgaaaacgcacggcggtcccggatttttttcgtaccttcgccggaaatccatttctgcgacaatgaagaaccgacttcccgacctgaacgtcccggcccgcgaacgcatcggctgggtggacctcctgcgcgtgatcgcctgctttctggtggtcttctcccacagctgcgacgccttcgtcgccgtgttcgacagcgaccgcgccaccttcctgcaaggagcgttggcaggcagtttcgtccgggcctgcgtgccgctgttcgtgatgatgtcgggcgtgctgctgctgcccgtgcggaccggaacgggggctttctaccgcaagcggatcggccgcgtcctcctggcgctggtcttctggtcgctgacgctgcccgtgctctactacctgtatatgcgctacgtcgggacctccagtccgtcgatcgaccccgcgctgttcaccggcgaagcgacgctgcacaagatgtggaccttcgtcttcaacttctgctacgacaccacgccgctctggtatctctatatgctgataggactttatctgatcatgccgctgatcagcccgtggctcgagcgggcctcgcggcgcgagttgcagagcgtcctcgcgatctggggcctgacgctgctgctgccctacgtgaagatgctcgccccggcgctcggctacacgggcaattacggcaacacggggctttacggcgtctgcgactggaacgagttcggcacgttccactacgtctcgggcttcgccggttacctcgtactggccttctacctcgtgaaattcccgcccgcatggaactggcgcaagacattgggcatctgcatcccgaccttcctcgccggatacctcgccacggggctgggttacgtggtgatgcagaaacattttccgggcaactacgcctacctcgaaatcgtctggtatttcgccggcatcaacgtctttatgatgaccgccccggtcttcatcctcgtgcagaaggccgccgcacggccccgcgcatggctctcgcggctggcgggcgcgacgttcggcatctatctctgccacttcatcttcgttcaggccggctacgacctcgtgcagcggattccgggacttcccgcgctggcgcgcatcgcgctgatcgcctgcggggccttcgccgtaagctgggcggtggtgcggctgatgcagcggtggagcgtgacgcgccggctggtggagtaatgcgctaccagcactcggccttgtctttcaattcgggaatccggtctttcgtgaagaccggatttttgatgccctgccgcttctgggccgtgtagtcggccagcagcaggaaggcctgacggcccagcagcacgatcgccgccagattgcacagcgtcatcagcgccatcgtcacatcggccaggctccatgccagatcgagcgtcgccacggatccgaagagcaccatcgcgccgaccagcagccggtagagcgtcagcgcccacggccgcggagtgatgaagcggatgttggcttcgccgtagtaataattgccgatgatcgacgaaaaggcgaacaggaagatcgccacggcgacgaacaccccgcccgcaggaccgatctcgctctccagagccgcctgcgtcagctgaatgccgttgagcgaagcgtcgggaacgcccccgaacaggatgatgaaggccgtgcaggtgcagatgacgagcgtatcggtgaagaccccgagggtctggataagtccctgcttcacggggtgcgaaacgtgggccgtggcggcgacgttcggggccgaacccataccggcctcgttgctgaaaagtccccgcttgatgccctgcatcaacgccgcgccgaccgcgccgcccagcgtctgctcccagccgaaagcgtcggcgacgatcagttccagcacttcgggcagccgcccgaggttgaacagcacgacgcccagcgccagcacgatgtaccccagcgccataatcgggacgatcacgccgctgacacgcgcaatgcgccgtatgcctccgaagatgatgagcagcgtcagcgccgtgagcacgacgcccacccacacatgatcggcgccgaaagctccctcccacgcggcgcagatcgtgttgctctgcaccgagttgaaggcgaatccgaaggtcacggagatcagcacggcgaacagcacgcccatccacctccgcccgaggccgcgttccatgtagtaggccggaccgccgatgaaagagtccctgccgcggcgtttgtaaagctgtgcgagggtcgactcgacgaaagcgctcgcggcgcccacaagggcgatgacccacatccagaagaccgcgccgggtctcccgacgacgatggccgtggcgacgcccgcgagattccccgtgccgacgcggctggccagcgacacggcgaaagcctggaacgacgagacgtgccgctcgccctccgggccgcttccggccgactcgcccagcacgcgcatcatctcgcccagcaggcggaactgcacgccccgcgtgcgcagggtgaaccacacggcacaccccaagagcgccgcgaccagcacataggtccacagcacgtcgttcacgccgccgatccaacgggaaagagtctccatcagcatactttacacgatccgacagcaaagttaatgctaaaacgcattttccgccggacattcgccggaaagatgcggcgcggcacgaaaaaaacgccccgcctgcgcaggggcgtccgccgtcaccgcgcccgcagggtatactccccggcccgctccgtaacggccttctgcaactccccgaggccgatttccggcccggagaactccacggcggccaccggagggtccagcgtcacgaccgccttcacgccgtcgagggcgttcagcgcatgttccacatgcatccggcaatgattgcacgtcatgccgtccacgataaattcctttttcatcttttcttcggtttcaaccggttcgtcatgttcacactcatcgccgatccgccggcgtttcagccgcaagctgttggccacgacgctcacgctgctcaaggccatggccgccccgccgatcatcgggtcgagcagaaacccccagaggggatagagcgccccggccgctacgggaatggcgacgaggttgtaaatgaaggcccagaagaggttctggcgaatcgtccgcacggtgagttgcgacagccggatcatctccgggattttccggaggtccgacgagaggatcgtcaccatcgcggtatccatcgcaatgtcgctcccctgccccatggcgacgctcaaatcggcctgcgcgagagccgcgctgtcgttgatcccgtcgccggccatggccaccgtccggccttcggactgcaactgccggacgaatccggccttttcgtgcggcaggacgcccgcccggaaacgggtgatcccggctttccgggccgtttcacgcgccgaaccggcgttgtcgcccgtcagcatccagaccgtgattcccagcgcgtgcagccgggcgacggccccggccgacgagggtttcagcgcatcggcaagggcgagcacggcgagcgtccgctcctcgtcggcgaaccaaactacggtcttcgcctcctgcatccacccttcggccagccgttgcagacgggcgtcgggcacgatgccgtggcgggacagcagcgcgtcgttcccggcataccaggtccgcccctccgcgacgccccggacaccctgcccgggaatgctttcgaacccggtcacgggaacgtcccgctccccgccgagcgattcgacgacggcctgcgaaagcggatgccccgagcgtttttcgaggctgaacagaatccgccgcgccgtctccggcccttcggtccacgcagcgtccacgaccgacggacggccttcggtgagcgttccggtcttgtccagcaccacggtgtcgaccttccgggccacctccaggctcgcagcgtccttgacgaggatgccctgtccggcgcccttgccgatcccgaccatgagggccgtgggcgtcgccagacccagcgcacaggggcacgcgataatcagcacggtcaccagcgccagcagcccgcgggtgaagccctcctccggcgcgaagagcatccacgccgcgaaggtcagcacggcgaggacgatgatggcgggaacgaaaacgccggcgatccggtcgacggtccgctgcacgggggccttgctgccctgcgcatcccgcaccatgcggatgatccgggccagtaccgtgtcctgccccaccctgtcggcccggaaacggaacgcaccgttgccattcatcgttccggcgaacaccgccgcaccctcctgtttgcagacggggagcggttccccgctgagcatgctctcgtcgacatacgacgcgccttcggccaccgtgccgtccacggcgatgcgttcgccgggatgcacggcgaccagatccccggcgcgaagctccgcaacgggcacggagcgttcgcccgaaggggtgatcaccgtgacggttttcggttgcaggcccatcagtttcgcgatggccgtcgtcgtgctgcgcttcgcccgctcctcaagcagccgccccagcaggatgaaggcgacgatgacggccgccgactcgaaatagacgtgcggctcgatgcccctcgacagccagaattccgggaaaaacaggttgaaaaggctgaacagataggcgattccggtactgacggcaaccagcgtatccatgttggccgccccgtggcggagctgtttccaggcgttgacgaagaactcccgtcccagtccgaaaacgaccggggtggagagcgcccacacggcgtatttcacggccggagcgtccatgaacagcatgcctccggccacaatcggaagacaaagccccgccgcccaaagagtccgccgtttgagcgcccggtaatgcgccgcacgaacgtgcgccgcctcgtcctccgccgggccttccgcgtcggtcagcaggtcgtaaccggccgcctgcacggcccgcttcagcgtcccgggagagcactcccccggacggtaggccacccgcgccgtagcggaagcgtagttcacatgcgcagactcgacgcccggcaggccgttgagcgccttatcgacccggacggcgcacgaggcgcagctcatgcctgcgaccgggaacgtattcgtgatgatcttactcttttccatgggaacaaaggtaaggtcccgacacgctccgggtgttacagaattatggatatgatttatacctacacttcatccagcggtttcaggccgcgtcctttcagccggcggaattcagtgggcgacatcccggtctgggcgcggaactgggcgctgaggtgcgccacgctcgaataacggagtttgtcggcgatctcgctgacggtcaggtcgccgtaggccagcagttccttgacccgctcgatccgctgggcgaggaagtatttctcgatgctgatgccgttgacctccgaaaagagcttgctcaacgcactgtaatcacggtggcagcgttcgcgcaggtaatccgacaggttgactttcgaggcatcttcgctgtaatgcaccaattcgatcacggccgtccggatctgctcgatgaggcgcatccggctgtcgtcgatcagttcgaacccgtaggcttcgagcagtttgcggaacgcctcccgctgctcccggccgggcttctcctgcacgacggccgttcccagtccgacatcgaggggcgtgaaccccgctttttcgagcagccgggtgacgaccagaatgcagcggttgcaaaccatgtttttgatatgaaagacgttctcccgttccataaccgcattcgttttatccgtaaatataacacaaaaacgattccgtcccgccgaccgtcttccagcctttcaggttccggccgttgaaaagcgtcggccacggggcctgcgctccgacgaaggtgcagggtccccaacagtgcaagagtctctttttcctatcagtcgggcagttttgatcgtacgaatatagtctatttttttcgggtcttcagcctgttcccctgcaaaattaacctctgacccgctccgtattccgaaaaagtttcgtaacttcggcacagcaaacccatagacgaagccatgaaacatgcgcacatcctgctgctgctcccttgcggcatgctgccgccgctcgccggggcgcagcgcacggagccgcccggccggttcgacatcgcaccggaataaccaccccgaaaacaagcaaaccaaccaaaaacaaccatgaagaaaaccgcaatcaccctctttttcctgcttcaggccgcgtgtctgttttcgcagatcccccgcccggaatatccccgcccgcagttcgagcggacggactggatcaacctgaacggcgaatggacctacacgttcgatttcggcgcaagcggcctggaacgcggctacgtcggctcgaagggattcgacggcaaaatcatcgtgccgttcgccccggagagcaagctctcgggcgtcggccacacggacttcatcggccgcatctggtaccagcgtacgatcgacattccggcagactggtcgggacgcaacgtgatgctcaacttcggagccgtgtactacacctccgaggtgtatgtcgacggccgcttcgtcggccgccacttcgggggcagcacgtcgttctcctacgacatcaccgcattcgtgaagccgggcggcagccacagtctggtcgtcttcgccacgagcgacctgcgcagcggcaaacagactgccggcaaacagtcgctgcaatacgcctcgcacagttgcgactacacccgcacgacaggcatctggcagacggtgtggatggaggccgtggctcccgaagccctcgcacgcgtccaaatgacgaccgacatcgaccagcagcagctgatcgtcgccccgcagttcttccgggaaagcccgaacacgctccgggtgacccttcgggacggcggcaaggtcgtcggcacgcggcaggtccgggcgtcgaacagcagcgtcgtcgtcatcccggtcaaaaaggcccggctctggagtcccgaagacccgttcctctacgacctgacctacgaggtggtcgcccccgacggccaggtgctcgacgccgtgaaatcctatgtcgggatgcgcaaggtccacatcgaaggcaacaaaatctacctcaacaacgaaccctattaccagcggctggtgctcgaccagggtttctaccccgacggtatctggaccgccccgtcggacgacgccctgcgccgcgacatcgagctgggactggccgccgggttcaacggcgcacgcctgcatcagaaggttttcgaggaacgctactattactgggccgacagactcggctacatcacctggggcgaaagccccagctggggaatggatgccaacgacgtggaaacggcccgcaacttcctctccgagtgggccgaatgcgtggtccgcgaccggaaccacccctcgctgctgacgtggacgccgatgaacgaggagtggtggcccgacaacacgcagttcccgcgcttcgcctccgacgtctacgacctgacggggcgcctcgacccgacgcgccccgtcaacaccgtcagcggcggcgccgtcgtcaggaccgacatctgggccgtccacaattacgagcagaacccggccaaactgaaagagaaaatcttcagcgacggcacgttcttccatccccgcctgcggacgacccgcgaccagacgcgcaacatcggattcaacgaggtgaaggcgaccgcaaactacgcctggccgcagtacgatggctcgtgcccctacctggtcgatgaattcggcggcatcaaatgggtgaaggaccaggagaagcaggccacggattcccagaccgaatcgtggggttacggacaggcgccccgtacgctcgaagagttctacacgcggctcgaaggccaggtagacgcgctgctctcgctctccggacaggtgtggggctattgctacacccagctcacggacgtggaacaggaacagaacggcatctattgctacgaccgctcggccaagttcgacatggaccggatcaaggccattttcagcaaacgcccggaacatcccgcccgataacgcgccggacagccgcccgcccgaatgaagcgcaccccgaaatccctttccggattttcggggtgcgctttttatccggttcgtcatcgtccgcccgcggcagagcctcgtgcacgaatgcgcccggaaacagaaggcgtcgctgaatttctattcgcgtgttttcccggtttcagagtctcgatataaagtattcctgcatattccaacgatatgcccttgatgaacgctgcaattggagatgcttcatgtcggtgcgtcgcacggcgagtggcggacggtccgacatgcgaccttctgttttcggcaccatgaactcccgaaggcaaaaagccacagcgccggcacactccgcaatagcaaccgacggtttttaaattattcacgaaatataaaaaaagtctccacggagtacgcggagacaataggttgaaaaccttcggcatatagccttattgtgataagatgtagaattcttacaccacaaatatagtaaaaaaagatgaatttctgcaattttttatttaattttacagaaaacactttcttcatatggcaaaagtattgggtttggaccttggcaccaactcactgggatgggcccttgtcgatgaatcggagaacgaatatacgctgattgacaaaggtgtagacattttccaggagggagttgcccgcgacaaaaacaatgaaaaacctgccgttcaggatcggacgagcgcccgggcactgcgccgccactatttccggcggcgtctgcgaaaaatcgaactgctcaaaatactcatccgttacgacctttgcccgccgttgcccgaggagctgttgaccgcctggcaaaaagagaaacgttacccgcaggacaatgaattcctccgttggcagcgaaccgacgacaatggggatcgaaatccttaccacgatcgttatgtagccctgtccgagcggctcgatctcgggaatcgcacacagcgctggctgcttggccgggcgctttatcatttggcacagcgacgcggattcctcagcaatcgcaaggaagcaggaaatgagaaagaagacggcacggtcaaggagtgtatcaaaaatctgtcggctgaaatagcagcggcagggtgtcggtacctcggagaatatttctacggactgtaccaacacaaggaacgaatccgcgacaaatacacctcgcgcaacgaacactacctggccgagttcaatgccatctgcgaccggcagcaattgcccgacgaatggcgtaaggcgctgcatcgggcaatctttttccagcgcgacctcaaatcgcagaaggggtcagtcggccgatgcaccttcgagccgacgaagagtcggtgccccgtttcgcatccccgttttgaggagttccggatgctgtcgttcgtcaacaacatccggattacaggaccgggcgacaatgctccacgacctttgacacaggaagagttcgagacgattcgttcgctcttcttccggaaaagcaagccttatttcgatttcgaagagatcgcccgcagaatcgccggcaaagggaaatatgcctgcaaagaggagcgtacagaagctccttatcgtttcaatttcgcccgcacggccaccgtatcgtgatgccccgtcacggcatcgctgcaagcgatcttcggagacgactggattacggagattcgcagcctttacctgcttggagcaggaaaaaacgaggaccagatgttgaatgacgtatggcacgccctcttttcgttcaacgacgaaggtcggctgcgtagctgggcctgcgaaaaattgcaactcacggatgaacaagccaaagcgtttgcagccatcaaactcccgcaggattacgcggcgttgagcctaaatgccatcggcaagattctggtctatctgcgctgtggctatcggtacgacgaggcggtattcctggccaacctgcgggcggcacttccgaaggaggtctatgccgacgaaagccgtcggcatgaaatcgaacaggacatcgcctcgctgctgcttgactacaagcgaaatccgtataacaagttcgattcaaaggagcaccgcattgccgactatttcagcgatcatggattggatgcctctcgtctgatccgtctttatcatccctcgaaaatcgagacctatccggatgcgcaacccaaggcaaatggcattctgcaactcggctctccacgtactgcgaccattcgcaacccgatggccatgcgggccctgttccgattgcgcaacctgataaacacgctgttacgcgaaggcaggatcgaccgagacacgaagatccggattgaattcgcccgcggactcaatgatgcgaacaggcggaaggccatcgagcagtatcagcgggaacgggaggttgagaatcggaaatatgccgaagagatccacagccagtatgccgccgaaaccggccgcgagataaaaccctcggacgacgaagtgctgaaataccggctgtgggaagaacagcagcacgtctgtccctataccgggcggcaaatccgcatttcggacttcgtcgggtcggctccggatttcgacatcgagcacacgctcccgcaggctcgcggcggcgatgactcgcagatgaacaagacgctctgcgaaaaccggttcaaccgggagacaaaacgggcgaaactgccggccgagttgtccaatcatgtcgagatcatggagcggatcgaatcgtttggttggcgggaaaaaatggagagtctgcaaaagcagattgaagcccaggttcgcaggagcaaaagcgcagcgattaaatccgaaaaggacgacgccattcagcgccgtcactatttgcagatgcaactcgactactggcgcgggaaatacgaacgcttcaccatggccgagattcccgaaggattcagcaatcggcagggagtcgacatcggcatcatcggcaaatatgcacggctctatctgaagacggtttttgaccgaatctatacggtcaaaggttccacgaccgccgcgttccgcaagatgtggggactgcaggaggagtatgcccgcaaggagcgcacgaaccacgtccaccactgcatcgacgccatcacgatcgcctgtatcggccgccgggagtacgaccgctgggcgcaatatgtcgccgacgaggagcgatacggctacggcgaaagcggcaaaccccgcttcgagaaaccctggccgacctttaccgaagatgtcaaggcggcggccgacgaactgctcgttgcccaccacacgcccgacaacatgaccaaacagacgcgcaggaagttacgggttcgcggccggataaagttgaatgccgacggggaaccaatctaccagcaaggagacacggctcgctgccggttgcatcaggataccttctacggcgctattaagcaggatggagagatccgctatgtcatccgcaaatcgctcacgcagttacagccgacggacatcgacaagattatcgacgatgcagtccgggatcgcgtacgggaggcaatcgacgaggtcggattcaagacggcgatgaatcccgatgaatacacgatctggatgaaccgggaaaagggcattcccatccgcaaggtgcggatcttcacaccgagtgtcaaacatccgatcgcgctaaaaaaacagcgcgacctatctgcaaaagagtacaagcgggattatcatgtcgtaaatgaggggaactattgcacggtcatctatgagggccaggacaaaaagggcaaaacgaaacgcacctttgaactcgtcagcaacctcgaagctgcccaatatttcaaagccagcgctgaccgggaagcccgccccgatctggtaccgcagaccgacacgaacggtttccccttgaaatgcatcttaaaaacggggaccatggtcctgttttatgaaaattcgccggcggaactttacgactgttcgcataaggaactgacgaaacgactctacaaggtaacagcaatggctgcagaaggacgggtacagttcctctttcatcaggaggcccgagatcagaaaacacttacctccttatatggagctgggacctctcaattctgccaatccaatccatcaccgaaattgcgtctcagcgtttccaattttaacatgttggtggaaggttatgatttcgaactgaccgtaacgggcgagataaaattcaaagatgaccggccatgctgaaacgaaccttgtttttttcgacaccctactgtttgagcctgcgcaacggccagatgatcatccacacgcgcgaggcccccgaccaacggaaaagcatcccgatcgaggatatcggcttcgtggtgctggaggaccagcagacctccatcacgctgccgctcttgaatgcgctgtcggacaacaacgtggcagttatcctgtgcggagagaaccgaatgccgaacgccttgttgatgaatttggattcaaacagaacgcaaggtgaacattatcggatgcagatcgctgcatccgaaccgctgaagaagggcctttggaaacagatcgtcgagaccaaaatccgcaaccaggctgccttgctgcggaagctgggatatgacggagacaaactgaaaccctgctacatgaatgtcaagagcgccgacgccgacaaccgggagggcatagcagcgagaatctactggtcagaactgttcggtgccgaattttaccgttcccgcgaaggttcgccgcccaacaacctgctcaattacggctatacgatcctgcgagccgccgtggcccgtgcgatcatgggctccggactgttcccagcattcgggatcttccatcggaatcgttacaactcctttccgctggccgatgacgtaatggaaccctatcgaccgtatgtcgacgaattggtctaccaactttacaggaacgggaatacacaactgaccaaaaaggtgaaaggcgaactgttgcggctcctgtttgtcgatactcgtttcgacaaggttgtgcgacctctcgaagtaggacttatgttttcagcctcttccctggctaaatgctttgctggaacccaaaaaaagattgcatatcctttattggagtagtcgaatgtcagaagtacgcttgaatgcttatcgaatcatgtggttgtttgtcttttttgatttgccaaccaatacaaaaacggaacgacgtcatgcggtgcaatttcgcaaggcgttggaaaaagatggtttcacaatgatgcagtattcagtctatgtgcgccattgtgcatcgaaggagaatatgcaggttcacattaagcgggttcgacgatcgatgcctccgacaggatttacaagtattcttgctgtaacggacaaacagtatggagacatattaaatttttggggtaaaagcgaacgagcaaaaccggaaattccgcaacaattggaatttttctgataaatcgttattttcgttctttgaaatacggaaaatgcatcaaactggcttcgtcggaacacccgatcgtatttttatagtggcagacagcccgtaagtaacactttatcaatcaatatgaggcccgacgttgtggtttgatgtagaatttcaataagatacaacgaaaaaactcatcggatttatcaaaaacagttgtggtttgatgtagaatttcaataagatacaacgagataatcattcgcaggaacttcatcgggttgtggtttgatgtagaatttcaataagatacaaccgctgtttcctcactaatgcagaggcatgagttgtggtttgatgtagaatttcaataagatacaactcggtaatacttaacggtgtgtcaagcttgttgtggtttgatgtagaatttcaataagatacaaccgtcgaaactttccgtcttatgttcggacggttgtggtttgatgtagaatttcaataagatacaaccccaagtattacgaaatgacattgcgagtgttgtggtttgatgtagaatttcaataagatacaactcccactcttgaacagcctgttcagtatccgttgtggtttgatgtagaatttcaataagatacaacaaatatacccacatggttatcggcgacggtgttgtggtttgatgtagaatttcaataagatacaacgtcgtcgtgtctcacccggaacactgttttgttgtggtttgatgtagaatttcaataagatacaactcgcgaatttacgataaagatgattccggagttgtggtttgatgtagaatttcaataagatacaaccggcgtaacgtagtagttctcgcgctcgaagttgtggtttgatgtagaatttcaataagatacaaccgccgcatggtcgctccgctcggcgatgaagttgtggtttgatgtagaatttcaataagatacaacagcggaaaacaaatgataaatcgttacacggttgtggtttgatgtagaatttcaataagatacaaccccagttgcgcgaggtcgaaatcttgtcgcgttgtggtttgatgtagaatttcaataagatacaacgacttcttggcaccttccgtcttcgtttggttgtggtttgatgtagaatttcaataagatacaacgtgggagcacacaggtatgccacagaccctgttgtggtttgatgtagaatttcaataagatacaacgttgcaaaaaggcatcttcctcgtcaacagttgtggtttgatgtagaatttcaataagatacaacttcttcccaaacatactacgacgagtgtagttgtggtttgatgtagaatttcaataagatacaaccttggtcaggaactcattgatggtcaattagttgtggtttgatgtagaatttcaataagatacaacaggggcaatcagcgatctgacaacgtatatgttgtggtttgatgtagaatttcaataagatacaacccttcagcaattcacgaactctcgcagaaggttgtggtttgatgtagaatttcaataagatacaactttcgaccaagcagggacaaagccgacaccgttgtggtttgatgtagaatttcaataagatacaacctatgggtattgacttcactccgcgaaagagttgtggtttgatgtagaatttcaataagatacaacagaaccccgcacgttcgaacagcgtacgcgttgtggtttgatgtagaatttcaataagatacaacctccagccaatcactataacggctacctccgttgtggtttgatgtagaatttcaataagatacaacttctcacctttatcgaaatcagagggcgaagttgtggtttgatgtagaatttcaataagatacaacgaattgcccccgcctcgtctgtcagcgttgttgtggtttgatgtagaatttcaataagatacaaccaacggcaagggttgcgccaacctggggttgttgtggtttgatgtagaatttcaataagatacaacgcacttaagggcgtcaagaggaagttgaagttgtggtttgatgtagaatttcaataagatacaactgcaataggcgagttcgcgctctaggcgaagttgtggtttgatgtagaatttcaataagatacaacgcaatagcagtagaatcgccgggagcgaagttgtggtttgatgtagaatttcaataagatacaacaaatataggcaatttcacgttcgacattttgttgtggtttgatgtagaatttcaataagatacaacaaatataggcaatttcacgttcgacattttgttgtggtttgatgtagaatttcaataagatacaacagccttgcgaccaacataggcagcgccagcgttgtggtttgatgtagaatttcaataagatacaacaacgcgtcaaacggtaattgtccgccatagttgtggtttgatgtagaatttcaataagatacaacttatagacgaaacgagcgtccaaaatgcttgttgtggtttgatgtagaatttcaataagatacaacgtcgtgttttcgttccaatcaatgtggtcgttgtggtttgatgtagaatttcaataagatacaactctgcggccggatgaatagccacagaccctgttgtggtttgatgtagaatttcaataagatacaactttagcagattttgcagtgcattcgattttgttgtggtttgatgtagaatttcaataagatacaactgtcagtattggaatgctgcataattgcagctgttgtttacattacccttttgactcaagaagatttcaaactcccttaaacacgtcaaatccaattcatcaaaacgcatattgaccgagcggaattgcgacataagggcaagtgttaccttgtgtttgctggcggaaccatacttttcgaccttttccaatctgtcgattatctgtctgaaataatagcctaccgtacaatccatacgcttaccaatggtctcaaacagcgcttcaaaggttacagggatttcgagggcttccagtttcttaatcttcttctcgtactctttgattttggctgttatctgaaactgaatatcgtccctgtcagggcagtcgtccgttaccttttgtgcttgtgcatcccagcaggaacggactacggaaacacccaaaccaaccgatttcttgcggttatcatggaagaaaagcaggcataaagggctggtgttgttcttgtagattacgtccttgcggagtattactctgaaagtcattgttttgcatcattagatacaggagaaaaaacacatttccaatggagagtttaatggagaggcaaggccgtgaaaaggctgtttcagccctctttttctaccctatgtaaacaaaaaatcagcaacctcatttctgtaagttgctgattttttgagcggaaaacgggactcggacccgcgacctcaaccttggcaaggttgcgctctaccaactgagctatttccgcaatccgcaaataatcagcagcttacgaacgtttagatagctgttttataccttaaaaatcggtctgtaacacactctgtatcacattttcttgcttgtaaattgtttgtaatttgcagattcttaatttgttagataaaaattcattccttgtgctacataaagcatttaactcgtgtcaatcataagcaattatattattagttgatagagaattaagcgtattcatttattggatttctctgcaaccgaccccaacctcggttcagaaaaaaagaggaaatttctttcctctcccctgctctctccttttaagaatgttgtgttgcttttgtatctgtaaaggaaatattgtaattttgagaaactcttaactcaaacattatgaacgatattattccgatagattccgaagtcacgactttttctgaatatcttaataataattgtcgaggtattctgtctgcacgatttggggacggaaagagtttctttctgaatgaagttaagaaacaattatccaataagtatttattcttaacaatatatcctgtcaattatcaggttgctgaaaacaaagatatttttgagtatatcaagcgagacatattgttgcaaatcttgatgacatcagagattgatttctcggatgaaaaatacggcttttcattgagattatggggatttcttaatcaaaatggaaaagaccttgtatcggatattgtttctttaattgcatcctctttggcaaatatcccccaagatgctataaaagtgtttcgcaacaatattgcaaaattcaaagacttttcagagagagccaatcattcccagtccgatagtattgaatcatatttggatgaatttgcaagccaaaaaggagggatatatgaatttgacc

SEQ ID NO: 4566 - DNA, 17799 bp, synthetic construct
  source 1..17799: mol_type = other DNA
  misc_feature 1..17799: note = Synthetic
  variation 1347..1356: note = note, n is a, c, g, or t
atgcgcttcggcctccgcgccaagagtgttgccacagtgaacgaggttaaggcaggcctcattaccagccgacgcatcatcttcacccccaacacggagttgaaggacgagctcgccgacaccacggtgcagattacctgctacgaccgcaacggcaaggaggtgaagcgtgttaccagcaccgacgacggtgtagtggaggatgatgagacccccaatacccccgatgacccctctcctgactcccccgagggggagggttctaaccctagcggcggtaataccggtggtggcggcggacaaaactgatggagcagcgagagcagaatgaagctcgcttcgattctgccgagtcgcgccatcagaagacgaagtcaactgataaagagcgggccttcaggccctctcttttatctttcatctaatttttctcttttaatttttctcttttatctcttttttttccttatttttgcaaaaacaaatcagaagagatgaagtttatcagttggaatgtgaacggcctgcgagccgtagtaggcaagaactttaaggaagtgttcgagcagttggatgccgacttcttctgcctacaggagactaagatgcaagagggacaactggacctgcagttccccggttaccaatcatactggaactatgccgagaagaaaggctactcgggtacggctgtctttacccgtcatcagcccctgaacgtgacctacggcataggcatccccgaacacgacacggagggacgcgtgataacgctggagatgcccagcttctatatggtttgcgtatatacgcccaacagtcaggacggcctgaagcgtctggactaccgcatgcaatgggaggacgacttccgcgcctacctgctctccctggatgccaagaagcccgtcttggtctgcggcgacatgaatgtggcacatcaggagattgacctgaagaaccccaagacgaaccacatgaatgcgggctttaccgacgaggagcgcgagaagttcacgcaattgctgggggcaggcttcaccgacacatggcgcacgctgaaccccgacgttaaggatgtctattcgtggtggagctaccgtttccaggctcgcgccaagaacacgggctggcgtatcgactactggctggtcagcaaccgcctattcccccaggtaacggatgccaacatccttaccgacatcacgggctccgaccattgcccggtttccttggagttgaaagtttaggtcacacagatttcactgatctaaatagatcttttttaagtcccgcagaaatcgcggaaatagcggaaattatttaaagcggtgtctttggtgttgnnnnnnnnnntctttggtgttgcgctaaccgttcttcgtccggttttgatgctgaaagcacatggttttccttgtatgcaagcatccagataaaaccacgcccttccaacatcagtgatgtgaccatcacttagcacaacgccaaagcattatctattttcctcaggactctgattctataaaccacctccattagatgagattacatagaattaccggattcttggatgagagagttgagattaccggattcttggatgagagagtagagttcgaaggaacgagtcaacgggttggaatgcggctgataggagcttgctcataatcagctacaatccaatccgatgacggaagcacgaaagtgctgctctctcaaccaagaatcaaatttctgctatttccgcgatttctgcgggacttaaaaaagatctatttagatcagtgggatctgtgtgacctatatccgctaaccaaattttcaatgttcaatgttcaatgaatgaaattttcatttcaatgtcgtcaatggggcggtcacctcgtcctgtggcagtattctgaatcatctccaccacgtcaagtccttcctccacctcgccgaatacagtatattgtccgtccaggtgtggtgtgccgccgatggtagaatacaccttgcgctgttcctctgtcagaccttcgcccgttaccttagcttctgcttcagccaccagcttgtcctgcagctcctgcaatcccgcgcggttgcgctcacgacgcatctgcataatctcgtcgcgatgctgtgctgccagctcgttaaaggcagcctgcaccttctgcatcctcatctgcttagcgtactggcgcagctgtccctcgttgtacacctgcccccagacgatatagaactgcgagccgctgctacgtcgctcagggttcacctcgtcgccctgacgagcggcagccagggcgccgcgcttatggaacagaccgtcctttatctcagcctccagcgtatagttggggccgcccacgcccagcatcttgccggcaggagcacccttcgagtcaggatcaccgccctgaatcataaagtccttaatcacgcggtggaacagcgtcccatcgtagtatccctccttcaccagcttcacaaagttatcacggtgtatgggagtctcgtcgtacaggcgaaccacaatatcgcccagcatagtctgaatcttaactttcatatcttttgtctgtttcgcgctgcaaaattacgaaaaaaacataatattccttgcccatccccgttcctttcttctgtttaagggtaaacgggttgaaaaaatggaaaattattctctaaccgctaaccgccaatctctaaccgtctaacagtgtaaataattttccaaagaacatctggcattgctttgttttctggttagagaaaatttactgccaggttagggaaattttgctgcctcgtttggtagtaaatactcttaggctttagggcttgggactttatttttgcgagggagtttgatgtcaagatatttttaggtacatattgtcttaccccaatattaattccgtgcttcccttcccttaccctcgttgttcccataatgtagcaaggtattagcctcagattttgtgcggtagaagtacgcttgatgttcggtatatgttcggttctacaccggacatgtagcggacatataccggatatataccgaacaagtaccgaacatcaattaagggtgctccttttctgcaacgaggaaggagtaagggaagctgctggtaagtagctgatatgtttctctccatagaaacaaaggtctatcgcctaatgctttttcttgtgaaataacctcccatattcaataattatcgtttagctcgacaacaatggttgctcgcggaacgggaggtgttgctctaagacctcatgaagacctcccgtatttctttgatgccaggatataaatattactatggattttaaaccaacgggagattatacgggaggtcttggaacaacacctcccgtcctataatcccgataaccatcggctttccaaacgtgttttgtattatgggaggctaaaatagaaatatgagtcaattttcttcagggtaagacagatttttgtaacctttagcttgcatacacatactgtttacgcctaaataacaatgaatgtccccaatcatccccggcagagatacagaaccatagcaaggggatagcaaggggatagcaagggggtagcgagggcgttccgccgtcgtaccaagttcgtaacaaggttgaagtttcgtaggtggcagacacctggcatcgttggtatattcaagcaatattcattttaaatatatataagctcgttataaaaatagcgagctttttttgtgcttatagctttctctatgagagaaacgccgtattgctatgagtgaaacggcctttcactcccagagaaacgccgtattgctaaaacggttgctaatttgctaaggtataattatcggggcctttttatccctacaacaagaaatgtttttgtgttcggaagaaaaatcttcattcttcactcttcatttttcatttttttatatctttgcctaaagaatttagctaaactagtaccagatgctattatcatttatttgaaatagggtaataaaaaagcctctccagaagagaggcagtaggatttcatccttcggcatatagccttattgtgatatgatgatgaatatctttctgatgcaaaagtatattatctgattgaaactaacaaataaaacgctataaaaatgacgaaaaaacgtattttaggtcttgatactggtacaaatagtctgggatgggcaattgtcgatcgcgaagagaatggacaatattctttgatagataaaggtgttattatatttcaggaaggcgtaaaaatagagaagggtatagagtctagtaaagcagctgaacgcacaggacacagagctcttcgcagacagtacttccgtaggcgtttacgtaaaatagaagttcttagagtgcttgttaaatacaatctttgtcctgctcttgatgaagaagacctaaaatcgtggaaactgcgcaagatttatccaaagaaggatgattttatgttatggcagcgtacaagtgataatgacgatataaacccataccattgtcgttatatatgtctaaatgatgtccttaatttgaataaagaacaagatagatatacactaggtagagcattctatcatatggctcagcgcagaggattcctaagtaatagattagacactacggaggagcaagagaatagcactgttaaaggtggtattgcagatttaaataaggaaataaaagatagtgggtgtatctaccttggtgaatacttctataagctatacaaagaaaaggggaatacggttcggatacgtacgcgatatactgaccgtgaagaacattagaagaaggaattctttgccatttgtgaaaagcagaatttacctactcaaatggttgaggaactgaccagagctctttactttcaacgtccccttaagagccaacgccaaaatgtggggaaatgtacttttgaaaagggaaaaccacgttgtagcgactctcaccctatgtatgaagagtatcgtatgctttctttccttaataatgttagaatacaagggccttgggatgtaaacggttatcgacctctcaatgaggaggaactaaagaaaatcgagcccttgttttatagaaaaagcaagcctaatttcgattttgaagatattgccaaaaagattgcaggacccaagcagtatcaatggaagggggaaacgatgttggatcttccttacaaattcaactatcgtatgtcacagggtgtatctggatgtccaactatagcccaattgcgtgaggtctttggcgacgattggaaacaaaatattgcagaaacatatactctgaatacgaagaaagatggctcccagaagtccattgatgacatggtgaatgatgtctggaatgttcttttttcttttgacagcaaagataaagtaagtgaattcggtaagatacatttgcagttagacgaggaacaagcggagaagttttcgaagatacggttaagccgagattacgcttcgttgtcacttaaagcaattcgaaatatccttccattcttacaaatgggtatgttgtatagtcatgcggtttttatggccaatatccctaaaattgttggacctgccatttggaacgacgaaaagcagcgtaatcatattatagatgagatatgcaaaatggcagcagatgcaccaattgagaaggaaaaaggactccgtcaaacgttagatatctgtataaaagaccttttatctaaggaatatggtattaaggaagaaaaattggagtgtatgtatcatccttccatgatagaaacgtatcctgatgcccgcccaaacaaggatggcgttgttctattaggaagcccacgtacaaatgccattaagaatcccatggcaatgcgttctttacatgaggtacgtaaggttgtgaacacgctgataaaagaagggaaaatcggtcctgatactgaggtgcatgttgaatatgctcgcgaacttaacaatgcgaatatgcgtgctgctatcaacgacttgcagcgtgagaatgataagaagcataaacagtttgccgatgaaatacgcaccctctataaggaggaaacaggaaaggatatagaaccaactgaaacagatatcctgaaatatcaactttgggaagaacaagagcatttttgtatatacactggtaagaaaattggcattacagattttattggtgcaggtcccaaattcgacatcgagcataccatccctcagagtgttggcggtgatagcacacaagagaacatgacgctctgtgataatcattataacagattcgtaaagaaagcacagataccaacatctttacctgaacatgaggaaatcatgactcgtattgaaccttggaaaaaacgcattgatgatctaaccaaacagatagaccaaattagaacaaggtacgtatgggataagacaacaaaagatgctcggattcgtagaaagaatcgcttgaagttggaacttaaatattggaaagggaaatacaatcggtttacaatgactgaggttccggaaggctttgcccgtcgtcagggaactggaattggattgatttctaaatatgcagccttatatcttaagagctattttcatgatacgcttcatcctgaaaacagacaagtatacagcataaaaggaacaataacagatgagtttcgtaagatgtggggcattcaggatgagtatgaaaagaagtcaagagacagccatacccaccattgcatagatgccatagttattgcttgtataggtaagaatgaatttaacaagatgggtgaattctatcgtgatatatttaactattatgaaggaaaaagggagaagcctgtctttgaaaagccttggccgacattcacatatgaccttaagcaacttaccgaagaactccttgtcgtgcatgatacgccagacaacatgcccaagaaggcatcacgtataatcgatacaaaaaaaggaaagaaagttgccaaaggcgattgtgctcgtggtagcctgcatcaggatacatactatggtgcaatagagcgggatggtagtattaggtacgttgtgcgtaagcctttgtcatcgttcacaagtataaaggatttggataatatagttgatgatgctgtccgacagactattcttaatgctgttgaaggaaaagatttcaaaaaggcaatagcggagcctatctttatgaataaggataaaggtgtacttgtcaagaaggtacgttgttatgcacctactgttaccaagccacttcagattcgtgagcgcaaacgacgtgatcttagtggaaaagaatataaacgtcctttctatgttgtaaatgatgagaactacatgatggcaatttatgaaggtggcaagatgcaaatgataactgcacttgatgcagtcaatttctataaagaaagtacagatagaattgcctatcccacaattgtggaagaggtatacaagggtaagagacttaaatatcttgtcaggaagggtactcaaattttaatgcaggagaaagatgaagaatatatctcaacgactaatcagaaagaacttttcaaaagattgtttacaataaccaagttagagaaggatgggaggttgacattaagacacagtgcagaagcacgtccagcgacagaagttaagaaatatcttagcgcagagccctttatgataaaagatgctccgcgtcctattatacatgttagtttgtccaagtttaaatttcttgtcgaaggcgttgatttccaaattaccccaacaggtgagataattctaaaacactgattatgcttaaacgaacattggtttttacaaccccgcttcagttgtctttgaagaactcgcaattagtgatttctttcaaagaagtgccggcggagaaaagaacaattccaatagaagacattggtatggtgataatagaaaatcagatgatttctgttacacttccattgttaaacgagttggttgatgctggagttgccgttgttctatgtgatagaaaaggtttgcctcatgccatgttgcaaaatatggatgggcataatcttcagggagaattcctgcgtaatcaagtggaggttggggaagtcctgcgtaaacaattatggaaacaaataatagaagcgaaggtaaagaaccaatctgctttgttagaaaagatccataaaaaaggcgatttactgaagcctcactatatgaatgtgaaaagtggagatagtgacaacagagaagggattgcagccagattatattggagtgcaatgtttggtgatgattttgcaagagacagagaacttccaggaatcaatgcactacttaattacggctatactatactccgtgcagctaccgcgagagccttagtgtccgcaggattaacaccttctttgggtatattccatcataatagaagtaacgcttttcctttggctgacgatcttatggaaccctatcgtccttttgttgatgaaatagtctattatttgtgtgaagaggggaagttggaattggacaaagaaacaaagggtgagctcttagggattctttcatgcgatacatattttcccaaggtaactcgaccattacaaataggtctatctattacaatggcatccttggctaagtgttatgctggagagcagaaattactcacattacctatgcttaaatgagtgaagtccgtctaaatgcatataaaataatgtggcttatagctatgttcgatttgccaactaagacgaaaaaggaacgtcatgattatgcggtctttcgtaagaatctggaaaagaatggatttgttatgcatcagttcagcgtatattgtcgtttttgcgcttctttagaggcaagagatgttcatgtaaaacgtgttaagtcttttatgccaaataaaggaaggctaagtcttcttactattacagataaacaatactctggtattattaatatttggggggaaattgaacaaaaagtgcagaaaaggccagtgcaattagagtttttttgatatatttgccacggatatgatacgaatcacgccacttcttgtatgtaaaatgtattataaatagctaaatttgagctaaatacaccatataggttgtggtttgatgatgaaatagaatgatatacaaccaatgcttccgttgacttaacaatcaacccgttgtggtttgatgatgaaatagaatgatatacaacttatatttatttcttattatcatctttagagttgtggtttgatgatgaaatagaatgatatacaactaccatcggtccccaaccagataaagatgagttgtggtttgatgatgaaatagaatgatatacaactttctgatcgtgccagacaaaaggccgagagttgtggtttgatgatgaaatagaatgatatacaacaggcactcgctgcctatacgcccatttacggttgtggtttgatgatgaaatagaatgatatacaacgaaccccttgcagcaagttcagaaggatatgttgtggtttgatgatgaaatagaatgatatacaacaaaccacagctgccgtccgtgcatggcaaagttgtggtttgatgatgaaatagaatgataaacaactcaattaaataaaaactcaaatcattatgattggatattttattgtatttttatttggattttttggtggttattgctacaagtcgcagcgatataataaatattacagcaagtatggcatccatccggtaatgagcaacgaagactgtaacgcctctgccacaaagatatcagaatttctgcgcaaacgtaaatggatggaatgtgaaacaaccctacaaacagaagaaagtaaaaaatgggaagagaccgttggcgttatagcaagacaggaaatctttggcccccagaggatagactaccaaggcggcgaaccctggcttgcgtcgtttattcgtattgttgattctcttcagtgtcgcatcattattgtagataagcgcaagaagacagactttgttacgccggatatcccagacctaccagaaccttcactataaccaaaggaaggaccctaacaaggtccttcctttttttgcttattggcggtgataccgcgttgacacttaactggacctgccgaaaacggcagggaactgcacagcggcagcaaattcttcactcgtctatatgcattcgttcacggaagcgctggcgtttagcaagcgactgttcctgcccgttgtcaacctgcattttcacgccgatgcctctgcagttgtggtttatgatgaagcggacttatgcgatggttgttacatttaggagggtggcgtcagtggtgctgcagatttcttctgccaggttgttcaggcgatggaaacgggcgtaatcggatggcgttcccgtgctttttagtgcggtagtcattatttcttcgtccagaccccatggcgctaagatgagtaatgtgccacgtgcacatgcctcgaaacggcgacgttctggtttccaatagcgttctataggtttcttctgaagatgtataacgggtaacccttcttctatggcagcattaataacaaggctttctccttttgaaatcccaggtgatacgagcactacgcctgtacgtgcctctgccaactggcgttccatctctcgtttgtaaccttcggtctgttctgttggaatacctgtgtctttgtctctgcgatgatagaagacttgttccttttctgcacgtttcaataggaagagggctccaaaggcagcatactcgtgtgtgccgatacgcaggtgcaggcgtcgctccataagatatggtaattgcctgcgcataagggcacgtagcgggttgtcgcccatgtagcgtttgatcgtttcgagcattccggggcgtttgatgatgcggtcgtgatagccggcttcgaaaagggcagggcctgtagcttttatcgcagctgatgctgcagggaccacggctcttgtgtctgttgccgctgtccccgttgcgttagcatcggtcttccctgttgccgtcagtgcccaccatgcacgtgagcagccccctttaaaactgctgataatatggcccaggtgttttccttttggcagaggctccctgatgtaaaacagcaggtgcaggtggtctggcataattgccgcctgccatagttctatttgtgggtataaacggtgtattttgggcaactcgttttcgagaatagtacgaccaaggggactgggtactatatgggggaagtccgccgttccccgtgttgcttttatgttgccttctatatggccaaagaaaggatgtcgcccctctatgcacaaggtaatcatatacagaccgcagcccccatagtcctgccactctgcgcggcggtgttggttgtgctgaatatcgtgtggctttaatcctctgcgtagaagttcttctttggaggtaggcatttgtggcttcgttttttgtggatatgttgttatatattgcaaaggtacaaaaaaaaattacgtaaaacaaagaagagaggttcaattgctgagcctctcttcttttgttcgtatctatttggattagatagccatagttagaacatctggtcggggtactgaccatcggcatgaagcttggccagcttagctactacctcgggacgatcctcgggataggttacgccaaaccacttgctggtggtgggcaatacctcgcaggttgccttgccctgcttaatcaggctgtcgaccatcaaggggatgaagaactcggccttcaggttctcctgattcttggggtctgaaaggaactgcttgaagtactcctcgctataagcaaagtagtcgggagtgaagccccagaagttcatgctgcagggagtgttgtcggggatggaaacccactggtcgttctcgtcgagatactgaacaacaccatcgcggcgctcgatcttggtgcgctctactacgctggtgaggaagtgtgtcttctcgtcgttctcgcagataccacggctaacggtaccgctctcgctaagggtgttgcttacgctgaagcccaccatggcgtacttgcccttgctaccctcgggaaggttagagaggaacttgcccattaccatgaaggcgtcacggtcatagaagtcgtcgcagttcagtacggcgaagggctccttgatgatgtccttgcccatgagcacggcgtggttggtgccccagggtttctggcggccttcgggtacggtgaatccctcgggcagtgcgtccaggctctggaagcagagctcgcagggtacgtggccttcgtacttggccaggatctgggtgcggaactgctcctcgaagtcacggcgtattacccatacgatcttgccgaatcctgcctggatggcatcgtagatgctgtagtccataatactctgtccctgaggacctaaggtgtctaactgcttgagacctccgtatcggcttcccataccggcggccagaagaaacaatgtaggtttcatgtcttgatttagtatatgtttatatgttgttaataaattccatgttgcaaaagtacaattattttatgaatttctgcgttctttttgcaaaaatgttcctttctttagtctgttctggcttagaatggatatccgattgcgaaatgataaccaagcgatttgccgaaactgggcatgttgtaatagcctgatttgcctgtgtcgtagggtgcatggataccaattccgaggtcgaatcggagaacgaggaagtccaggtcgtaccgtagtcccactcctgtgcccagggcgatggtctttccgaactctgacatatttatcttgccacccggctggttgctgttctccttgatgagccagacattaccggcatcgaggaaggcggcaccgtacaggttggctataatggggaagcggtattccaagttggcctccaacttcaggtctcccgtctggtctatgtatgagtaggaacttcttacggggtggtaagagccagggccgatgctgcggatggagaaggctctgatactgttggctcctccgatggagaacaggtcgttatagggtgccgtggaggcgttgccgtagctgtacacaatacctgcaaacacgcgtgtggcaagacagctgcgcggggtgagctggaagcggtgggtgtattgtgcagaagcctttacgaactgagcaaacggaacgccgaagagctctttctcgggcttgctgaatgcttgtccgcagatggcatagatgccagatgttacgttaccagcctccttcaggtttatcttcagggtctgctgatgtctttccttttccttcgtccatgtgaaggtgtactccatgctgggtacaaactggtcgcgcatggaaatgtatagggcggggtttgccctgatgatggagtcgaagcgttccgtgctgttcagcagcaggtcgtagctcagactaaagggggtgaactcgtgcttgacgttcttgcctctttgcagcgtatatgagacagatgccccaaaggataccctgccaaagtatttggctctgttcacccacttggcgttcagctcgaagttggtgctggagatagatctgcgccacaacttcttacccaagccgaagaatagcaggcgggggtaggatagtgatgccgtagctccgtattcgtaggagttaatgagtgagttgctaccctcgacatgtgctccggtctgccattcgtatgaaccccagacgttcagtcccaaggtctctgcaccacggaaagcattgcgcttgcgcatgccaaagctaacgccagggcccacgtagttgttgctcttgttggttatcttgccgatgaactcggcatcgtatggcttgtccagcatgccagagattacgacatccagcgtgtcgttggtaagggtggtgtcgcgtggcacaaaacttacgcgcatggacgagaatatatccatgtctgccaacttctgctgcgttacgtcctgattgttttgctggtagaggtcacccttcttcaggaagaggttgggcatgatggcgcgtagccttagaggaggcttgttctctgtattgctataggcataggtctgccctctgaaggtaacgctgtccgtcagctggaacttattgtatttatagatgttgatgcgcgtgtttcctatataatagggatgctcggcttgattgggcgtctctggcagggggcgtacctgaatctgcaccttctgtggtatcataacggtatcagccctaaaggagatgtattccggcctatagtaaaagtatccgttgttgcggaactccttttggagccttctgcgctctgcatcgaggttctgaacactgaatggcgttccctgctttaggagcgactgacccatggtagcctgtatgatgctgtctgcctgcggatagaagggcagatacttgatagtatctaaatggaatacgggaccgggtgtgacgtgataggaaatcttggctttcttgggattggtcataggtatggtgtcgtacgtcaccttgttgcggaagtagccatagttcctgagtgtgttatgtgccacagtgcttctgaccttcggattgacgctgcttacgtaaacaggcgtggcagcaaagtggttcatcatccaacggccgaacttgctggtgctgttgacatacttgttgtagatccaaagtcttacagggaaggggtgcgtataataactgctgcccatgatggctccgttaggagagtaggcaagggcggcctttatctcctccttggccgtctcgtagttcagggcatcctgcttgtccgctttcttcagactgtctttcagcgcagccttgtcagcctcatctgtcttcagtgcactggcatcgcccgtcagcaatccctctacggtgttataggcatcagccaatgccgtgataacgccttgtccctgtatgctgtcgcgtttaagaggcgcatcgtagtccagcttcttgatacctctgtacaatacctcatcgtctggcagattctttgttgtataacatgctgtcagacatagtgttgttaatatgaatatgaagtattttttcatttcttttcctctttcttctttgtgcggaagatgaacaaatcctttaaccgctcggcacgtttcctgagtaccagaccggctcccatttctgttatctcgccttccagcagggactcgtagtttctgtcgtagaacaggcgcacgtaacgggaagagttcttgtcgagacggtattccatagatacgttgtcgatgatggtttgtcctgtatttacggcattcttacccgtgctaatctttccgcctatgatgatgcttaccctattgccccagaatcgttttctgaagctgaagctatagtctgttgtcgtttcgccaccttgctgcgtgttgttttctattccgaagttcaggtcgacgctgttgctcagtgcctgtcctgccagattgttgatggctccctgcagataggcattcatggtgttggtatagtcgaagcctccctgcatgccgctcttgtcgttcaggtacataccagttaccaacatggtgatggctatacgtccgcgctcttcctcgctcatggcagaaagctcgttctgtaccgtcatatcctctggtgcctccaatgtgaagagcagacccatatcctccagcgtctgtgtaatctttagtcctacgtcgaaggctacattcttgggtacattgttctctgtaacgctggccttcacacgctcgctggctgcaatattgagtcgtggattcattatgtcgcccacaaactcgacgtaactgccgttggctatcttgaagtcattcagcggaatagccatgatggagtagcgcatggtaccttcgtctatggtgtagcgtccgaacagctgcagctcgttttgcagatcgtaggtcatggtgatacttccgcctccctgcagctctatgcggtcgcgtccgtcatcgctcaagaggcagtgaaccttcaccgtcgggtcgatgtttatgttcatctgaatgtccagatgctgattcgaagcctcctccggttcaacactcagggtgtctgtgaagtcgcagaaggttacgagatcggaaagctggtcttctacggtaaggggcgaatccttcagtacatacgtgacatccgtgttacccagaacattcagtgcgcctcgcatcttcaggtcgttcagcgttccccagatgcgattgttaatgtcaacataaaccttaccgtatgccagggcgttacgtgtcttgggcgcatttatcagctggtagttcttggcagcgatattcaggttcagctgcacattctccaggttgctgaagtcgatgtttccgtccaacgtcagcgggttgttgccggctgcgtaagcctttatctgaggcaggtctatatgactatgattaataaacaacgtatcgttggggatgcgcaggttgatgttgtatgcctcggccgtaatattcagcgagtctgtggcaatgctgcccgtaaggatgggattgctggtactgccctttacctcgaggtttcctaatgcatagcccgatagtgcgatggtctctggaggcatgaaggcattggccagactgaagggtagcctgctcagttcggccgtagcatctatctgtccttccttgtctttctcccagtatgtaccactcaggtaggcaatatcacggtcgttctgcgatactataccatcgacatgatgggtgccgtcttcattaggcaggtatatcaggttcatacccaaatcgcccatgctggtaccttcgtacttcattcccttcaccttcatgtcggtagaaatggtgatggtgctgtctgcctgcatgtagtggaggtctccgttcaggaatccttctatcattggcatgaatggcatgacggatgacaattcgcccaagttcagcctgttgacgctcagcgagaggtcttgctgggcatcttcgttcttggtggagtagagtttcagacccgtaccatcgtcagccaacaggtctatcaaagcctccaccttattgcctttgataagacggatgtagttgtcggggttcaacttgaagttcctgtaggcaatgatggggttcagtggcgtgaagtgaacattcagtgcctctggcgttacctctgccttcagacccgtgtcgatgcctttcttgcccttggcatccaagaacaatagatgggcggcagcaccattggtggtgaggctggcatttataacactctcgaagctgacaaccttgttcttgggcccgttcttgactcttccctgcatcgtaagtccttcttccttctgacggatttggcacgaaatggtgtcaagcaggatggctcctgtattcagatggtacatgtagccctctccattcagtccgctctcggggttgctggtaagatccagatgcatctccttgaatttgtatcccagcacgtggttcagaatattaaagaaggggttcttctgtccgctctgcagatgaatattcgcatagggcaggagcgtgcgtagtttgtcctggtcgagatgcaggctatcgatctgcctgcccaactcctctgtgaagttgttgcttctggccaagagagaatccagtccctgctctgattccatgtggaataccaagtcgcctgcggcagcgtaggcttttatgctgctggggttcagatgtgctgttagggcaaggtcctcggggtagaagatggtgtcgttgacattcatctgcagtgccctgatgctggctgtaagattgtgtgtctggtcgaag

SEQ ID NO: 4567 - DNA, 17331 bp, synthetic construct
  misc_feature 1..17331: note = Synthetic
  source 1..17331: mol_type = other DNA
tagagaaaatcggcgagactctcaaggagtacagctgcttttatctcaccgacactaccagcatggacgctgagcagacaagtgcgttccgtcgcgcttgcttcaatgcggaagtgaagatgatggttgttaagaatacgttgcttcacaaggctttagagcaattggaaggcgattattcagaattgtatccagcgttgactggaacaactgcaatgctgttctcaaatgtaggaaacgctcctgccaaagcaatcaaggagttccacaagaaaggatcagagttgccagttttgaaggccgcttatgtggaagaaacagtttatatgggtgctgatcaactcgacacattgtcgaagatcaagagcaagaacgagctcatcgcagaggttgttgcattgctccagtcaccggccaaaaacgttgtttccgcactgcagtcgtcaggcaacaagttgcatggtattcttgaaacactctctaacaaataataaacaaaaaaataacaataaaaaattatacaattatggcagatttgaaagcatttgcagaacaattagttaacctctcagtaaaagaagtaaacgaacttgctcagattttgaaagacgaatatggtattgaacctgctgctgcagctgtagctgttgctgctggccctgctgccggcgctgctgctgaggaagagaaatcagcattcgatgtagtattgaagagcgcaggcgcttctaagcttcaggttgtaaaggccgttaaggaagcttgtggtcttggtttgaaagaagctaaggacttggtagacggtgcacctagcacaatcaaggaaggtgttgctaaagctgaggctgaggctcttaagaaacaactcgaagaggctggagctgaagttgaacttaaataatattgcctgaaattcaggtaattaggttaagaatcccctataaagtcgattcttaacctttttgtgttattttcaatttcgggttcaattaatattatttttatgtcagtttcaacagtaaaaccacgcgtaaatttcgcctccgtaaagaatccgttgcccttccccgactttttggagattcagctgaagtcgtttcacgatttcttgcagctggacactccgttagagaagagaaagaacgagggattgtacaaggtttttgcggaaaactttccaattgccgacacaaggaataactttgtgctcgaattcttagactattacatcggcccgccgagatatacgatagaggaatgtcttgagcgcggcttgacatatagtgcgccgttgaaggcaaaattaaaattatactgtacggatcccgaccatgaggacttcgacaccgtaatccaggatgtttatcttggaccgattccgtatatgacggaaaagggcacatttgtgatcaacggtgcggagcgcgttgtcgtgtcgcagctgcaccgttcgcctggtgtgttcttcggacagagcacacacgccaacggaaccaaattgtattcagcacgtatcatcccgttccgtggctcatggatagagtttgccactgacatcaacaatgtgatgtatgcctacatcgaccgcaagaagaaattgccggtaacaacattgttgcgtgccatcggtcttgacagcgataaagacatcatagaaatctttggtcttgctgaggaaataaaagtaaacaaaacgaacctgaagaaatgcattggccgcaagcttgccgcccgtgtgttgaaaacgtgggttgaagatttcgttgacgaagacaccggcgaggtggtttcgattgagcgaaacgatgtggtcatcgaccgcgagaccgttatcgaggaggagcatatccaggaaatccttgattcgggacttcagaccatccttctgcacaaggaggatgtagacatgagcgactactcgattatcttcaatacactccagaaagactcaagcaactctgaaaaagaggctatcaactatatctatcgccaattgcgcaacgcggagccaccggacgatgcgagcgcgcgtgaggtgataaccaaccttttcttctccgagaagcgttatgacttgggcgatgtgggccgttaccgcatcaacaagaaattgtcgcttacagtgccggaggaggtgaaagtgttgactaaggaagacatcatcgccatcatcaagtatttgattgagcttatcaattcgaagtcggatgtcgacgatatcgaccacctttcgaaccgtcgtgtgcgcacagtcggcgagcagctctacaaccagtttggagtgggtcttgcacgtatggcgcgtacaatccgtgagcgtatgaacgtccgcgacaacgaggtgtttactccgattgacctgatcaacgccaagacaatctcttccgttatcaatacgttcttcggaaccaacgcattgtcgcagttcatggaccagaccaacccgcttgccgagattactcacaagcgaagaatgtcggctctcggtcctggcggtttgtcgcgtgaccgtgccggatttgaggtgcgcgacgtgcactacacccactacggacgtctttgcccgattgagacccctgagggccctaacatcggtttgatttcgtcgttgtgtgtgtttgctaaaatcaacaacctcggctttatcgagactccttaccgcaaggttgagaacagcaaggtggatctcgacaacagccacgtcacgtatctgacagcggaaatcgaggaaggtcagatcatcgcgcagggcaacgctccgcttaacgatgacggcactttcgtaaaaaacaaggttaaagcgcgtcttgacgccgacttccctgtggtagcaccggaagaagtgcagcttatggacgtgtcgccgatgcagattgcctcaatcgccgcatctttgattccgttccttgagcacgatgatgccaaccgtgcgttgatgggatcgaacatgatgcgccaggctgtgccgttgttgcgcagcgaggctcctattgtcggcacaggcattgagaagcagcttgcccacgactcccgcacacagattatggcagagggcgccggtgtcatcgagtttgttgacgccagcgttatcagaatccgctatgaccgtactgaggacgaggaattcgtgaatttcgaggactcggttaaagaatatatcattccgaaattccgcatgaccaaccagagcaccacaatcgacttgcgtccaatctgcaagaagggacagcgcgtcgagaagggaatgattctgacagagggttatgccacggaaaacggcgagctcgcactcggccgcaaccttaaggtggcgttcatgccatggaagggttacaactacgaggatgccatcgtgctcaacgagcgcatggtgcgtgaggatatccttacgtctgtccacgtcagcgagtactctcttgaggtgcgcgagacaaaacgaggaatggaggaacttacgtcagacattccaaacgtcagcgaggacgctacaaaggatctcgacgagcgcggaattgtccgtgtgggcgcacacgttgtgccgggcgacatccttatcggtaagatcacacctaagggcgagagcgacccgacgccggaggaaaaacttctccgtgccatcttcggtgacaaggccggcgatgtgaaggatgcgtcgttgaaggcatctccttcgttgaagggtgtgattgttaagaccaacctttatgcaaaggctcagaagaagaagggcaaggcggcaaaccttgagcttcagcagatggacgaggaattcgaacagcgtcaggtggctttgaaggcacgtcttatcgagaaactcattacgcttaccgacggcaagacttcgcaaggcgtgaaggacttcctcggcacagaggttattcctaagggcgagaagtttacggcagagtatctgaagggcatcgaggaattcgacaccatcaacctcagcaagtggacaacagacgctcacaagaacgatatgatccacgacacgattatcaactacctgcgcaagtcgaaggaaatcgatgcagaattgcgtcgcaagaagtttgacttctctatcggcgacgagcttccttcaggcatcatgcagcttgccaaggtttatgttgccaagaagcgtaagatcggtgtcggtgacaagatggcgggtcgccacggtaacaagggtatcgtttcgcgcgtagtgcgtcaggaagatatgccgttccttgccgacggaactccagtggatatcgttttgaacccgcttggtgtgccgtcacgtatgaacttgggacagattttcgagaccgttctcggatgggcaggccgcgagcttggcgagaaattcgccactccgattttcgacggagcgagcctcgacgacctcaattcatggaccgacaaggcgggagtgccacgctatggtaagacatacctttacgacggcggcacaggcgagcgcttcgaccaaccggcaaccgttggtgtaatctacatgcttaagctcggccacatggttgaagacaagatgcatgcccgcagcattggcccgtactcattgattacgcagcagccactcggcggtaaggcacaattcggtggacagcgtttcggagagatggaggtttgggcgcttgaggcattcggcgcatcccacatccttcaagagatcctgacaatcaagagtgacgacgtggttggccgcagcaaggcatacgaggcaatcgtcaaaggcgagcctatgccaactccgggcatacctgaatccttgaacgtgcttctgcacgagcttcgtggtctgggacttagcataaacttggaataaaacgacaaaagaatatggcattcaataaagataatagaataaaaagtaacttttcgaagattacgatcgggcttgcttcgccggaagaaatccttgagcggtcatacggcgaggtgctcaagcctgagacgatcaactatcgaacttacaaacctgaacgcgacggtctgttctgcgagcgcatttttggtccggtaaaggactatgagtgccactgcggaaagtacaaacgcatccgttacaaaggcatcgtctgcgaccgttgcggtgtggaagttacagagaagaaagtgcgccgcgaacgtacaggccatatctctttggtcgtgccggtagcccatatctggtatttccgctcattgcctaacaaaatcggttatcttctcggcttgccgtcgaagaagcttgattctgtaatctactacgagcgctatatcgtaatccaaccgggagccgcagccgagcttgagggtcatgaggaccttgcccgtctcgacctcctttcggaagacgaatatcttgaaatcgtggacaagttgccgcgcgagaactcgatgctcgaggactcagaccccaacaagttcatctgcaagatgggtgccgacgcaatctacgatttgttgaagagcgtagaccttgacagcctttcttacgagttgcgccaccgtgccgacaccgacacgtcgcaacagcgcaagacggaggcattgaagcgtctgcaggttgtagagtcgttccgtgcgtcgaaaaaccgcaacaaaccggagtggatggtgctgaaagtggtgcctgtcactcctccggaattgcgcccgctcgttccgttggacggcggccgtttcgccaccagcgacttgaacgacctttatcgtagagtcattatccgtaacaaccgcttgaaacgccttatcgagatcaaggcgccagaggtgattctccgcaatgagaagcgtatgcttcaggaggcagtcgactcattgctcgacaactcacgcaagtcaagcgttgtaaagaccgagagcaaccgtccgttgaagtcactcagcgacagcttgaagggtaagcagggacgtttccgtcagaacttgctcggtaagcgtgtcgactactcagcgcgttcggtaatcgttgtaggtccggaattgaagatgcatgaatgcggtttgccaaaagacatggcagccgaactttataaaccgtttatcatccgcaagcttattgagcgcggcattgtgaagacagtgaagagcgccaagaagattgtagaccgcaaggagccgattgtatgggatatccttgaatacgtgatgaagggtcatccggtgcttctcaaccgtgccccgacacttcaccgtcttggtatccaggcattccagccacgcatgatcgagggcaaggctatccagttgcacccgttggcatgtacggcgttcaacgccgacttcgacggtgaccagatggcagttcacttgcctctcggcaacgaggcagtgctcgaggcacagttgctgatgctcggtgcgcacaacatccttaacccggccaacggcgctcctatcaccgtgccgtcgcaggatatggtgcttggtctgtactacatcaccaagctccgcaagggcgacaagggcgagggtcttgtgttctacggaccggaagaggctcagattgcatacaatgaaggcaaatgtacgcttcacgctataatctctgttgttgtcgacgaccttgacgaaaacggaaacctcgtgaagacaatggttaaggaaacgtctgtcggacgtttgctcttcaaccagaacgtgccagaggagatgggctatgtcaacacattgatttccaagaaatcgttgcgcgacatcatcggcgccgtcatcaagcgttgcggtgtggttcgttcagccaagttccttgacgacatcaagaacctcggttactacatggcattcaagggcggcttgtcgttcaacttgggcgacgtgcttatccctgccgagaaggaagaatacgtaaaagaaggttacgcgcaggttgaagaagtgatgaacaactacaacatgggattcatcaccaacaacgagcgctacaaccagattattgatatttggacgcacgtcaactcccgcttgacaagcacattgatgaagcagcttacagcagccaaccagggcttcaacccaatcttcatgatgcttgactcaggagcccgtggttctaaggaccagattcgtcagctcgccggtatgcgtggtcttatggccaagccgcagaagagcggtgccgagggcggtcagattatcgagaacccgattttggcgaacttcaaggaaggcctttcagtgttggagtacttcatctctacccacggtgcccgcaagggtcttgcggatacggcattgaagaccgccgacgccggttatcttacccgtcgtcttgtcgacgtagcccacgacgtgattatcaccgaggaggactgcggcacgcttcgcggacttgtctgcacagagcttaagaacaacgaagacgttgttgcaactctcagcgagcgcattctcggacgtgtgtcggttcacgatgtggtagacccattgacaggtgacatcatcgtgaagagcggcgaggaaatcaacgatgcagcagcagagcgcatcgagaagtcgccgattgagtcggttgaagtgcgttcggtgcttacctgcgagtcgaagaagggcgtctgcgccaagtgctacggccgcaacctgtcgaccaaccgtatggttcagaagggtgaggctgtcggcgtaatcgcggcgcagtcaatcggtgagcctggtacgcagctgaccctccgtacattccacgtcggtggtgtggcatccaatatcgcagccgtatcgtcagtgacatcacgctacgacggtgtgcttgagattgaagagctccgcacggttaagacagaggactgcgacgtagttgtaggccgtctggcagaaatgcgtatcgtcgacgccaatacgggcatggtgctgacaaacaccaacatcccttatggttcgaaactttacttcggcaacggagcaacagtcaagaaaggcgacgtaatctgcgaatgggacccgttcaacgccgttgttgtcagcgaggttgccggtaaggcacaattcgtcaacgtgattgaaggtgttacttaccgcaaggaaaccgacgagacatccggtttgcacgaaaagattatcatagagtcgaaagaccgcaccaaggtgccggaggtcaacatcgttgacgccaacggacaggtgctgaaaacatattcattccctgtcaacgcccaccttatgattgaggacggcgatgaaatcaaggcaggtcaggtgtttatgaagacaccgcgcgcatctggtaacgcaggtgatatcaccggtggtcttccacgtgtcactgagctcttcgaggcacgcaacccgtctaacccagccatcgtttcagaaatcgacggcgaggttatgtttggaaaaatcaagcgcggtaaccgcgaaatcagcgtgacatcgaagattggcgaagtgaagaaatatctcgtgccgttgtcgaagcaaatcctcgtacaggaaaacgactacgtgcgcgccggcacaccgctttcagacggtgcgatcactccgtcagacattcttaacatcaagggcccgacagccgttcaggaatacatcgtcaacgaggttcaggacgtctatcgcatgcagggtgtgaagatcaacgacaagcactttgaggtgattgtgcgtcagatgatgcgcaaggtctgcatccttgatccgggcgacacccgcttccttgagtcgcaggttgtcgacaagcgcgactttatggatgagaacgaccgcatttggggcaagaaggtggttaccgacgccggtgactcacagaatctccaggctggtcaaattatcacagcgcgcaagctccgcgacgagaactcagctttgaagcgcaaggacttgaatctcgtacaggtgcgcgatgccgttccggcaacgtccgaccagatgcttcagggtattacccgcgcagcattgcagacttcaagcttcatgtcggcggcttccttccaggaaaccacgaaggtgctcaacgaggcagcaatcaacggcaagaccgacaatctggagggcatgaaggagaacgttatctgcggtcacttgattccggccggaacaggtctgcgcgactacaactcgcttgttgtaggaagcaaggaagactttgaatatctcgacaagagtctcgacgcccgtcttgaggctgaagcggctgaagacgctgccaaaatcaagaaggctgaagagaaaggcaaataaagaaactgattgaaaaaactgacaataaagatagcccggcgattggttcgtcgggctatctttttaatgagtggacaaacaaaaagcctccacggaaagtacgcggaggcataggatttatatccttcggcatatagccttattgtgataagatgtagaaataatcttatgttgcaaatttctacagaataattgatatttccaaataaatttcgctaaatttacggaatattgaaaaaaccgaaacaaaaaacgatatgaaaagagtatttggaatagatttgggaaccaattcaataggatggtcaatagtagagcagttggaaaatggaaaatacagacatataaaatctggtgttgacatttttaaggatggagtggatcacgataaatcaggagagcatccatgtgtgcaattacgaactaatgcgagaggattgcgccgacattattttcgccgtcgtttacataaaatagagttgcttaaaatattgatagaggaaagaatgtgcccgccgttgacagatgaagatcttaaacggtggcggtttaagaaaatctaccctaaagaagacaactttatggaatggcagcgcacaaacgacaatttggagaaaaatccgtatcatgatcgatatgttgcgttgacacgaaaacttgatttgtcgatagagagcgatagatacatacttggcagggcattttaccacttgtcgcagcgcagaggattcttgagaatcgtaaagattcaacgaaagagcaagaaggagaggtcaaggctgctatatctgaattgtcagacaaaattaaagaggcaggatgtagttatctttgtgagtatttctacaaattgtatcaggctggggataaaatacgagggcattatacggctcgcaatgagcattatctgaaggaatttcaggcaatttgcgacaagcagagcctcgggactgatttgtgcaagcgtttgaataatgcaattttttaccagcgacctctgaagtctcagaaaggaaatattgggcgatgtacgtttgaacttggcaagcaaagatgttcgacatcgcatccagcttatgaagagtaccgcatgttgtgttttataaataatatccgtttgcatcgtcaaggggaggattctgatttccgtgtgcttacaaaagaggaggttgacgcaataattcccaaatttgtatgcaagtcgcaatttaaatttgaaaaattggcaaaggtgttggctcataaaaaagagaattatgggttcaagtatgattctgatgaaagtactcttaaatttaattatcgaaaagaaacaagcattgctggcagcccggtgactgctggattgaaagaaatattcggagaagaatggaaatcggaaatctgtagtgtgtatatgaagtcggaaggaaagacagaggaccggataaacgatgatgtgtggcatgtgctctattcttttgacaatgatgaaaacatccgggattgggcaaaaaagaatctgcagcttgatgatgaacaggcagaaaagtttgctaaaatcaaaatcgaacgtgattatgcatcgttgagcctgaatgctatccgaaagattctgccatatttgcgacgtggtttgcgttatgatgaggctgtgttctgtgcaaatattccggcggcgtttgggaatgtagaagatgttgatgaatataggaaaattgaggatgacgtagtcgcatgtgtgcgaaatttcaaaagctgtgaagtggcgggtagaaaaaatacattggaaaaagaagtggcagaattgttggaggagaagtatggcgtagacaaacgtcatcttggaaagatttatcatccgtcaaaaacagaaacttatccaactgcacagcccgacaataacggtttgcggttgcttggctcgcctcgaacggcatccgtgcgcaacccaatggctatgcgggcgttgtttagattgcgggcgttgacaaacgagttgcttaaaaagggagaaattaattcagaaacggttgtcaatattgagtttgcaaggggattgaatgatgccaatatgcgcaaggcaatagaaaattatcagcgggaaattgctgataggcatcagaaatatgccaaggaaataaaggactgttatttaaaagaaactggaaaaaatattgagcctacagaaaatgagattctgaaatatcaactttgggaggaacagaatcatcagtgtttatatacaggcaagatgataagtgtctctgattttatcggggctaatccaaagtttgatattgagcacactttgccacgagctgctggcggtgatgactctcaggtcaacaagacactttgtgacagccgtttcaaccgagaagtgaagaaggcacatttgccatcggaattggcgaatcatgcagaaatattgttgaaggcaaaaaatctgtggcaaaagaaaatttatgagttgaccaagcagatagaagggactaaaggttatgccgccgataagaatacaaaagacggtaaaattcagcgcaggcatttgcttaagatgaagcgtgattattacattggaaagttgcaacggtttgagatgaaagaggttcctacagggttctctaatcgacagggtgttgatattggtattataggcaagtatgccaagtcgtatctgcacaccgtgtttgacaagatttttgttgtgaaaggagctacaactgcggctttccgaaaggtttggggcttgcagtcggtgtatgagaagaaagaacgcataaatcatgtgcatcattgtgtggatgctattacgattgcatgtatcgggaaaaagcagtatgatgactggaaatgttatcaggaggcggaagatatgtattatcgaggagaaactgggcgtccgtcaatggacaaaccgtggtctacattcacagaggatgtaaagcagctgacagagggcttgctgattcatcattatgtgcccgacaatgctggaaaagcatcgaaaaagaagttgcgcgtccgtggtcgcattcagcgtaatgcagaagggcgggcgttgtatgctactggcgattgcgcacgtttgtcattgcatcagcaaactttctatggggcgattaaacaggatgatgagatacggtatgtggtgaggaaaccgttggattcccttgagaagaaagatatagaaaagattgtagacccagaggtccggcagaaagttaaagaggctgttgacgccaaaggtatgaaagatgctgtagctgacggaatttggatgaatgaagaaaaaaggattccaataaaaaaagtgcgtatatacacatcaattgctaatcctttgcgattgaagcgtcaacgagatttgtcggtgcatgactacaaacgagattattatgttgctaatgatggtaattattgtatgggaatttatgagggaaccgatgcaaagggcaaaaagaagaagacgtttaagatagtcaacaatatggatgctgcaaactattttaaggcaagacaacgcggcgaagatgtggaattgttgccaatgtcggatggtaatgatttcccattgaaatgtgttcttaagacgggctctgtggtgctcttctatcaagacactccaaaagagttgaaagaatgctcaaagaaagagcttgcgaaaagattgtaccgcgttgtgggaatgtcggagatgaaaataaagcaaaaaactggaaaaatagactgttatggaatgctctctttaactttccaccaagaggcccggccgagcagtgacctgaaagataaaaatggggtgtggagaattggggaggatgtgcgacccaaaattaagttaacgcataatcaaacgaatttccttgtagaaggaattgatttcagattgacattgtcaggagatgtggaatggctaaaataaaaaattatgttgaagcgggcactgtttttcactcagccgtttatgctgagtcttcgcaattgtcaaatggtgatatgcactcgggagatgccgcaagaaaagcgaaccataccgatagaagatataggttatgtaattcttgaacatccgcagattagtgtttcgttgccgttgctcaacgctttgtctgataataatgtctctgtcatattttgtggagacaatcgtatgcctaatgcaatgttgcttaaccttgattctaacgcaacgcagggggagagtttccggaatcaggttgaggtgtcgcctgtgttgaaacgcaatctctggcaacaggtggttgtggcaaaaattcgcaatcaagcagctttgttgacaaagttgggaaaggatggcgatttgttgcgtccgttgtggcagaacgttaaaagtggagattctgacaatagggaaggggtggcatcaaaaatttattgggcagaaatgtttgggcgttcgtttgtgcgttcgcgagagggaacaggattgaacccattgcttaactatggctacactattcttcgtgctgctacggccagggcattgatgggttccggtttgctccctgcgtttggtattttccatcgcaatcgttacaatgcgtttcctctggcagacgatatgatggagccattccgaccatatgtcgatgaggttgtttatgagatgatggaggctgggatggttgaattgaataaggaggccaaagggaaattgataggattgctctttgttgatacttacttcccaaaagtgacgcggcctcttgatatagcgttgacaatggcgaccgcttcgttggcaaaatgtgttgcaggggattgtaagaaattaaaatttccgataatgaaatgacagagtttagacttaatgcttatcacattatgtggctgtttgtcttttttgatttgccaaccaatactaagaagcagcgtaaaaatgcggcttctttcaggaaaatgcttgaaaaagatggattcacaatgatgcaattttctgtctacatacgtcattgtgcatctaaagaaagccgtgatgtacatgtgaaaagggttaagtcattcattcctccggaaggaaaggtgagtatactctcagtaacagatcgccaatatggtgacattcataacttttggggaatggtggaggaggaaaaagaaaggcgaccgattcctcaacagttagaaattttttgagttctttgaaatttggatgaaaacgtataattttgttatgtgattaagaagaaaccgttattgatgaatctttagcgagtttttttaaaattttctcatcaaactacagcattccgttgaaaatgagaatgtgatttaggtgataatgtgcttgaaaatagtaccttatgcgccataggttgtggtttgatgtagaaatggaataagatacaacatatatcgccaaagtttctttcattccattgttgtggtttgatgtagaaatggaataagatacaacggcttcctgattcgtatgacgctgatattgttgtggtttgatgtagaaatggaataagatacaacggtttaataaaaataagtatatttgtatatgttgtggtttgatgtagaaatggaataagatacaactattggaaatgatataactccttatgacccgttgtggtttgatgtagaaatggaataagatacaacttgataattgttacttttggacttaacatgttgtggtttgatgtagaaatggaataagatacaacttcttgtgaggtttacgcgggaggtggaggggattgatgctcttgccactgacgtttatttgtcgtaactttgcacggtcatcaatatcgatatggcaaagaagaagtatcagaaaagaaacagcaccgcgcgtcaggtgagaactgccgtgattgttgtggcggttatcgtggctgtgtggtggcttataggacatgcgaaggagttgggcttcaagcgtgttgagagtggtgtgcccgccagcaatgtcgatgtagaggcgcttatggaggtgaatgctccagaggggctgcggcagcagattgttgcgtatgagggctacaccgcgtcgttcaacgccgacctgcgtattcccaactatgttgtctacgaactcacacgtttcgagacccagggcgctgagccgcgtcacgacaagtttatgtgcgacaccgacgttgagggctgtccgactaccgacgactataagggttcgggctacgaccgcggtcatatggctcccgctgccgatatgaaatggagcaagaaggcgatgcaggagtcgttttttttgacaaatatatgtccgcagaaccattcgctcaacagcggcgggtggaagcgtctggaggagaaagtgcgcctgtgggcagaccgcgacagtgcagtcattgtagtttccgggccaatcgtgcaaggccacatcaaccgtttggaaagcggagtggctgtgcctaccggatttttcaaggtgctgctcgctccgtttgccacaccgaagcgcgccatcgcattcatctacaagaacgaaggcggacaaaaggtgattgagcggcaggcagtaagcgtagacgaggtggaggctctcacggggtttgacttcttctcttcgctgcccgacgaggaggaaaatgaaatagaaaaaacttgtgattattacgaatggaacaattagacatcaaccggcataacgacgacacaatatgtgccgtgtcgacaccggcgggagtgggaggaatagcagtggtgcgcgtcagcggacgcgacgccgtgaagtgcgtgatgaaatcatggcgcggagccgaccttaatgccgtgcagacccacacgctgcacctcggacgcatcgtcgacaccgacggcgagacgctcgacgaggtggtggcagccgtattccgcggaccacggtcgtttactggcgaggatgtcatcgagctgtcgtgccacggctcgctatgggtgcagcagcaacttgtagcactgctcatcggcaacggatgccgcgccgccgagggaggcgaattcacgcgtcgcgcatttatgaacgggcgtctcgacctgtcgcaggcagaagccgtagccgacgtgatagcaagtggctcgaaagctgcacaccgcatcgccgtaagccagatgcgcggcggtttcagccgtatgctctccactttgcgcgaacgactgctcgaatttgtgtcacttatggagcttgaactcgatttcagcgaagaggatgtggagtttgccgaccgcacacgtctaatcgccatcgcagaagaaatcaacacagccgtgacacgccttgccgactcttttgccgtcggcaacgctatcaaaaacggatttcccgtggcgatagtgggagagcccaacgccggaaaatccacactcctcaaccggttgctgcacgacgacaaggcgctcgtgagcgacatccgcggcacaacgcgcgacgtgatagaggacaccataacgctcggcggactgacatttcggtttatcgacacagcaggcatacgccagaccaccgacactatagagacaatgggtattgagcggacgttcaaaaaacttgacgaggcagcgataatcctctggatgatcgacggcacacagcctgttgccaacatcgccaccgttgcagccgacatcctgccgcacgccgaaggaaagcatcttgttgccgtaatcaacaaaatcgactgtctttcggatgccgacatcagcgcgctgcgctcagccgtagccactgccgctccatcggcagcgatagccacaatctcggcaaaagccgacatcgccgtcgattcgcttgagcaaagcctgattgaagccgccgccattgccgacaccgaccccaacgccgtcatcgtgaccaacgcgcgccactacgacgcccttctgcatgccggcgaagccatcagacgcgctctcgacgggttgcgcagcggcatctcgggcgacttcgtgtcgcaggacatccgtgaatgcatgcactatctcggagaaataaccggcgaaatcacaacccacgaaatcctcggctccatcttctcccgcttctgcatcgggaaataagtcgtgataaacaacgattaatatcgacaacagatgatagttaaggtgttcaaaatgagcacttttttgtaccgctcttgtacctccacttttaaaaagtaataatttgagactccatttttggcaaatgagtgcaagattgccgagagttttggacaatga

SEQ ID NO: 4568 - DNA, 17098 bp, synthetic construct
  misc_feature 1..17098: note = Synthetic
  source 1..17098: mol_type = other DNA
cgtaggccgcatcgtcctgcttgtggcggcgacgtagcgagtcctttgtctcctgctcgctctgcccggcctgtgccttcagtgccgagccgtcgcccgtgagcaggccctccacggtggtgtatgcgtcggccagcgccgtgatgacgccttcctcgcccgcctgcttgtcggtctgtgtggcgcgaggcttggcatcgtagtccagccgggcgatgccggcatagagcgtctcctcctcgggcaggttgctcgtggtgtcgcaggctgccatcaatgtcagcgacagcagcatcgccaggtacttatatatatggtcagttcttgacattgcttggagtgatggttggggggagaggagtactcgagggtgtcggagtactcggattactctgattactcggagtactcgggggtgtctgagtgttctgattactcggagtactcgagggtgtctgagtgttctgattgctcggagtactcggattactctgattactcggagtactcgagggtgtcagagtactctgagtattctgattactccgagtattctgattattctgattactccgagtattccgattattccgagtattccgagtattctgattattccgagtcccctgattattcttcttgaagacaaacagttcgcccaggcgttccgacttctttcggaacaccacgccggcgcccatctcggtgagttcgccttcgagcagcgattcgtagttgtggtcgtaatagagctttacgtatcgtgtggcgctgttgtcgaggcggtattctatcgagacattgtcgatgatgctctggcccgtgttctcggcatcgctgcccgacgtgatcttgcccccgatgatcaccgagatgcggtttccccagaagcgcttggcaaaggagaagctgtagtcggtctgtgcgcgtcccgtctggctggtgttgttctcgatgcccacattgacgtcgatggtgctctgggccagccccacgaggttgttgatttcgttttgcaggtagctgttcagcgtgttcgatgtgctgaagcctcctccgcctgtgaggtcgctcaggtacatgcctgtggccagcatcgtcacggccacgcgcccgcggtcctcggcactcatggcggccagctcgttctgcaccgtcatgtcctcgggggcgcttagtgtgaactccagtcccatgttctcgagtgtctggctgatggtcagccccacgtcgaaggccacgctgcgcggctggttgttctccgtcaccgtgctgcgcatgcgctcgttggcccggatatgcagggccgggttgagcatgtcaccctggaactccacgtagctgccgctctcgatgcggaagtgcttgctgcccacgacaggcagcacggtgtagttcatgtcgccgctcaggatggtgtagcgcccgcccagcagcatgccgttgtcgttgtcgtaggtgagtgtcaggcgtccgccgccctccaggttgatatagtcgttgccggtctcgctcagcaggcagtgcacctgtgctgcttgctcgatgtcgatcgtcagctgcatgtcgatgtactggcgcttcgtctggattacctcatgctctatcgtatcggtgaagtccacgaaggtcaccaggtcggccaggcggtcttccaccgtgatggggctgtcctccagcacgtaggtcaggtcggtgctgcccaggacggacagcatgccgcgcatccgcaggttgtccagcgtgccgcgaatcatgccgcgcatgttcacgttggctttgccgtaggccagcgagttgcgagtcttcggagcgttgatgagctgatagttgtcggcgcgcacgcccacgttgagccggatggcatccaggtcgctgaagtccacctctccgtcgagcaccagcggggcatttccggcggcgtatgcctcgatgcggtccaggttgacatggctctgcgtgatgcgcagggtgtcgttcgggaagcgcaggttcaggttgtacggcacggagttgagggccatcgagtcggtggccagcatgccgctcagcaggggattgcgcgtgggaccctccacctcgaggttgcctgccacgtatcccttcatggtggccatcccgtcggggatgaagccgttggccaggctcagcggcagccgcttcagctcggcctgtccgtctatgtggccttcgtcatccttgctctggtacatgccgttgagtgccatcacttcgttgccgttctgtgtgacgattccgtccacgtagtgtgtgccgtcgccgttgggcagatatactgcgttcaggcccacctggcccagcggtgcgccttcgtacgtcatgccctggacggtcatgtcggtggagatggagagcgtggtgctgtccgactgcaggtagtggaggtctccgtgcaggaatcctccgatggagggcatgtaggggatcacctgtgtcagctcgcccagattgaagcggttgacgctcagcgagaggtcttgcagcgcatcgccctcggtgctgtagaacttcagtcccgtaccgtcgtcggccagcaggtccacgaggccctcgatgcgcatgtcgttggtcagcgccacgaaattgtcctcgttcagctggaagcggcggtaggcgatgatggggttcagcggcgtaaagtgcaggcggtagccgttctccatgatgtcggcccgcagtcccaggtccactcccttctttcccttggcatcgttgaagagcagcgaggcttcgatgccactgggcgtgacgtcggccttcagcgtactctcgaacgaaaccactttgttcttgggtgaattcctcacgcgtgcctccatgttcacgccgctgtcgtcctgatatacatgccattgaatggtgtctatgaggatggctcccgtgttaagggcatagaggtgtccgaatccgtttacgcctgccacggtgtccgtcttgaggtccatgtagaggcggtcgatggtgtagccgcgcgtctgtagcatgttggccacgggattgtcgctgcccgcacggacatgcaggtttacgtcgggcagcagggtgcgcagggtgtcctgcctcaggttgtaggctttccgctcggcatccagctcggccatcagctctgcgaagcgtcggttcagctcgtctatgctgtgggcggcgctcaggcggatgtccaggtcgcccgtctcggcctgcaggtctatggtgtcgggtgtcatgagcagcgtggcctggaggtcctgcgggtggaaggtggtgtcgggcaacatgagctgctgggcctggatgcgggctgtgaggcggtgggtgtccttcaggtcgctctctccctcggcgtggagcacgagagccaggagcagcgagtcgggcgtgaagcccagggtgtgcatgtccatctgccgcatgtctatgtcgaggcgggcgtccgagagttgtcgctccatgcgtgcctcggcacaggcatccagccgtgccaggcggttctcgctggtcagctgcatgtgccccttgccctcttcgaccacggcatacagcatgatgctgtccaggtcccatgcggcgtagcccaggtggtccacgtggctctctgccttcatgcgggtggtgggggagaagaggtcggtgcctcggccggagagggtggtcagggaggagagcgtgtgcagcgagtcgtggggcaggaagtggcccaggttcagctcgttggtgcgcagtcgggcctcgtagctcatgtcttcggcatcgaggcgtcctttcaggtgggctgtgccgcgatgctcgcccagcagggcatccacgtcatagacgctgccccgcatccgtgcctcggccgagagtgtcatggggggcaggcggaaggcgttgctcccgacgagacggttcacgcacgtcaggtcggcactcttcaggtccatcgtgaggtgggctgcccgctccctgagcgagtcggccagatgggcggcccatccgcgggcttccatgtggatcacgctgggcatggagaggcagagcgtgtctgtccacaggctgtcgatgttaccttcgagcctgaggctggcctccagtggctggtcggggcagacgcgtcgcagcagcgagctcgtggcgctgtcggtggtcagtagcaggtcctcgcgcccgatgtgggccgtggcctccaggctggtcatgccgccgcggccgggcgtgaaggcctcgaggctggctcgcccgctggcttccagatggctgtgggaagtggcgatggccaggctgtctatggcgatgtccgtgcctgccatctctatcgtggtggccaggtggcggatgccgaggccgcagcgctccgtcaggcggtcgctcgtcagagttccgcgcagcaggttctccggctggctgtacaggaaacgggccacgctcagacggctctcgcccagcgcgatgtggccgaggtcgaggccgcccctctgtcggggaaagttcgtacgctcgtagagaagcgtgtccgtgtgcagggagaggctgtcgatggcgtaggtctgctcgcgcaggttcacgtcggccgtgtgcagggtggccttgcggatggtgccgtcaatgcagagcgagtcggcaggcagggctatcgccacgcggctctgccgtatctccagacggtctgccacgatgcgccacggcgaaggctggctctccgtggtgtcctcctcttcgctcggcgttatcgtgacttcgatgtcgcaatcgtctatttccgtgttgtttatcgtgatgtggctcttgcgaaggtttaactcgtcagccttcagcgcgagtcgttctatgcggccccgcacgtgggtggtctcgatgaggctgtgagtatcgacatagcctcggcacagctcgataccctccacgccgatacgccccatcggcaggcgcatgaggttgaggtccaccactgcactctccacgcataccagggtgtcgcgcggcgggtccaccacgcagagaccctccagttctatgtcgagcgggaagcggatgcgcaggccctcgatgccgatgtcgaagccagtctggcgttctgcataatccgtggcaaggcctatggcccagcgctgtacgggcgggacatacagcaagcccatgaccgtcaccagcaagaggagcggcgagataaggaggagcaaaagcctgcggcgtgtcttggtcatacgtatcccatatcacaatttgaatgcaaatatacggcaaacgcccgacatgggcaagagaaaacaagtttttctcttgcgcgtgaagatttgtcgagcgtaagctttctttacacggagcctttcacagatgctcgtcggacttgacaaagtctggcgcgacgtgtcgcgaggggtgccgtggagtgtcgcggcgacggtcgtgacactccaccaaaccgaaaataacgcgtgagaatcgcgtaaaacggagcgggggagaggtcggcggaaaatatcggaattttgggaacgttgtgtttcaatcggttacgtttcttcctcctcctgaaaccgcctcgtggaggctgaaaaacggctattttccgcctttttcgatgccccgttttgtgaacggaaaatgagtatgtcttccgatattaggacaagacggcctgcgtgatttcctgccagagacgttcgtcgggcacgggggcaacgatgtcgatggtcttgtgcgagacggggtgctccagcacgagacgccgcgcgtggagcgagatgctgccgtcggggttggaacgtggcgcaccgtatttcaggtcgcctcggatggggcagcccaccttggccagctggcatcgtatctggtggtgacggcccgtgtgcagcgtgacttccaccaggaagtagcgttcgctggccgccagcaggcgatagtcgagcacggcccgcttgctgcccggcacctcatggtcgtgggcacgggctgtgttcttggcttcgttgcgcgtgagccagtgggtcagggtgccgctttcggcaggcgggcgctgggtgacgatggcccagtaggtcttcctgacctgtgtgtgcgaggcaaacagggcgttcagccgcgacagcgccttactggtccgggcaaagaggacacagccgctcaccgggcggtccagcctgtggaccacgcctaggaacacctctccgggtttggcataggcttccttgatataatcctttaccatctcggagagcggtcggtcgcccgtcttgtcgccttggactatctcgcccgctgccttgttcaccacgatgatgtggttgtcctcatagagtacctgcatggatatgacatgtcgtgggagtcaaaaagcagggtctaatatcccagtcccggactttaaaccctgcacgattaacttaaaaccacaattttttgattcttaacgataatccctaatccataattatgaactatgcgctcggctctgccgcttcgcctttggttcgaagtaatcggctccgccgcttcgctcgtcgaagaactatgaactatgaactatcttacatgttcatgccgccgtccacctggatcacctgtccgctcacgtagctggacatgtcgctggccaggaaggtagccacgttggcgatgtcctccacctgtccgccgcggcgcaggggaatcttcttcttccactcctcgcgcaccgagtcgggcagggcagccgtcatggccgtctcgatgaagcccggggcgatggcattggcgcggatacccttgggacccatctcctgggccacgctcttggccagtgcgatcagaccggccttcgaagcggcatagttggactggccggcattgccgtgaacgcccaccaccgaggccatattgataatcgagccgccacgctggcgcatcatcacgggcacgcaggcgtggatgaagttgaatgccgacttcaggttcacggctatcacggcgtcccactgctgctcggtcatgcgcagcatcaggccgtccttcgtaatgccggcgttgttcaccaggatatcgatgctcccgaactcctccttcacctgggccaccacggcctcggtctgtgcaaagtcggctgcattcgaggcatatcccttcaccttcacgcccagggcagctatctcggcttccgtggcctggccgttctcgtcgataaccaggtcggtgaatgctatgttggcgccctctgaggcgaacttcagtgcaatggcttttccgattcctcttgccgctccggtgatgagggcggtctttccttctaataatctcatgttgttctgtgttatttgacttttcgtcgtgtgaatgttcgtttattgatatacgttgagccggcgctcggggcgtgccagcatcttgtgcagcatcttgcgcacgatggcgcggctcacctcgttgggcaggccgcggcccagacgtccgtagatgtagggaatctccagccccttcaggctgaagtgcaggatatctacgaagaggggaatgttgtccacctcgaaggcaccgctgcgcacgccttcagccacgatgccggcaaagaggcgacgctcgttctcgtcaaactgcttgcgcacgcgctctaccttaattatattgcggaagaactcggcacgcaggttgccgttgcgctgcacggcctccttcaccttgcttagatgggcgtagatggtctcgatgagcttctcctcgggatccatgtcacggtgtgctacggcattcaggcactctgagagacgaaccagctcgctctcgatgacggccacgtagatgtcctccttgctcttgaaatacgtgtagagcgtgcgacgacccttccccgaggccatcgcgatgtcgttcatcgtggtgttctcgatgcctttcttggcaaagatctgccttgccacatcgaccagcttatttcgagtctttactactgccatagcgaatgcaaaattaccacaacttgcgtaaacttgcaagaaaatacaggaaaatattgcacaaaacgcgcaatttgtgcaaaaacgttcccccataccactccttgccgccatttattcgccaaaacatttggccatatcaaataatctccgtacctttgcacccgaaaacgatacatcgcggggtggagcagttggtagctcgccaggctcataacctggaggtcgcatgttcgagtcctgcccccgcaaccaaagcctggttcccccaggcttttttcgttggcagtcctcttcacatgctcccaggtcgcagttcttcgcactaaaggcgaagcggcagagccgagcgcgagtcctgcccccgcaaccaaagcctggttcccccaggcttttttcgtcggcagccctcttcacatgctcccggtcgcagttcttcgcactaaaggcgaagcggcagagccgattacttggacaagccaagcggcatggccgattacttcgacgagcgaagcggctgagccgagcgtgagtcctgcccccacgatgactaagggaggtggctcagcaatgaggggacagacagggatttcgcaaggagatggcaagtacttcgcaaggagatggcaagtacttcgcaaggagatggcaaggagatggcaagctcaagcaagctgttcgggcttgcctgagcttgcttagggcttgcctatagtatgccaagtgtgtgcctgcactatgacaactccaactttgtttggggatttgttttaatcgtatcctttgttgagtaatggtcgagcgtgcctttcgtgtgaggtgctctatcctatgtgctcggctttcctgctgccattgggatgtggggaaagtctgctgtttggacaatccatgcgagaaaataagcgggcagcgtgcaaaaaggcagaaagaagcccttctcggagcatgattccatgaagaaatatgtaggttgtaggccaatgagccacaacctgggcaaaaaatccatgaaaaactccatgctcaatgcaaatttttagtatcttagcggccaaagaataaaaaacagataccttatgagtaaagttcatcctttctcgcagttcaagttcgatgtctggctcatcgagcagctgaagggcactcccttgcccggcttgaccctcgatgaactacgtcgcagatggctgaatgtgcccggacatataggcaatctgtcccgtgatatgctctcgacccaccgtaagagcatccaggaattcctcggagtggtgatacaggcaccggacaggatgcactatcgcatcatgaaccccgaagccctggcacttgattcgcttgccaacgatctgctgaagagcattcagaactttatcttccttcaggaatacaggtcgctgggcaacctcatccagcccgaacagataggtactggcgcatgctatctttcgcagatagggcaggcgttgagggatcgtcggaaactcgacgtcacgtatcagaaattctccgacctggcgtcctacgatgccatctttcatccttattgcctgaaggcagacagaggacgctggtatctctttgcccataaagagaatacggatcataaagaatacatccaatgtttctccctggaccggatgaaacgccttgaggtgacatcggaaatcttcgtccccaatccggaaatagaccttgatgagtatttccgcgactgctttggcgtctggcacgattatgagacgtatcccgtccgcgatattaccatcagctgtacagagacggtagcccactatctgcgtacccttcccctccactacagccagcgtgaggatccgtacagagaaggtcccgaaggccgctacatcttccattatcatctctccccatcccccgacttcataggagaacttctcagatggggcaacaatataaaggtaatagaaggaatagggaaacaaaaagcccctccagaagaggggcagtaggaattcatccttcggcatatagccttattgtgatttgatgatgatgaattatctgctgcaaaggtaaggcttttccatgaaacaaccaaacaaaaacaaaaataaatgatgaaaaaacgaattttaggcctcgacacaggaacaaatagcttaggctgggccgtagtagatcgtgaagagaatgggcaatataccttagttgacaagggcgttgtcatctttcaggaaggagtaaaaattgaaaaagggattgagtccagtagggccgcagagcgcacaggacacagagcccttcgccggcagtattttcgtaggcgcctgcgtaaaataaaggttctgaaaactttggtaaaatacaatctttgtccagctctcacagaggatgatctggaactttggaaactgcgcaaaatatatcccaagaaagatgagttcatggcctggcagcgtaccaatgacaatgaggatatcaatccctatcattgtcgttacatttgtctgaatgaagtgctggaccttgacagacaacaggacagatacactcttggccgtgcattctatcacatggctcagcgcagaggtttccttagcaatcgactggatcagacggatgagaaagaaacgggaaaggtgaaggctgacataaaaactctgagcaaggaaatagaggatagcggatgcaagtatctgggcgagtacttctatatattatataaggagaaggggaatactgttcgcatccgaacccgatacaccgatcgcgagcaacactacaagaaggaattctttgctatttgcgaaaagcagaagcttccgaaggaaatggtagaagaagtggcgcgagctcttttcttccaacgcccgctgaagagccagcggcagagtgtaggcaaatgtactttcgagaaaggcaagcctcgatgcagcgactcacaccctttgtatgaggaataccgtatgctctcattcctgaacagcatcaggatacaaggtccatgggatgtcaatggctacagaccacttaacgatgaagaactgaaaaggatagagtcattattctatagaaaatcgaaaccgaacttcgacttcgaagagattgcaaagaagatagcagggaagaatcaataccagtggaaggatgacaccaaagtgaacatgccgtacaagttcaatttccgtatgtcgcaaggcgtgcccggctgccctacgattgcccaattgaaggaagtctttggcgaagaatggaaagaagggattgcagagacttatactctcagcactaaaaaagatggtacgcagaaaagtatagacgaattagtgaacgacatctggaatgtcctcttttcgtttgacagcaaagacaaggtcaaagagtttggcgtcaagcatctgcaactggatgaagagcaggcaaagaagttctcagagattcgtctcagcagaggctatgcttccctatctctgaaagctatacgtaatatcctgcccttcctgcaaatgggtatgatttattctgatgcagtcttctttgcaaagattccgaccattattgggcagagtctgtgggcagagcgacaaaacgtgataaaggaagatctggcttatgccatacaaatggcaatgaaagagaaacgccgcattgatgaggctgtgaaggactatctgctggacaacttcgatttgaagccaggagcaacggaacttctttatcatccctcaatgattgagacttatcccgatgcgaaaccgaataaggatggcatagtcttattaggaagtcctcgcacaaatgccgtgaagaatcctatggcaatgcgttccctgcacgaagtccgtaaggtcgtcaacagtctcatcaaggaaggcaagatagggcctgacactgaggtgcatatcgaatatgcacgagaacttaataatgccaatatgcgtactgctatcaacgattggcaaaaggagcaagaaaggaatcataatcaatatgctgaagaaataagtaaactctacaaagaagccactggcaaggacatccaaccaacggatctagacatcttgaaatatcagttgtgggaagagcaggggcacatctgcctatacacgggcaaaaagattggtatcgcagactttataggtgccggcccgatgtttgatattgagcatactattccacaaagtgtaggcggggacagcactcaagaaaatatgacgctttgtagtagccactataatcgttatgtgaagaaagccaaacttccaacagaattggcagaatatgaatctatcatgacgagaatagaaccatggaaagagcattttgaagaactgagcaagcagatagaccatatcagtactcggggtatttgggacaaagcgaccaaagatgcaaagattcgtaagaagaaccgccttcttctggaaaagaaatattggcagggtaaatacaatcggttcaaaatgaccgaggtgcctgaaggatttgccttacgtcagggtgcaggcatcgggataatctcaaagtatgcggcactttacctgaagagctatttccatgattctcttcatccagaacgtcgccaggtttatagtatcaagggggccttgactaaggagttccgtacgatgtggggaattcagttagagcatgaaaagaagtcgagagacaaccacactcatcattgtatagatgccatagtggttgcctgcatagggaaaaatgaaatcagcaagatgggcgagttcttccatacagaagagaggtataagatgggcgaaggtcagcgaccgccccaattcgaaaagccttggcccacttttacgcaagacctcaagcaaataacggaggaacttctcgttgtccatgacacaccagacaatatgccgaagagagcttcacggaagattgaaataagtggtggcagaagagtcgtggcgaaaggcgactgtgcccgtggcagtctgcatcaggacacctattatggcgcgatagaaagagatggggaaataaagtatgtagttcgcaaaccactttcgtccttcacgaacattaaggatttggacaatatcgttgacgatgccgtccgccagaccgtcctcaatgccgttgaaggcaaagactttaagaaggctattgctgaacccatctatatgaacgaagcgaagggcatcctcatcaagaaagtgcgttgctacactccgactgtcactcagcctctcgacattcgcaggcaacgtgatgtcagcaggaaggaatataagcagcagttccatgtgatgaacgatgaaaactacatgatggcaatatatcaaggcatagtgaaagggaagcgcaagacgaagttcgctttggtgaacgccatggatgctgctaagttctataagagaagtacggacaggaacgattatccttctctcgtgccggaagataaagacggtttgccgttgaagtggtgcgtaaggaaagggacacaacttataatgcttgaagaagacgaagagagtgtcagtctggcaaatgaagaagaaatgagcaacagaatgtttacaataacgaaaatggataaagttggacgtttgacttgtagaaacagtaaagaagcaagaacggcaggcgacttaaaaagcttcgttaatgcaaacccgttcaagttgaaagatggctatcgtccaatactttgcatgagccctatcaacttccacttcctcgtcgaaggctatgacttcacaatctcccctttgggtgaaatcaaactgaaacattgatatgctgaaacaaacacttgtcttcacaaatccctttcggctgtccttgaagaacgctcagttggtggttgcttctaaagaaatgcctgaagaggagcgaactatccccatcgaagacgtgggtatggtgataatagaaaatcagatggtatctgtcaccatgccattactgaacgaactggtagatgcaggcgttgccgtcgtcctctgcgacaagaaagggatgcctcacgccatgctgcagaacttggatggacataaccttcaaggagagttccttcgcaaccaggtagaggtgggcgaggtgctccgaaaacagttatggaaacaaattgtagaagcaaagataaggaaccagtcggccttgcttgaaaaactacatggcagtggttcgctcctgaagccctactatatgaatgtgaaaagcggcgacaatgacaaccgggagggactcgctgcccgcctctattggggtgcgttgttcggaaaagatttcactcgcgacagggaaggaaacggcatcaactcgctgctgaactatggctatacagttttgcgtgcagcaacagccagagccttggtgtcagcaggtctgaccccttcccttggcatctttcatcacaaccgcagcaatgccttcccgttggccgacgacctgatggaaccttttcgtcccttcgtcgatgagatagtttataatctttgtgaagaagacaaaatggtattgaacaaggatactaagatggaactgtttgggattctaacctgtgatacgttttaccctaaagtcaccagaccattgcagattggtttgtccataacaatggcttcgttggctaaatgctatgccggcaagcaaaaaagcctttcgttgccctcgttgaaatgagtgaaatccgacttaatgcatacaaaatagtgtggctcatagcaatgttcgacttaccgactaagacaaagaaggagcgccatgactatgccgtctttcgcaagaatcttgagaaagatggctttgtcatgcatcagtatagtgtgtactgtcgtttttgtgcatctttagaatcgagggaggtgcatgtcaagcgtgtcaagtcctacatgccgaacaaaggaaggttaagtataatcactattacagacaagcaatactctgggataataaatatttggggtgagatagaacaaaaagttcagcagaagccggtacaactggaatttttttagtaaatttgcaaatgatttgatgttcatcacgccacttcctatatgtggagagtctatttaacatcctatccttaagtgggatataaagtataggttgtggtttgatgatgaaagaagataagacacaatccgcgtggctgtgtcccgctgcgtgcagcgttgtggtttgatgatgaaagaagataagacacaatgccgacacacgccacctcatccacctcatcgttgtggtttgatgatgaaagaagataagacacaatgagagcattcacgaactcgttacggcatagttgtggtttgatgatgaaagaagataagacacaatgcacaattcataattaaatctaaccgcaagttgtggtttgatgatgaaagaagataagacacaatacggaatgagacaacaggcaagagacatggttgtggtttgatgatgaaagaagataagacacaatttcaagctcgaaaatctcatccggacatgcgttgtggtttgatgatgaaagaagataagacacaatacgaaatctggaactggctgcaaggagaagttgtggtttgatgatgaaagaagataagacacaatagaccattagtcaaaacatttcgactctggttgtggtttgatgatgaaagaagataagacacaatagtatcgctttgctcagcaccagtattccagttgtggtttgatgatgaaagaagataagacacaatccatagatggcctccagggagttctcgacgttgtggtttgatgatgaaagaagataagacacaatcagtctcaagagctgatgaagccggagcaagttgtggtttgatgatgaaagaagataagacacaatagtggatgcgcggtgccttcgagagtaagggttgtggtttgatgatgaaagaagataagacacaattacttcgcccggaagcttttgtccgtccaggttgtggtttgatgatgaaagaagataagacacaatgccgcgtggctgtgtcccgctgcgtgcagagttgtggtttgatgatgaaagaagataagacacaatgatatgagtatatctataaacgaaccacaggttgtggtttgatgatgaaagaagataagacacaatctcgaactgtcgaacaacactgtatcttcggttgtggtttgatgatgaaagaagataagacacaatgtatagggcttgatactcttgccctcagcagttgtggtttgatgatgaaagaagataagacacaattatggcgtgaggaaccacgacaaacaccgtgttgtggtttgatgatgaaagaagataagacacaatttatccgcataacacaaccaacgcccgccagttgtggtttgatgatgaaagaagataagacacaatcgaggcatgcgacaccatcgcagcgtgggagttgtggtttgatgatgaaagaagataagacacaatacggctgcggcaaaggacttactcgacgaggttgtggtttgatgatgaaagaagataagacacaatccatggttagacgcccagatggccgaatagttgtggtttgatgatgaaagaagataagacacaatttggctgcgcgataacactcagaaactggggttgtggtttgatgatgaaagaagataagacacaatcacgcgacgcgggagtgcgggggggggcggttgtggtttgatgatgaaagaagataagacacaatcgagcacggcgaactgttcagcatccagagttgtggtttgatgatgaaagaagataagacacaatcacgtcagccggttgggcactcgtcgccgtgttgtggtttgatgatgaaagaagataagacacaatcagttgtccttgatgccccccttgctcgtcgttgtggtttgatgatgaaagaagataagacacaatcatcgctttttcatgcactttagcctaagagttgtggtttgatgatgaaagaagattagacacaattttttgctgatgctgttgcaactcacatgactggcacaaaaaacaagtacactacatttgcattcaatatggctaaatcaatgataggtaagtaatcattgctgtccactaaaaatcgctgagcggtctttgaaatgattgaaatatagttggctatagaggagtttcgggtgcgacgatttgattttgtatctttgcagtcaaaatggatgactgcatatgaacaagcccaaatacgttttctcccaattgg

SEQ ID NO: 4569 - DNA, 16741 bp, synthetic construct
  misc_feature 1..16741: note = Synthetic
  source 1..16741: mol_type = other DNA
ggacgttcgcctatcagctcgatccgcccgttctcgacacgcaggatacatccttcgcgaagccctgcgaccgtcatgcacggattggcttcgacatactcgagcagccgctgttcgcgcgtctcgccggcatgaccgtcgggatgggcgtcggtatagtgcggattgatctggaacggaacgagccctgccgccgtgaacgtagccggctcgacgatcggcatgtcgttggtcgtgcagatcgtcggacaggcgacattgctgccggcgctccagccgacgtacggaacgccttcgggcactctctcgcggatcaccctcagcaagccctgctcctgcatcgccttcacaagcgcgaaagtgtttcctcctccgacgacgatcgcctccgcctgcgacagcatgcgggccggatcgctctcgcgatgcaccgaacgcacatcgatgccgagttccgaaaaacgggcctgcactttggtcaggtaatcgtcataggaaaacgtcacggccgcataaggcacgaaagcgacctgccggacaccgccgaggaaatcggcgatctgccgcttggggtactcgagataagcctcgccggcattggtcgaattgctgatcagcaacaggcgcatcgatggttttctcttcatatcgcatacgtttagtttgtctatttccgcttcgatcacgagaggataatagcggtactccagagcgtgcaccttctcggccacccgctcgggcgtatcgcccggctcgacctccgtgcggtagcgggccacgatgtcgccgctgtcgtaatgttcgttgacccggtggatcgtgatgcccgtctcccgatcgcccgattcgacgacggcccggtgcacccggtcgccgtacatgcccttgcccccgtgccggggcaacagggaaggatgcacgttcagaatccggcctccgtaagccccgagcagattgtccggcacgagccacaagaatccggccaacacgatgtagccgatcccctcgcgccgcaatctctcgacgacccgatcgctattataaaaggtatcgcggtcgaaaatttccgtcccgatgccgagcctgcgcgcccgttcgagcaccggcgcgtcgggacggttcgacaggatcagcgtcacgcgggccttctctcctgccgcgaaataagaggccacattctcggcattcgtccccgaaccggaggcgaacacggctatctttatcataaacaatgatttacagaatcaaaacccgattaaatgcgcaaaaaacgcttcggatgaccaaaaataatccaaaaagtattacttttgcaaaaatttggctttgaaatagaagttatttttcggaataaacgcaattgtcaaacttaaactattggtattatgtcagacgtttcatcaaaagtagtggacatcatcgtcgacaagctcggcgttgacgctgccgaagtggttcccgccgcaagcttcaccaaccacttgggcgcagactcgctcgacaccgtggagctgatcatggagttcgagaaggaattcgagatctcgattcccgacgaagacgctgagaagatcaccaccgtaggcgacgcaatcaactacatcagcgagaaaaagaagtaatttttcaggcctttgaaacaggcgtttgtcgaacgaattgaccgaagttctatgaaacaaagaagagttgtggtaacggggataggcaccatcaaccccttaggcaacagcattgaggaatatttctccaaccttgagaaaggtgtgagcggagcaggacccattactcatttcgacccttccaacttcaaaacgaaattcgcctgcgagctcaaaggctacgacgccgccagtttcttcgaccgcaaggagttgcgcaagtacgacctgtactctcagtatgcgctcgtcgctgccgaacaggccgtcaaggactcgggcgtcgatctggagaagatcgaccgcgatatggtcggagtgatctggggctccggaataggtggactggaaacgttctaccaagaggtaaagagctatgttgagggcggctttatccctcgatatagccctttcttcattccgaagatgatcgccgacctggctgccgggcacatctcgatgaaatacggcttccggggtcccaacttctgtaccgtttcggcctgctcgtcgtcgaaccatgcgatgatcgactcgctgaactacatccgctggggcaaggcggacatgatcctgacgggaggctccgaagccgccatcaatcctccgggagtgggcggattcaactccatgcaggctctttcgacccgaaacgacgagccgcagaaggcctcgcgcccgttcgatgcggaccgtgacggcttcgtgatcggggaaggcgccggagcgttgctgctcgaggaatacgagcatgccgtagcccgcggagccaaaatttacgccgaagtggccggcggcggcatgagcgccgacgcctatcacctgaccgcgccccatcccgaaggagtcggagcgaagaaatcgatgaccgacgcgatcaaggacgccggcatcgctcccgacgacatcgactatgtcaacacccacggcacgtcgaccccggtcggcgatttggccgaagtggccggcatcgtcgcttcgttcggagaccacgtatacgatatgaacatcagctcgaccaagtcgatgaccggacacctgctgggcgccgcaggcgcgatcgagggtcttgcctgcatcatggcgatcacgaaagggatcgtgcctccgacgatcaacgtcgagaacctcgatccgaagatagacccgaagatcaacctgacgctgaacaaggcgcagaagcgcgatgtgaagtacgcgctgagcaacacgttcggcttcggcgggcataactcgacggtcgtattcaaaaaaatctgacggacgtgctcgaccggatacgattgtactggaagctgcatcacagcagggacaaggcgtattacaaggcactggacgggattttcggcgtctgcccgaataatatagagctttataagctggccttgattcacaggtcagcttctctttttctggacgacggcacgccgatcaacaacgagcggctcgaatttctgggcgacgccgtgctcgagtcgatcgtctcggactatctgttcatcgagtttcccgagcagaacgagggctttctgacgaagctgcggtcgcgcatcgtcagccgagcgtcgctgaacaagctggccgtccgtatcgggctcgaccggcacattatcacgcagggcaactacagttcccagcagaaaaacctctacggcgacgcgctcgaagccatggtcggagcgctctatctggacaaggggtacgatttcaccaacagattgataataaaccatctgttgaatcgatatatcgatctggtcgatatgaccgagcaggagaccgacttcaagagccggctgatcgagtggagccagaagaacaagcgcgccctgtcgttcgacacggtgccgagcccgctctatacacagaaaatcccgcactttcacacgagcgtctcgatcgacggacagccgaccggcaccggcgagggacacagcaagaaaagctccgagcaaaaagccgctctgtcggctctgatccggctccgcgaaacgggcgagcacggcacggcggagcatatcgaagagtaaatgcccgccgcagggcatcacgatcaaagacctggtcatcatggaagatcacccgctttccgacaaacaggtccgggaaaagctcattgcccggggagcctccgcattgacggataccgaactactgagtattctgcttcacggcagcggtcccggcggcccggccaccgagctggccgggcgcctgctcgaccgcttcgagggcagtttggcgcgaatgggccggtgcagtctggcagaactgcgctcggccgagagtctgggcattgcccgggccgccgtactgtccgccgcgctggaactgggccgcagactgagagccgagcaaagccggtcgctcgatcaggtacagaccgaccgcgacgtaatcgagatgttccgtccgctgatcgccgagctgccttacgaagaattctgggccctgtatctcaactcgtcgaaccgggtgctcgaccgtgtacgcatcagtcagggcggcgtatcggccacggtcgtcgaccaccggctgatcgtcaagcgggccgtcgagaagctggcccacgccgtgatcctcgtgcacaatcacccctcgggcagcgaactcccgagcgaggaggaccgcacggtgaccgagcgcgtcgcgcaagccgtctcgctgttcgacatcgcgctgctcgaccatatcatcgtcacgtccggcccctgttacagtttccgcaacgaaggctttttcgacgatagagattagcctcctctcggaacatttccatcgaaatcgctcaaaacgtcttccggcacgggataccgtgccgttttttttgatttctgtcgttccgtttgtgctctccgattcggcttcccgacctccttcatctcgttcggttccggacaagaccggccctgtccgatccaatccgcagcccggcggccacgcttaaatccgctcttaagaaaccaaaccccgatcacaaaaaagtctccacggagtacgcggagacataggtataaaaccttcggcctatagccttattgtgataagatgtagaactcttacgtgtcaaatatacgaaaaaaatcttgcgattgcaaaattttatttaattttactacaaacagacaccgatatgacaaaaatattaggattggacttgggaaccgcctcgatcggatgggctctcgtagagcggaacgacacggaatatgccttgctcgaccaaggtgtagacatctttcaggaaggcgtggcacgcgaaaagaacagcgagaagcccgccgtgcaagaccgaaccgcagcccgcgccctgcgccgtcattatgcccggcgacgattgcgcaagatcgatttgctccgtgtgctcgttcgccacgacctctgtcctgctctgaccgacgaacaactgaaagattggaaacagaagaaaatctatccgctgacggacgaattcatccgctggcaacgaacggacgaccgcacggacaagaatccctaccgcgaccgctacaaggcgctgaccgaaacgctcgacctcgacacgcaaagggaccgttacacgctcggccgggccttatatcatctggcgcagcggcgcggattcctgagcaatcgcaaggatgccggcgacgaaagcgagagcggtaaggtccggcagagcatcgagggcctgacggccgacatggagaaggccggatgctcctatctgggcgaatacttttaccggctttacgcccgaaaagagaaaatccgtacgaaatacacctctcgcaacgagcactatctggccgaatttcgggccatctgcgaaaaacagcggctcgccgacgatctgaggaaggcattgcaccgcgccattttctaccaacggccgctgaaatcgcagaagggatcggtcggccgatgcacgttcgaaaaggacaaaagccgatgcccggcatcgcatccgcggttcgaagagttccggatgctctccttcgtcaacaacatccggatcacgacgcccgacgacccggaacctcgtccgctctcgcgacaggaagccgaaacgatcctgccgcttttcacgcgcaaaaccaaaccgcacttcgatttcgaggagatcgccaagaagctcgccggcaaaggccgatacgcctgccaaggcgaccgcggcgaggcgccctatcgcttcaacttcgcgcggacagccaccgtcacgggatgtccggtcacagcttccctcattgcgctgttcggcgacgactatctgacgaaaatatgcgacctgtatacgctcggggccggcaagacccgagaacagatactcggcgacgtatggcacgcgctcttctcgttcgacgacgaagaacggcttagcgcgtgggcaaagcagaaactgcgcctctccgacgacgaggccggacgcttcgccgccatccgcctgccgcaggactatgccgcgctgagcctccatgccattaacaagattctgccctacctgcgtgaaggttatcgctatgacgaggcggttttcgtcgccaacctcaaggcggtgctgcctccggacatctactccgacgaatcggaacgaaacgctatcgaagccgacatcgccgcgctgataaccgatttccgacagaatccgctgaacaggggaacgaccaaggagcaatgcgtccgcgactatctgcgcaactgccggggcatcgacgaaaaacgcctcgggcgcctctatcatccgtcgatgatcgaaatctatcagacggcgcagcccgatgcgcagggcatcctgcaactgggctcgccccgaacgccggcagtacgcaatccgatggcgatgcgggcattgttccgcttgagggtcttggtcaaccggttgctgcgcgacgggaaaatcgatcgcgaaacgaagattcacatcgagttcgcccgaggactcaacgatgccaaccgccgcaaggctatcgagctgtaccagcgcgaccgcgaggccgaacgcaaagcgtacgccgacgaaatccgccggcaatacgcctcggaatcgggccgggagatcgaacccaccgacgacgacatcctgaagtaccgtctgtggaaggagcagaaccacatttgcccctacacgggcaaacggatcggcctgtccgacttcatgggcgattccgcgcgtttcgatatcgagcataccgtcccccgagcgaggggaggcgacaactcgcaaatgaacaagaccctctgcgagaaccgcttcaaccgcgaactcaagcgcgacaagcttccgtccgaactcccgaatcacgccgacgtcatggcaaggatcgacgaactcgggtggccgaaggaaatcgccagcttgcaaaaacagatcgaaatacagaggcgcaagagcaaaagcgctacgaccaaatcggaaaaggacggagccatacagcgccgccacgtcctgcagatgcgactcgactactggcgcggcaagtacgagcgcttcacgatgacggaagttcccgacgggttcagcaaccggcagggggtcgatatcggcatcatcggcaagtacgcgcgactctatctgaagacggtcttcgagcgaatctatgcggtcaaaggcaccaccacggccgaattccgccggatgtggggattgcaggaggaatatgcccggaaagagcgcgtgaaccatacgcatcactgcctcgacgcgatcgtcatcgcctgcatcggccgcaacgaatacgaccgttgggcgcagtacgcgggcgacgaagagcgttacagacggggcgaaggagcgaaaccccgcttcgaaaagccgtggccgacttttaccgaagacctcgaggccgtcgccgacaggcttctcgtcgcgcatcatacgcccgacaatatgcccaagcagagtcgcaagcggctgcgcatccggggcaggatacggaccggcaggaacggcgagacgctctatgcgcagggcgatacggcccggggagccttgcatcagcagaccttttacggagccatcgagcgtcaaggagaggtgagatacgtcgtgcgcaaaccgttggggcagcttcagccgtccgacgtggataatatcgtcgacgacgcagtgcggcaaaaggtcaaggaagcgatcgacgcggtcggtttcaagacggccatggacacggagagccatccgatctggatgaacgagcagaagcgggtgccgatccgcaaggtgcggatattcgtgggcaaaaatatatctcccaaacccttgggcggaaagaagcaccgggacctgtccgcccttccgcacaaaagaccggtttacgtatcgtacggcagcaactattgtatggccatatacgaaggaaaagacaatcaaggaaagctcaagcggaccttcgaaatcgtcagcacgctggaagcggcgcagtatttcaaggcgagcgcggacaaggcggcgcgacccgatctcgtcccgcaatcggacgagaagggctttccgctgaagtgcattctgaaaaccggaaccatggtgcttttctatgaagaaacgcccgaggagctgtacgactgcacgcaacaagagttggctaaaagactgtacaagctgacgaaattcagttctatgaccaccggcaacaactcttacggcttatgcaccttcagacaccatcgggaagcccgtcctgcgggggagttgaagcccaaaggcggagcatggaaagccggagaggcataccgccccctcatcagcttataccatacccaactcaacgcttatgtcgaaggcttcgacttcgagctgagcgttacgggaaccgttcgattcaaacacgaatagccatgctcaagcgcacgctttttttcgccacgcccttctgcctgagtctgcgagacaatcagttggttatcgcgacgaaagaggctcccgatctccggaaaagcgttccgatcgaggacatcggcgtcgtcgtgctcgagcaccggcaaacgaccgtcacgctcccgctgctgaacgccctgtcggatcgcaacgtagccgtcgtcttttgcgacggcaaccggatgcccaacgccatgctgatgaatctcgactccaaccgaacgcagggcgagagctaccgggcgcagatcgaggcgagcgagccgctgaaaaagaacctgtggaagcagatcgtcgaagcgaaaatccgcaatcaggccgccctgctgcgcaaactgggcaaggacggagacaaactgaagccttattaccgaaacgtcaagagcggcgatgcggacaatcgcgaaggagccgccgccagaatatactggtcggagcttttcggcagggagttcgtccgtattcgcgagggcgcggagccgaacaacctgctgaattacggctatacgatcctgcgcgcggccgtagcccgctcgctgatgggctcgggtctgttccctgcgttcggcattttccaccggaaccgctacaacgcctttccgctggccgacgacgttatggaaccctatcgcccttacgtcgacgagctggtctgccggctgtatctcgagaataaaacgcagttgacgcaagcggtcaagggcgagctgctgagcctgctgtatgccgatacgcgattcgaaaaggtattgcggcctctcgacgtggggttgaccttcacctcggcatcgctggcgcaatgtttcacgggaatgcggaaaaagatcgcgtttcctctactggagtaaaaaagatgtctgaattacgcctgaacgcctatcgtatcatgtggctattcgtatttttcgacctgccgacccataccaaaaccgaacggcgccacgcggcccagtttcgcaaggcattggaaaaggacggcttcgcgatgatgcaatactcggtctacgtccggcactgcgtctccaaggaaaatatggaggtccatatccggcgggtccgcaaatcgatgccgccttccggaatgacgagcatcctgagcgtaacggacaaacaatacggcgaaattttgaatttctggggcaaagtcgaacgcgccggtcccgaaatacctcaacaactggaatttttttgatatatttgttttgcagaacggaaaaactgcatcgaatcgacttcctcagttcgccgaacatcgcttttttcgcggtacatacgaatgtaatacccttataatcaataagtgtagtacctgaggttgtgatttgatgtagaaattggatactatacaactcggagagaatgcacctgcacggtataatagttgtgatttgatgtagaaattggatactatacaactttcaagttgatgtcttttgtgtgccaattgttgtgatttgatgtagaaattggatactatacaacacccagtcctaaattgaaaaatggagtgatgttgtgatttgatgtagaaattggatactatacaacacgaggatcgatacgatgaatgatttccagttgtgatttgatgtagaaattggatactatacaacggggaaccgttagagtatatggccttcaatgttgtgatttgatgtagaaattggatactatacaacgcgtggacagaatacactactacggtcaacgttgtgatttgatgtagaaattggatactatacaacgcgtggacagaatacactactacggtcaacgttgtgatttgatgtagaaattggatactatacaacactaaaaatcaaagccatgaaaatctatcgttgtgatttgatgtagaaattggatactatacaacgccgggcgacggcgatgcttccgcagatcggttgtgatttgatgtagaaattggatactatacaactgttgcttatttacgataaggcagatgcttgttgtgatttgatgtagaaattggatactatacaacgtattcctgcgcgtttgtcgaacggagagtgttgtgatttgatgtagaaattggatactatacaacgcgagtatggtattatgatgtcgattgcttgttgtgatttgatgtagaaattggatactatacaactgtgcaccgatttgcaaagtctgtcggcgagttgtgatttgatgtagaaattggatactatacaacttcgggaggcaaaatgattctcggcgatttgttgtgatttgatgtagaaattgaatactatacaacggcaacttaagtattttaacccgattgccgagcactagtacgatatggaataaccgcagcatcggaccggagccggggtcgaagatagtaaatgcttttaactctcattaaattcaatcatcgcgacaattatttataataatttaaattacaggtatttatgttacattcagggttcgatcccgtttaagggtactcaaataagttcgggatgattgggaacaatttgggaacaatttatatatttgcagcagagcctaaatcatattgaaaaatgaaagtttctgcatttataagaaagacggtggccaaaaacgacaccactacacgggcaactatttactttcgtctgcgaggagacggcaaggatataaaagccgccagcgagttgacgataaatcccaaccattggagtcccgaaaaacaaggctacaaagatcgcatcgcactgatttccgacgacgaaaaacaaaaattgcgtactgatattcaaaacatcgtctcccttataacgcaggagtatacgacggaagcgaacgccgaatggttacaggagactatcgaccgttatcatcatcccgaacgctacaaaacgcctgagcagatcgccgcagaatcgaaaccggatttccatcaactgctcgacgaatttttgttgaaacacaaagtttcggaggttcgaaaaaagaatttccgcgttattcgccgagccatcctgcggtatgaactttacgttcgggaaacgaggcggggacaaaagaacttttcgctggagatcgaccaaatcacatccgatacgcttcgggatatgtgggattttttcgagaacgagcaccgatattacgaattgtatcctttcatctacgagcaaatacccgaaaagcgtatccctaaaccgcgcgggagaaacactctgctcgactgcttcggacgcattcgcacattcttcaattggtgctacgataacaaaaagactaaaaatcgacccttcgatgatttcaaattggaggagtgcacttatggcacaccgatatatattacgctcgaagaacgagacagactttatgaaaaagacctgtcttcctacccgcaggtggagatacagcgggatattttcgtattccaaagcctgatcggatgccgtatcggagacctttattgcatgacgcgggagagcgtcatcgatggagtgatcgagtacatcccgcgcaagactaaagagggcaatcccgtaacggtacgtgttccgctgaacgacaaggcgagagccattctgaacaaataccatgattatacgggacaaggattgttaccgttcatttcggaacagaaatacaacgatgctatcaaacgggcgttcaaactggcggggatagatcgagtcgtaaccatattggacccgttgaccggcaatgaaacaaaaaagccgctgtacgaagtcgccagcagccacatggcccgacgtacttttatcggcaacatttacaaaaaagtcaaggacccgaatctcgtcggagcattgagcggccacaaagagggcagcaaagcattcgcacgctatcgagccatcgacgatgaaatgaaaaaagagttagtcgatctgatcgggtaagtgcctgtcggtcgccgcaatataaaataacaatattttcatacatttgttcacactaaccaagaaacaggttgcgtcgaaagctcaatacagatagtatatgataaccaaagaacaacttcgaaagattcttgccaatccggaaggttacgatatagaaatgaccacctctacgaccaacacggataaattctgtcaggcaatatgtgccttttccaatgacctgcccggcagcggcaagaacggttatttgattttgggagccaaagacgacggaagcctatcgggattgaaagtcgatgacgcattgatgcttaaaatgacgaatatccgcacggacggcaatattcttcctcagccggttatgactgtggaacgattcgttttggaggagggagaattactcgtcgtagaagtcaggccgtccgaatttcccccggtgcgatacagaggacgaatatgggtacgggtgggacctcgcaaaagtatcgcatcggaagccgaagaaaagatactgactgaacgcagactttccggcatccgtacattcgatgccatgccatgtatagggacaacgctcacggacatcgataccgaccttatacaacgcgattttcttcccaaagccattgccggagacattcttgccgaagataaacgaccgcttcaggaacaactcgcatcgctcggtttatacgatctgcgttacgattgtcccaccaacggttgcataattcttttcgggaaaaaccccggcaggtatttgccgggcgcttatgtgcagtacgttcgtttcaaaggaacggaccgtgcgggcgatataatcaatgaacataagttcggagggaatctttgccgggaattggtcagaatagatgctttcatcgaaacgagcatttcacagaaacggcctttgccggttagtgtactgcgagaagaaaccgtggtcaattatccgtattgggcgacacgcgaattgttgatgaattcgctaatgcaccgagactatgagaccaacgcgccggtacaattctatgaatacgacgaccgcatcgaggttcagaatcccggtgggttatacggcaaagtcagccgggagaatttccccaatgtgagcgactatcgcaatccgttcattgcagaggcaatgaaaattctcggatatgtaaaccgtttcagtcgaggaatttacagggtgcaacgggagttagaggaaaacggcaatggtttggctgagttcgatttctctttgtttacggtattccgggttacagagaaagtatccgggcgctatttcgatgcggggtttggagcgggagccacccagaaaacacccagaaaacacccagaaaacacccagaaaacacccagaaaaatcggaaaggccattgtcaatgctatccgagagaatccatacattactcgcaaagagttggaggaattactttctcgtacaccggacagcataaaataccatttgtcccggctgaccgagcaaggcttcgtcaaacgcgaaggtccggatagaggtgggcgatggatcgtcctgaaggagtattgaattgcgaacgctttgcgcacgtaagtggagtgaggtttttaatttctttgacaacaacgaagaatgcacataaatctataacgcgtgatggggcaacgggaatacgatgacttcaaacgacgcttacggaagtggatggagagccacccggcagattacgagcggttcgagaatatgatgattgcgaaagacgatgctggctatcggttggttttgcaacaagctacgatgctcatccctcagttccggaaagcgttgcgacagaaagccggcgaaggattgtacgagcatatcgacgaaatcgaacgcttgtgcggagagcacgcgttggccgaaaaattgatacgggaattcgacaatgccgaccgggcaacactcgttccggccatgctctgctggctttatttcgggccgagcttcgagcggatgatagagcgcggtgaagaattgcgtcgtttaccgggtatgggatacctccaaaaaatgatgatcgccgcgacgatcaagttactgataagtcgttcgattcaattggggttacggaccaaacaagactggattgcacaccgcgaagccatgcgtttggcagaaagcgatcatgtactggaatgggctatgaaagaagaatcgacggccgctgctttcatcgacaagaaaaagcccggacggccgagtacggccatgccgctgcgggaaatgttttcatccgccgtaaccgattccgattcattgatagagaaaatttccggcgcacttaccgtaaaacattcccaaacggacattgcccgactaaaaatcgcgctcgacgaattgaattttctcgtttcgcccgttaccgttaaatcttttcgggacgcattgcatcgacagttcgctcccggcatccacattgtccatgaacggggagtacaggaggcttacagtcggctgaccgatccgttgtcagcttcgacaaaagaggaaagttggaagttacaagaattgaagaaaatgttatcacggtaacactcgttaaattcgttaaatattaccgcgaattatccgcttaaacgccagaaattcaggttgtattttcgtgccgtcgtcccgatattcgaggcggcggttttactttctatccgcaggaaagcagaaccgaacgatgagcggataaaatatttatgaaagatttaatgtcgattctccgcgatgcagcgggaagcatcaagttggagatcaatggcgcggatctgatggaattctcgaacgagttgataaatcgcgccaaaaacgaactttcggcagaaattgccgaagcccgtcaggaacgttatctgactaaagaagaagtaaaacagatttgtgaagtgtgtgacaccaccctttggcactgaaataaaaaaggctatctgaaaaccgtaaagataggcaacaaagtgcgttatcgcatgtccgacatccgtcggattctggataatggaaaaagggagggaggccgcgatgaccgctaacgaagaaacaccgtacctgcgcgtgggaaccgcgattctcaaacgcgcgaggatgcctctgagtaacggtcggtgtatcgaaacactcatcccgtggaacgtagagacgcttcggcaggactacggcaaggactacttggctcgcatccccaaatacgacggtttctgcacgatccccagccacaccgattaccggcgtgaaatccacggcttcctgaaccgttacgagccgatctcgaccgtccccgccgaggaggaatttccccatattcgggcatttctggcccatattttcgacgaacagatcgagctggggctcgactacctgcaactgctttacctacgtcctttgcagaggctcccgatcctgctgctcgtatcgaacgagcgcaatacgggcaaaaccacctttctcaatttcctcaagtcgattttcgagggcaacgtcacgttcaataccaacgaggacttccgctcccagttcaacgacgattgggcggggaaactgctggtctgcgtggacgaagtgctgctcaatcgccgcgaagattccgaacgaatcaagaatctatccacggcccgaagttacaaggccgaggcgaaaggacgcgaccgccgagaaatcgagtttttcgccaagttcgtgctttgttccaataacgaaaccaatcccgtactcatcgacgcgggcgaaactcgttattgggtacggcgcgtaccgccattgtcagccgaaaaccaaaacctgctctgcgacatgcgccgcgaactgccggggtttctcttctttctacggcatcgcaagctatccacgagcgaagagagccgcatgtggttcgcgccccggttgttggccaccgatgccttgcggcggatcgtacactacaaccgcagcaagaccgaaaccgaaatgctgtcgatcatccacgacattatggaggccgaaaaccttgcggactatcggttcgacgtgagcgatatggtcaatatgctggagatacgcggtatccgctcggatcatcccactgtgcagcggattcttgccgaaaattggcagctgcgtcccgcacctccgatctattaccaacgctatacgatcacctataacggcgaaacgcagcggcaggacggcaagacggcacgggtttataccgtcacacgggaacagctcggcggattgctgaacgatgcagcgatgtaagaatgttgaaaaaagaaggtaggtttcttattttcataatcttacatttcttataaatcctcttacaaagtcttacgggttcttacggacttac

SEQ ID NO: 4570 - DNA, 16149 bp, synthetic construct
  misc_feature 1..16149: note = Synthetic
  source 1..16149: mol_type = other DNA
gaagcgggcagcgggcgcatcctgacggtcgccgccggcaaccgggagtcgatggcccggatgctggagatcgacctcgacacccgccggtgccgggccgccgcgatgccgaacctggatccctggtcggaactccggcccttcggcgacggacggatactccttctggggtcatgcgactcgatgcgggtagacttcgcgcgtatctgggaccgcaggacgggcgaggtgctacgcctgcgcccggggatgctccgcagcgaccggctcgagcacatcgggcacatgagcgacgggcgcgtcgtgctgaccacgctccgctcccgcgtggggcaggtcgtactcttccccaccgacttcgaaggcttcctccgctcggcctcccggccgctgcacatggctcccctgcaaccctacgaagagctctaccctgccatcccgctctcgctgcccgatctaccgtaacgttgaacggacgatcagcggcagacactccgcaatgcagcggtcgtaccccttcgtcccttcgccgagttcgccgtaggggcgaatgtcggtgtgtatgaaacgtttggtcttgtactccttgcggataccgtcgtcccggcagagagcctcctcttcaggcgtcggcttgcggtaaccaagcagcagtttctccatgttccaacggttgtgctcgacttcggccatctgctcgacctgtgcagcagtcagccgctcgggtggcgccacgccgaaacccagcgagcgcagcttgatctccaccgaatcggcgcaatagaagttcgaccactgcagcgctaccggcagttcgttccagccgccctgcaactcgccatccgaaggacacgacgagggtgtcgtgccgtatgtgctcttgaaggcatagatgtaattgaccaactgtgcccggcgcgtattgcggcggtcgaggtcaaacggattggccagcatgccgaacgggaaaacgtgcgaatagcggttctgctgcttcttcccgcggcagttgttgagcaggtcgagcagcgcacttgaggtctcctgccgcacgaaaaccgtagtgccacggtcgtaaaccacatcgggcaggtagagccccatggccatagcttgcggtgggaaattcagacagatggcgatcgacagctgttgcttgggatcctcggcccactccgccagcaacttttgcacggccggcgtctcggcacgtcccttgataaactcaaactccacgtcgagaaaatccgttcgggggccatacatccagttcggcggcaggatccgctcttcgtcaggatgttccatgtcacgatacaggctcggcgccaggtcgaaatagtggcggtaacggccacggaagaagttcatctcctcatcgatcgcggcatcgatgaacgtaatccggctcttcagccgccggtcgcgacagaaattcggaaaatggagcaggtgtgcagcctcgactcccagagccacccccatgcggctcatgccgatgatgaccagatggaccgtccggtcgctctcccgtgtgaccggctcgcggtccaacgccggatattcgatcctgtcatccccatccccgcaacaccgcttcaccagcagtttcttggcccactcctcgtagaagttgaaagggtgaaagtcgatctgcttgcgccactcctcggccaggtccgaaatctggaaagcagcataagtggtctggtactcgaaaagcaccgaaaccggaatgcgcggacaattcggttcccggctatggatcgccacgatcttctgcagcgaatcgatgttgagcgaatcgtggtcgtactcgttcgcctcgccgatcagaaagatctcgcgggctcgggtcgtgcagagttttgccaactcctcggtcgaattgcgctgggcgtgcagcaccagaatacgccgctcctgccgggcatcgagcaccgtgtggatgcggttgcgcaccttggcggcgggttgcacgctctgaatcaggatatagcaattcccgtagcgagggtccgagcagatttgccgcacgagcatcgggaccatctcgtcgaaaccgatgaccacgacgtgattctcaagcggataggcaatctcgccctcgcgatagcgttcgacacgccgctccaacatgttcgataccaccgagatcagcaggcccgtgacgagcagcagtcccagaatggccactcccagcgagaaccagcgcagttcgggcgtgacattagccacgctgcccggatcgatgaacaggcagatcagttggagcaggcgccccatcggaacatcgctgccgctggctccatgctgcgaatcgggtgtcgccacatccgaaggctccgggaaggagaagaaccagctgaccagatagatcacacagaaaaagagcagcaggatgccgaccagccaggcaaactgcttgcggcctcgacccgaaaaggcccggtcgaagcccaatgtaaagaatcgtttcagtgagtttcccatgggttgcaacttggagattacgggccgaggggattacctgagggactggagttccttttccagccgggccagttccacctccctgcgtttggctgctatctcgggatccgggccagccgcctcactctgtttatcccgcaccgaccgttcgtggcggacagcctcctgatagagcgtcagttcggtctccgaaagccttctgtggctttcggaacagattcccagcaaccgcttgcagcaatagcccagccagcacagggcgcatccggcaacaagcacccagcctgcgagaacaagcacgccgaagcaaaccggcatgtcatggccgaagacggcatagcagacgataccggccagtgccaccagtgtaactgccaacatccagagacgtgtccgtctaaacgaccgggcggctgcttcgagccgttcggcgaattgcaacgcattcggttccatagggcgattatttgcgaatttcgaatccgagtttaaggatcagcttgagggtctgtacagcagtctgacggtcgtattcgcgctcggcctcggggagctcctcgtagggcaccaggcaggggtgcgttttccgcctgtcatcgcgccgctcgccccaggtccacccttcggcgaggcggccctgcgcccagacttcgtggacgttgcgggccatttgttcggtcagcttcccgagagtctcgggcagctcgacatcctgcgtgtcgagcggtgaagggatataagtttccatgcaatggttcgttttgcctgcccgcagcaggacatttgccgatgcaagttaagtatttttatccgaattcggaattgcaggcgcggattggattgcacgaacgagattttatgcttaattttactcactgtatgcccggacgaaaagtcccggtcgccggaacccgcctccactccacgccggaggccccaaacagcccccgaatgaaactgcgctatttcatctcatcatcgcgtttttcccgaaacagggagacggtcaaggagtgcgtacaacaggtctgcgccgaacagaacatatccctgccccaaggtgccgaagccgcgaaatacgactgcaacctcgacgactcgaccctgcgagacacccccaaacagaacgaatatctggcaaccatccgccacgacacggacctgttcatcgccatactcgatgccgcatacatcggatactacacctatctggagatcctccatgcctacaagtcctatctgctgacgggattccccatctgtctcatactggagagcaagcagcccgtcgcctgctccaaggggccgaccgaccgtacgctggagaacctctcgaaagccatcgccaacctgtcggacacctacgccccggcggaccgggcagcgggccggaacaaaacgggcgggatcccccacttcctgaccgactacgacaatccgctggctccccgcccgctcggggaggtctgcacggagaacatccggaagatcctgacgaacgagcgactcaagatgaggcaattcgccaaacccggcagagaggtgggcagcgaggagatcatgaatcggcgcggccgggtcgagaacgggtacatcggggagatctacttcgagcgcagcgtagatcgggaggaactggccaacccgaccagttcgttcgtcctcatcaaggggctgccaggcgccggaaaatcgcgtgccctgctccactacatccacaacgcgctgggcaaccagcagatcgtcgtgctccacagccacagggagttcgatgccctgttcgatacgctgttctccgaacggaacggatgctacgaattcgacgagctcgtcatcaaggaaccctactacctgatcatcgacgagatcgacaagttctggctcagttcggtccacaacgacgatttcgtccgccgctgggagcgtctgtgcgacgaggtgtacacccacagccgactgcacatctacgccactaccaccctcgaaggataccaggccgtcgaacaggcgatcgaaccacagaacacccagatcatcacgatcggagcccttgacccgaacaacgaggacgacgcccggatcatacattacttcgggaacggagccaaccgccagtcgctcaccgtaggttttatcgtcccccggagacacgacatcgcccaaaccgtggaccagttgctgcaaaacaattatgtacgcgccttctgcatggcctacaaaaccgtctgcaccttctcacgcaacagccggcagctgctccgatactcggtcatggccacggctgaactgatggccatgcgcaaccagcagatggatccggacgtcatggcggaacaactgaccgcactggcaacccgcggagtcatacggctgttcgatcaggacgacgagatcgaccgcatcaccggcgactacttcaattttcgtaacagggaggtcatcgaaggggtcaatgtggtgccgattctccccaaatggctgaccttctatttcgacgacatcctgctcacctgcatcatggagcatccgtccatcgtccggttcgggcaggagcaggtcatcgagctgatgctggcgacgttccccatgaccgaaagctattcgaaggcgatcacccgggccgaagacaaggcagccgcatggcaacagattcacgaccggtatgcggaccagattctgcgcgaccaggcgatcgaccccgaagagcggcgccgcatgctctcggtgcagatctcctatgcccccacgttcgagactgcgatcgggctgatcgagacctaccgggagatcttcccgctgaccagcatgcagatcggcgggctctactcgcatgtactcacggcccaccgcaacgggctcgacccaaactccatgcttcagacaatccgcaagtacgaggaggcgatctccgaatacgacctcttctacgtccaacggcgcgtacagctgtcggacagctactccgaagttcgcgaactggtcgggcgcatggccccggagctgacggagccgcacggaccgaccatcgactcctttcagaaatacagcatcaacgccctgctctactggatcagcgaccgcgtgagcaaggccgaagagttggacgacatcatggcccgatacgcacgctggaaccagaacaacccctcctgtccgttctctctcacagtcaaaccggtatattctcttatcgacaacaccgacgggcaggcggagagactcgaggccatatatgacgcggcgatcgtacgcctcaaaccagcggccttcgcctccgaccgtgaccggctccacttcaaagcgatcgccatggggctcctgatcaagaacgccacggactacatgcaggcacgcagcttcgtcgaacggttgcaacccggagagatccacatgtcctatttttcatcgatgatcgcaaaatgggactttaaggagagcgaagacttcgaacggctgtacgaggacatcgaacggctgaaggagcgtttcggaatcgagctccacatcaacagctacaactcattgatccgcaaggccccgtcggcattcatcgcacaacggatcgtcgcggccatgccataccgcgacaactacacgctgaacctctacctgcagaaaatcttccagacctgcatcgcgagcatctcgcacgcgaaacagcatgagcgcggacgcaccatacgcacctcttacgccacggcctgcaagaccgtgcaggagctgattccggcaatcaacccgcaaggggtgatctgcaaccgcgacggaaaggtttccgacttcgcgggcgtatcgctggatccctttgcggtcaatttcctctaccggatcttcaagaacgacccgcaatgggtcgatacgaccatacgcaactgccgcccgctctgcgagaacgtacgctccaacgagaacatccatgccatccgcatccgcggatgcgacgactatccccgggcgctagaactgttccggcaatacgaaaaggcctgcctgaagccgctgcttgccatggcccggcccggatcgcgccccatctgcccgatctgtttctgcaacatgttccgggttctgacctcgggcagcaacaaatttacccccgcatacagggaggagttccgggcgatcttcgaacaataccggccctacatctccatgaactctgacacggcctccttctattatgccacctacttcgaagagatcttcgacgggcaggaatcgacggagatcgccccggcgtttgccgaagagatggaacaattcccccagctgagctacgtcccctactatctgctgatcggatgcctccataagatcactttcgagcaggcccttgccgtctatgactttttccacagacgggccgtcgaaacggggatcgaaaagcacatgccggacaacaagagcatcgttcagctgtgcaagtacataaaaacagaccaggaactcatccgcctgcagaggtacctgctcgccgggaaggtcgagccgggcaaaacggccggaagtgcactatacaagctgtgcaaagagcgccggatgggctacctgctcggcgggaacaaccggcagaccgacagcgacaagatcaaggggcagattgctcgcagcaagaacctggaagagattttccggctgctcgacacatatgccaccgaacacgatgcaacgatcgacatacatctgttcgaatatgccctgggagcccttcacggcccggctttccaaacgagtgcggcccgcagcgaggccacggagtatctgaagcttctccgcgaacggcatctggtacgctgcacgcaaaagacctacaaccagctgctgtcgatctattatcccgaaaaagagaaggtccggttgcttgccgagatgcgcgaacactgcccgttcgacatatacacatatgtagccatcgtcaccgactggtgttgcaacacggaactcaggcaggagtattacgaccgcatcatccgagaatacggggagaacatcgcccccgagaccttttttaccgccctgaaagttgaactcagccacgtcatgcaaacggacagccgcgatttctcttttgccgtaaagatcctgcgtgaaatcgagcgacgcggctacaccatacaccgcagcgtattcgacaaactggaaaaatgctgcacatacaattcgcacgcccatatccgccaggaatatgcatcgatcggagacatccggcaattcatgctgctctacatgctgcgctacgttgctgacgatcagacatctgtaatctatgatgtagccgatcggaacgggatcgacatctgacacggcaaacgtctctctccgccccatccctttccattcgacggcgaccgatccccgacctggcggcatcggaggcaaggccgtccccgcaggaaacacccccgttatcggctcgggtgcgcgacttcgtattcgaagcgatatagcgcgtggcggaccctgccgtctcacggtttgggccggacacgatttgcgggaagtgaggccgcaaccggagtcgcaaggaagggctggcagcggggaaaccatcagatttttaaatgcagatacaaacaaaaagtctccacggagtacgcggagacaacaggttaaaaaccttcggcctatagccttattgtggtaagatgtagaattcttacgtcacaaatataagcaaaaaggaggtttattgcaactttttatttaatttcacaaaaaaatatcttccacatgactaaagtattggggctggatctgggcacgaactccctgggatgggcgcttgtagacgaatcggagaatggatatgcgctcttggacaaaggcgtcgccatttttcaagaaggggttgcacgcgacaagaacaatgaaaaaccggccgttcaggatcggacggatgcccgcgcactacgccgtcactatttccggcgacggcttcgcaaaatcgacttgctcagggtactcgttcgttatgacctctgtccaccattaaccgacgagcaactctccacttggcgtcagaaaaagcaatacccgctcgataaggagtttcttcgctggcagcggaccgacgacaacgaagaccgtaatccctaccacgaccgttatgtagcattgaccgagcggctcgacctcgagaatcgcgcacagcgatggctactgggacgagcattctatcatctggcacaacggcgcggattcctcagcaaccgcaaggaggccgggaatgaaaaggaagacggaacggtcaaggagagcatcaagaatctgtcggccgagatggaagcagccggatgccggtatctcggggagtacttctacgggctctaccaacataaggagcggattcgcggcaaatacacctctcgcaacgaacattacctgaccgaattcaatgccatctgtgaccgacagcaactgcccgacaaatggcgccgagccctgcatcgtgctattttcttccaacgcgacctcaaatcacagaagggatcggtcggccgatgtaccttcgagccgacgaaaagccggtgtcccgtttcacacccccggttcgaggagttccgaatgtggtcgtttatcaacaacatccgggtaacgggcccggatgacggcacgccgcggccattgacccccaaggagatcgaaacgatccggccgctcttcttccggaagagcaagtcctatttcgatttcgaggagattgcccgcaggatcgccggcaaggggaaatacgcctgcagggaggagcgcatcgaagccccttaccgcttcaatttcgcccgcacggccaccgtgttgtcccgtcacggcttcgctcatggacattttcgggaaggagtggcttcgggaaatccgcagtctctatctgctcggcgacgggaaaaccgaggaacaggtgctgaacgatatctggcatgcccttttctcgttcaaggacgaggagcgcctccgggactgggcctgtgaaaaactccagctttcggaagaacaggccaaagcgtttgcggcgatcaaacttccgcaggattatgccgccatgagcctgaatgccatcaacaagattcttccctacctgcgttgcggttatcggtatgacgaagcagttttcctggccaacttgcgcgcggcactcccaaaggaggtctacgcagacgaggatcgccgacacaacatcgagcaggagattgcctcgctgctgctcgactacaagcggaatccatacgacaaattcgattcgaaggagcgtcgcatcgccaactacttcagcgaccacgggctcgatatgtcccgtttggaccggctgtaccatccctcgaaaatcgagacctatccggatgcaaaacccaatgccgaaggaatcatgcagctcggatccccgcggacttcggccatccgcaacccgatggccatgcgggcgctgttccggttgcgcgacctgataaacacgctgctgcgcgaaggccggatcgaccgcgacacgaagatccgcatcgaatttgcccgcgggctcaatgatgccaaccgccgcaaggccatcgagcagtaccagcgtgagcgggaggctgagaatcggaaattcgccgaagagatccgccgtcaatacaccgccaaaaccggccgcgaaatagagccatcggacgacgaggtgctgaaataccgcttgtgggaggagcagcagcacatctgtccctacaccggccggcaaattcgtatttcggacttcatcggggccaatccggggttcgacatcgaacatacgcttccgcgtgcccacggcggcgatgattctcagatgaacaagacactctgcgagaaccggttcaaccgggagaccaaacgggtaaaactgccggccgaactctccaaccatgccgaaatcatggagaggatcgaatcgttcggctggcgggagaaggtggagagcttgcaaaagcagatcgaagcccaggtccgcaggagcaaaggtgcagccaccaaacccgaaaaggacagcgcaattcaacgtcgccactatttgcagatgcaacttgactattggcgcggaaaatgcgaacggttcaccatgaccgagattcccgaaggtttcagtaaccgacaggaagtcgatatcggcatcatcgggaaatatgcacggctctatctgaagacggtttttgaccggatctatacggtcaagggctccacgactgcagcgttccgcaaaatgtggggcttgcaggaggaatacacccgcaaggagcgcgtgaatcacgtccaccactgcatcgacgccatcacgatcgcctgcatcggccgccgggagtacgaccgttgggcgcagtacaccgccgacgaggagcgattcaattacggtgaaaccgacaaaccccgcttcgagaagccgtggccgacctttaccgaggatgtcaaggcggtggccgacgaactgcttgtggcccaccatacgcccgacaacatggccaaacagacacgcaaaaagttgcgggttcgcggccgggtcaagctgagtgccgacggaaagccgatctatcaacagggcgatacggcccgttgccggctgcatcaggagaccttctacggagccatcaagcgagaagacgaaattcggtacgttgtacgcaaatcgattaaactgttgcaacctagcgacatcgacaaaattgtggacgatgcagtccggaatcgcgtacggatggcaattgatgaagtcggattcaagacggcgataaatccggatgaatacacgatctggatgaaccgcgaaaagggaatccctatccgcaaggtgcgcatcttcacgcccggcgtcacccagccgattgcactaaaaaaacagcgagatctctccgacaaagagtacaagcaggattatcatgttgcgaacgacggaaactactgtatggccgtctatgaaggtaaagacaaaaaaggcaagctgaaacgctcctttgaacttgtcagcaaccttgaagcagcacaatatttcaaagccagtgccgaccgggaagcgggccccgatctggtaccgcaggccgatgcgaacggatttccgctgaaatgcattttgaaagcaggtaccctggtcctgttttatgaaaattcgccggcggaactttgcgattgcacacccaaggagctgacaaaacgactatataaagtaacgggattcagcacgctgacagtctcgaataattcatatggtcgtcttgcattaaagcaccatcaagaagcccgaccggcaggggaattgaaggccaaaagcggagtatggaaaacaaacgaggaataccgccccgttatctccatattgcatacccagctcaacgcttatgttgaaggttacgactttgaactgaccgttacgggagaaataaaattcaaacacggaagaccatgctgaaacgcgccttgtttttttcgcccccctactgtctgagcctgcgcaacgggcagatgatcgtccacacgcgcgaggctcccgatcaacggaaaagcattccgatcgaggatatcggcttcgtagtgttggaggaccagcagacctccatcacgctgccgctcttgaatgcgctgtcggataacaacgtggcagtaattctttgtggagagaaccgcatgccgaacgccatgttgatgaatctggattccaatcgcacgcaaggagaaaattaccgtgcgcagatcgaggccagcgaaccgctgaaaaaagggctttggaaacagatcgtcgaggccaagatccggaatcaggcaactttgctgcggaaaatgggacgtgacggggataaactgaaaccctactacatgaatgtcaagagcgccgatgcggacaatcgtgaaggggcagcagccaaaatctattggacagagttgttcggcagcgaattttaccgctcccgcgaaggttctccgccaaacaacctgctcaattacggctatacgatcctgcgggcggctgtagcccgtgcgatcatgggatccggactcttccctgctctgggcatcttccaccgagaccgttacaacgcctttccgttggccgacgatctgatggagccctatcggccgtttgttgacgaaatcgtataccgtctttatacaaacggtcatatacagctaaccagggaggtaaaaggggaattgctgcggattttgtttgtcgatacccgtttcgacaagattgtacgaccgcttgaggtaggtttaacctttacaacctcttccatagcaaaatgcttcgctggtacacaaaaaaaggtatcatatcccatgttggaatagaaccatgtcagaaacgcgattgaatgcctatcggatcatgtggttgtttgtctttttcgatctgccgaccaataccaaaacagaacggcgtcatgcggcacaattccgcaaagcgttggaaaaggacggcttcacaatgatgcaatattcggtgtatgtcaggcattgtgcctcgaaagaaaacatgcaggttcacatcaatcgcgttcgacggtcgatgcctccggctggatttacgagtattctgtctgtgacagacaaacagtatggagacattctcaacttctggggcaagagcgaacgggcaaaaccggacatgccgcagcagttggaatttttctgaaaaaacggtatctttgttctttgaaatacaaaaaagcgcatcaaacacacttcgacgaaggttctgcattcaattttccggccggacaaaacggcataaagcactgaaatcgaacaaatagcacccccggcgttgtggtttgatgtagaatttcaataagatacaacgagaattcggtaaatgacttttcggcaaccgttgtggtttgatgtagaatttcaataagatacaacgtaacggttgagagcataggaacgatggtagttgtggtttgatgtagaatttcaataagatacaaccgctcagcaggcgttcaacgattcgttcttgttgtggtttgatgtagaatttcaataagatacaactggacaacacggcactcgtgccgaggatgtgttgtggtttgatgtagagatccaataagatacaacgaaagccgaatacagggtcatgctgtatcagttgtggtatgatgtagaatttcaataacaaagcacacaaagaacttaaacatcatgcaggggagaattaataaattccggtagatcgaaaacgagatgatttgacctgtaaaatatggacagatacctttagcgtcttgtcattatcatctactatgccgtcagcaccctacagatacgacgcatcttgcggctgatattcgcctcggaggtcttcacatagcgtcgtgtcatgttcgtattcgtataacccggaatcttggcgataatgtcgatcggcatcccgtattcgccaaaataaggtacgatattcgcaaatcagcttcaaatgccggacatccatattcggattccggcgcagaaagacatggcgcatgcccgccacgccgttcttggcctcctgctcaaggtcatcgggatggatccgcccccgcataaccgccctgcggatcgctgaaaagcgcccggtgaaactccgactcgtagacgtgttcgccgcggtgcaggccgaagaccgaaacggcacacccgaacaaaaggaccgacgtggagagtacggcgatgtggcggtcgagcgcgacgggatcgagatcctcctcgccgaatcgccggctggcctgcagtccggcatatggtctttgcggggcatctattcaggtcggagattgtggaggcaaagattataaatcggaagctattcccggttgaaaaagcaccatttgagacctcacacaagacaggcggcagggacttgcgaatccataaggatctccgccttacagctcggactcctttcggtgcaatcgacccactcgccggacaagccccggcatgcgcctccgctcgggacaaacgacgcacatgtcaaaaaacaaccccgcaagccccaatcatggagaattattttctacttttgcctgcaaaacaatcagttcgaatttatgattcagcctgcatcgaaaaccgcaaggattgcctattccctcattgcgggtataatgattatcctcttctggagaaacatcggctttgcgacaacacttctcgatatgccgggcagctctattctcgggctgtcgatcaaggcgttactcctgactcttgctgtcctcatcctgacgacagtcgtcgtcaagccgaaagaagtgttttcttttctcgggctgagtggaaacatgctcaagggattcgggatcgcactcctttgcgtgctccccctgtatcttgtatttcctttcttcggcagcctcaatacagaattgacattcaccgtgttttatgaccgatgcatccttaccgggttcaaggaagagctggtgttccgggcgcttatgttcggtttgcttttccgatatgcaaaaacaggattcttctgggctgtcatattgccggccctctactttggctccgtacatctctatcaaggacacgatgccctttcgtcgctcgccgctttcggtgtaaccttcatcggcgcactctatttcagctggatgtacgtcgagtggaatttcaacatatggattccggtcggattgcacatactgatgaacggagcctggcatattttcattatggagggtacggaggtcgcggcgggtggcctgatatccaatatggcccgaatagtcagcatggcattggctattgccattacagtctattaccacaaaaggagaggagaaaaagtccttgattatcccatttggaagttctaaattgcggtctgctttcggtccgggcagaacagctacgatgaaagcgtaaaaggattgccgccttttgcctcaacaggagtgggaaaatgaaagaaaaaaccttgcatatcagcgatatacaaggctttttactttctatcggggtttctttctggccccctctggagcggaaaacgggactcggacccgcgacctcaaccttggcaaggttgcgctctaccaactgagctatttccgcattgctcgattgcgagtgcaaaggtaggcaaaaaatccgaatctccaaattttttctgaaaaatcccgaaattttctctccggagagacggcaaccggccgtttcggagccggaccgttccgcccccgaagccgggttgccggacaaaaaacagcggtgaagcgcattttgcgttcgaaatccgtcgccgatgtgctatctttgccgtaatgaaaaacgcgatcaaactcttttccgcgctgggggagcgcctgcgcacgttcggatgcgacgacacgagccgccgcgttatcgcccaagcgtgcacggagaacggatggttcacccccgacgacatccgccgtgccgtgaaggccctgtgcgacgaaatgctgcaggaggagacgctcggccgatggctggagctctaccccacgctccccgtcgcgaagccccgccgcgtgctggtcatcatggccggcaacatcccgctggtcggcttcttcgacctgctgtgcgtcgtggcaagcggccaccgctgcctggtcaagccctcggccaaggactccgcactgatgctccacgtcatcgggcaactgctcgacatcgatcccgaaacggccgtcgaacaatacg

SEQ ID NO: 4571 - DNA, 15716 bp, synthetic construct
  misc_feature 1..15716: note = Synthetic
  source 1..15716: mol_type = other DNA
ggtggtttctgggtcctccactacaccgtcgtcggtgctggtaacacgcttcacctccttgccgttgcggtcgtagcaggtaatctgcaccgtggtgtcggcgagctcgtccttcagctccgtgttgggcgtgaagatgatgcggcggctggtaatgaggcctgcctttacctcgttcacggtggcaacactcttggcgcggaggccgaatcgcatggttcccagtccaggcagtgccacgctgtgaccctcagtggcccacgccttgatcacctcgccggcagcgtcccagcaagcctgcatgatgcccctgcttacgccgctgcgcagagctgcctccttgatcaccttgtcctgtgccaactgggcatacatctcgggctgcatcacatagcggtgagtgccttcgtacttaccaatcttctgtagtttctcaatagctttaactttcaacatagcaaaaaatgttttaaatggtttgtaaataattttcctttgtctcagaaagttctccggttgggctctcgtgagggaaatcttcttagtgcacgtgggaatttttacggcctcgtgtgggagcatttttctatctctttcttttgacactgcaaaggtacaacaatatcgtggtatgtcaaaaaatatgataccataaaacgacgttttgaaaagcataaaacgacatcttctgatttcagatttcagttatttcagatttcagttttgattttgagacgtaaaaatggttactattatattatattatatatatataatataatataatagtaaatcagaattcactcatttaggggaaactgaaatctgaaatctgaaataactgaaatcatttcttgataaaatcatattaccatggtacattattcataactttttcgtatttttgcatagacaaaagatttggatatctgaatgaaatacattgagtgtttatataacaaattgaatatcaaaatgtttggaatttgtcaattttagcaataaacacacgatggaaatagtaaataacaaataaatataattatgagaagactgttcacactaacttttttctttgggattttatctttcgtatatgcacaaaaaagatatgtttcgtttcatgttatcccttatgcatctagtgaagtttatttgagtggtgcaatacctccaacaatgaaatcctgctatagaccctctgattttggtaaagaaggatggagaagttgtttgggtgatttacttaatctttttgttgataatggatttactgtagaacaaatgaacactgcctctacctcaacatcttcttccacaagcttttactctatatatttactttcaaaatcgtcaactgattcggacacatctgacgccacaccgaacatgaatgctaatacaggtaacgaaatagcggaagtcgccagatacaacctgcaaggaatgcctgtagaggcacacgaaaaagggttgcaaatagttgtttattctaactataccacaaaaactgttatagtggaatagcctcctatccttttaatcaacttttataccctttccagagtatactgatgcctaatcaatgatataattcagcattattcatcatatatatatttaagctcgttataaaaatagcgagctttttttgtgcttatagctttctctatgagagaaatgccgtattgctatgagtgaaacggcctttcactcccagagaaacgccgtattgctaaaacggttgctaatttgctaagttataattatcggtgcctttttatccctacaaccagaaatgtttttgtgttcggaaaataaatcttcattcttcactcttcattcttcattttttttatatctttgcctaaagaatttagctaaactagtaccagatgctattatcatttatttgaaatagggtaataaaaaagcctctccagaagagaggcagtaggatttcatccttcggcatatagccttattgtgatatgatgatgaatatctttctgatgcaaaagtatattatctgattgaaactaacaaataaaacgctataaaaatgacgaaaaaacgtattttaggtcttgatactggtacaaatagtctgggatgggcaattgtcgatcgtgaagagaatggacaatattctttgatagataaaggtgttattatatttcaggaaggcgtaaaaatagagaagggtatagagtctagtaaagcagctgaacgcacaggacacagagctcttcgcagacagtacttccgtaggcgtttacgtaaaatagaagttcttagagtgcttgttaaatacaatctttgtcctgctcttgatgaagaagacctaaaatcgtggaaactgcgcaagatttatccaaagaaggatgattttatgttatggcagcgtacaagtgataatgacgatataaacccataccattgtcgttatatatgtctaaatgatgtccttaatttgaataaagaacaagatagatatacactaggtagagcattctatcatatggctcagcgcagaggattcctaagtaatagattagacactacggaggagcaagagaatagcactgttaaaggtggtattgcagatttaaataaggaaataaaagatagtgggtgtatctaccttggtgaatacttctataagctatacaaagaaaagggtaatacggttcggatacgtacgcgatatactgaccgtgaagaacattacaagaaggaattctttgccatttgtgaaaagcagaatttacctactcaaatggttgaggaactgaccagagctctttactttcaacgtccccttaagagccaacgccaaaatgtggggaaatgtacttttgaaaagggaaaaccacgttgtagcgactctcaccctatgtatgaagagtatcgtatgctttctttccttaataatgttagaatacaagggccttgggatgtaaacggttatcgacctctcaatgaggaggaactaaagaaaatcgagcccttgttttatagaaaaagcaagcctaatttcgattttgaagatattgccaaaaagattgcaggacccaggcagtatcaatggaagggggaaacgatgttggatcttccttacaaattcaactatcgtatgtcacagggtgtatctggatgtccaactatagcccaattgcgtgaggtctttggcgacgattggaaacaaaatattgcagaaacatatactctgaatacgaagaaagatggctcccagaagtccattgatgacatggtgaatgatgtctggaatgttcttttttcttttgacagcaaagataaagtaagtgaattcggtaagatacatttgcagttagacgaggaacaagcggagaagttttcgaagatacggttaagccgagattacgcttcgttgtcacttaaagcaattcgaaatatccttccattcttacaaatgggtatgttgtatagtcatgcggtttttatggccaatatccctaaaattgttggacctgccatttggaacgacgaaaagcagcgtaatcatattatagatgagatatgcaaaatggcagcagatgcaccaattgagaaggaaaaaggactccatcaaacgttagatatttgtataaaagaccttttatctaaggaatatggtattaaggaagaaaaattggagtgtatgtatcatccttccatgatagaaacgtatcctgatgcccgcccaaacaaggatggcgttgttctattaggaagcccacgtacaaatgccattaagaatcccatggcaatgcgttctttacatgaggtacgtaaggttgtgaacacgctgataaaagaagggaaaatcggtcctgatactgaggtgcatgttgaatatgctcgcgaacttaacaatgcgaatatgcgtgctgctatcaacgacttgcagcgtgagaatgataagaagcataaacagtttgccgatgaaatacgcaccctctataaggaggaaacaggaaaggatatagaaccaactgaaacagatatcctgaaatatcaactttgggaagaacaagagcatttttgtatatacactggtaagaaaattggcattacagattttattggtgcaggtcccaaattcgacatcgagcataccatccctcagagtgttggcggtgatagcacacaagagaacatgacgctctgtgataatcattataacagattcgtaaagaaagcacagataccaacatctttacctgaacatgaggaaatcatgactcgtattgaaccttggaaaaaacgcattgatgatctaaccaaacagatagaccaaattagaacaaggtacgtatgggataagacaacaaaagatgctcggattcgtagaaagaatcgcttgaagttggaacttaaatattggaaagggaaatacaatcggtttacaatgactgaggttccggaaggctttgcccgtcgtcagggaactggaattggattgatttctaaatatgcagccttatatcttaagagctattttcatgatacgcttcatcctgaaaacagacaagtatacagcataaaaggaacaataacagatgagtttcgtaagatgtggggcattcaggatgagtatgaaaagaagtcaagagacagccatactcaccattgcatagatgccatagttattgcttgtataggtaagaatgaatttaacaagatgggtgaattctatcgtgatatatttaactattatgaaggaaaaagggagaagcctgtctttgaaaagccttggccgacattcacatatgaccttaagcaacttaccgaagaactccttgtcgtgcatgatacgccagacaacatgcccaagaaggcatcacgtataatcgatacaaaaaaaggaaagaaagttgccaaaggcgattgtgctcgtggtagcctgcatcaggatacatactatggtgcaatagagcgggatggtagtattaggtacgttgtgcgtaagcctttgtcatcgttcacaagtataaaggatttggataatatagttgatgatgctgtccgacagactattcttaatgctgttgaaggaaaagatttcaaaaaggcaatagcggagcctatctttatgaataaggataaaggtgtacttgtcaagaaggtacgttgttatgcacctactgttaccaagccacttcagattcgtgagcgcaaacgacgtgatcttagtggaaaagaatataaacgtcctttctatgttgtaaatgatgagaactacatgatggcaatttatgaaggtggcaagatgcaaatgataactgcacttgatgcagtcaatttctataaagaaagtacagatagaattgcctatcccacaattgtggaagaggtatacaagggtaagagacttaaatatcttgtcaggaagggtactcaaattttaatgcaggagaaagatgaagaatatatctcaacgactaatcagaaagaacttttcaaaagattgtttacaataaccaagttagagaaggatgggaggttgacattaagacacagtgcagaagcacgtccagcgacagaggttaagaaatatcttagcgcagagccctttatgataaaagatgctccgcgtcctattatacatgttagtttgtccaagtttaaatttcttgtcgaaggcgttgatttccaaattaccccaacaggtgagataattctaaaacactgattatgcttaaacgaacattggtttttacaaccccgcttcagttgtctttgaagaactcgcaattagtgatttctttcaaagaagtgccggcggagaaaagaacaattccaatagaagacattggtatggtgataatagaaaatcagatgatttctgttacacttccattgttaaacgagttggttgatgctggagttgccgttgttctatgtgatagaaaaggtttgcctcatgccatgttgcaaaatatggatgggcataatcttcagggagaattcctgcgtaatcaagtggaggttggggaagtcctgcgtaaacaattatggaaacaaataatagaagcgaaggtaaagaaccaatctgctttgttagaaaagatccataaaaaaggcgatttactgaagcctcactatatgaatgtgaaaagtggagatagtgacaacagagaagggattgcagccagattatattggagtgcaatgttcggtgatgattttgcaagagacagagaacttccaggaatcaatgcactacttaattacggctatactatactccgtgcagctaccgcgagagccttagtgtccgcaggattaacaccttctttgggtatattccatcataatagaagtaacgcttttcctttggctgacgatcttatggaaccctatcgtccttttgttgatgaaatagtctattatttgtgtgaagaggggaagttggaattggacaaagaaacaaagggtgagctcttagggattctttcatgcgatacatattttcccaaggtaactcgaccattacaaataggtctatctattacaatggcatccttggctaagtgttatgctggagagcagaaattactcacattacccatgcttaaatgagtgaagtccgtctaaatgcatataaaataatgtggcttatagctatgttcgatttgccaactaagacgaaaaaggaacgtcatgattatgcggtctttcgtaagaatctggaaaagaatggatttgttatgcatcagttcagcgtatattgtcgtttttgcgcttctttagaggcaagagatgttcatgtaaaacgtgttaagtcttttatgccaaataaaggaaggctaagtcttcttactattacagataaacaatactctggtattattaatatttggggggaaattgaacaaaaagtgcagaaaaggccagtgcaattagagtttttttgatatatttgccacggatatgatacgaatcacgccacttcttgtatgtaaaatgtattataaatagctaaatttgagctaaatacaccatataggttgtggtttgatgatgaaatagaatgatatacaacgggcaaagtaccattcggcaccaatatatgttgtggtttgatgatgaaatagaatgatatacaactctgttcacgacacccatcaacacagagaagttgtggtttgatgatgaaatagaatgatatacaacggataagttctcttaccttcggcatatcggttgtggtttgatgatgaaatagaatgatatacaaccgtgaaccccgatttcccctggatagtctagttgtggtttgatgatgaaatagaatgatatacaactatggcagatgtaattaccaggtttcggttgttgtggtttgatgatgaaatagaatgatatacaaccatcagcgaggacagagcgcagagcccgcagttgtggtttgatgatgaaatagaatgatatacaactgtgcgcttgtctttcacttgccgctcaatgttgtggtttgatgatgaaatagaatgatatacaaccgaggcggaaacagaactttgcgcagtggaagttgtggtttgatgatgaaatagaatgatatacaaccggggttattcagccacgactggtagctctgttgtggtttgatgatgaaatagaatgatatacaacacctcctatgtaagcaccattcgctgcgtggttgtggtttgatgatgaaatagaatgatatacaactacccagatgcccttcgctatctggccacagttgtggtttgatgatgaaatagaatgatatacaacggcaagctggactttacggctcctgaatgtgttgtggtttgatgatgaaatagaatgatatacaacgacccctactataacggagaatacaccgcagttgtggtttgatgatgaaatagaatgataaacaatggaccgatgtaaaaacatcgggaactgcagttgtggtttgatgatgaaatagtatgataagcaactcaattaaataaagaccattggtgttatagcaagacaagaaatctttggcccacagaagatagactacgaaggtggacactggtggcttgcgtcgtttatccgtattgttgattctcttcagtgtcgcatcattattgtagataagcgcaagaagacagactttgttacgccggatatccccgacctaccagaaccttcactataaccaaaggaaggaccctaacaaggtccttcctttttttgcttattggcggtgataccgcgttgacacttaactggacctgccgaaaacggcagggaactgcacagcggcagcaaattcttcactcgtctatatgtattcgttcacggaagcgctggcgtttagcaagcgactgttcctgcccgttgtcaacctgcattttcacgccgatgcctctgcatttttgatttatgatgaagtggacttatgcgatggttgttacatttaggagggtggcgtctgtggtgctgcagatttcttctgccaggttgttcaggcgatggaaacgggcgtaatcggatggtgttcccgtgctttttagtgcggtactcattatttcttcgtccagaccccatggcgctaagatgagtaatgtgccacgtgcacatgcctcgaaacggcgacgttctggtttccaatagcgttctataggtttcttctgaagatgtataacgggtaacccttcttctatggcagcattaataacaaggctttctccttttgaaatcccaggtgatacgagcactacgcctgtacgtgcctctgccaactggcgttccatttctcgtttgtaaccttcggtctgttctgttggaatacctgtgtctttgtctctgcgatgatagaagacttgttccttttctgcacgtttcaataggaagagggctccaaaggcagcatactcgtgtgtgccgatacgcaggtgcaggcgtcgctccatcagatatggtaattgcctgcgcataagggcacgtagcgggttgtcgttcatgtagcgtttgatcgtttcgagcattccggggcgtctgatgatgcggtcgtgatagccggcttcgaaaagggcagggcctgtagcttttaccgcagctgatgctgcaggaaccacggctcttgtgtctgttgccgctgtccccgttgcgttagcatcggtcttccctgttgccgtcagtgcccaccatgcacgtgagcagccccctttaaaactgctgataatatggcccaggtgttttccttttgacagaggctccctgatgtaaaacagcaggtgcagatggtctggcataattgccgcctgccatagttctatttgtgggtataaacggtgtattttgggaagctcgttttcgagaatagtacgaccaaggggactgagtactatatgggggaagtccgccgttccccgtgttgcttttatgttgccttctatatgtccaaagaaaggataccgcccctctatgcataaggtaatcatatacagaccgcagcccccatagtcctgccactctgcgcggcggtgttggttgtgctggatatcgtgtggctttaatcctctgcgtagaagttcttctttggaggtgggcatttgtggcttcgttttttgggggatatgttgttatatattgcaaaggtacaaataaaatttacaaaaatcaagaagagaggctcaattgctgagcctctcttcttttgtttgtatctatttggcttagatagccagagttagaacatttggtcggggtactgaccatcggcatgaagcttggccagcttggctactacctcgggacggtcctcgggataggttacgccaaaccacttgctggtggtgggcaatacctcgcaggttgccttgccctgcttgatcaggctgtcgaccatcaaggggatgaagaactcggccttcaggttctcctgattcttggggtcggagaggaactgcttgaagtactcctcgctataagcaaagtagtcgggagtgaagccccagaagttcatgctgcagggagtgttgtcggggatggaaacccactggtcgttctcgtcgagatactgtaccttgccgtcgcggcgctcgatcttggtacgctctacaacgctggtgaggaagtgggtcttctcgtcgttctcgcagataccacggctaacggtaccgctctcgctaagggtgttgcttacgctgaagcccaccatggcgtacttgcccttgctaccctcgggaaggttagagaggaacttgcccataaccataaaggcgtcgcgatcgtagaagtcgtcgcagttgagaacggcaaagggctccttgataacgtccttacccatcagtacggcgtggttggtaccccaaggtttctggcgaccttctggaacggtgaatccctctggcagggcatcgaggctctggaagcaaagctcgcagggtacgtgtccttcgtacttggcaagaatctgtgtacggaactgctcctcgaagtcgcgacggattacccaaacgattttgccgaatccggcttgaatggcatcatagatgctatagtccataatactttgtccctgaggacccaatgtgtctaactgtttaaggcctccgtagcggcttcccataccggcagccaaaagaaacaatgtaggtttcatgtcttgtttagttgtatataattaataatgttaataaattccatgttgcaaaagtacaattattttatgaatttctgcgttctttttgcaaaaatgttcctttctttagtccgttctggcttagaatggatatccgattgcgaaatgataaccaagcgatttgccgaaactgggcatgttgtaatagcctgatttgcctgtgtcgtagggtgcatggataccaattccgaggtcgaatcggagaacgaggaagtccaagtcgtatcgtagtcccactcctgtgcccagggcgatggtctttccgaactctgacatatttatcttgccacccggctggttgctgttctccttgatgagccagacattaccggcatcgaggaaggcggcaccgtacaggttggcaataatggggaagcggtattcgaggttggcctccaactttaggtctcctgtttggtctatgtaggagtaggagctccttacgggatggtacgagccggggccgatgctgcgtatggagaaggctctgatactgttggctcctccgatggagaacaggtcgttatagggtgccgtggaggcgttgccgtagctgtacacaatacctgcaaacacgcgtgtggcaagacagctgcgtggggtgagctggaagcggtgggtgtattgtgcagaagcctttacgaactgagcaaacggaacgccgaagagctctttctcgggcttgctgaatgcttgtccgcagatggcatagatgccagatgttacgttaccagcctccttcaggtttatcttcagggtctgctgatgtctttccttctccttcgtccaggtgaaggtgtactccatgctgggtacaaactggtcgcgcatggaaatgtatagggcggggtttgccctgatgatggagtcgaatcgttccgtgctgttcagcagcaggtcgtagctcaggctaaagggggtgaactcgtgctttatgtttttccctctttgcagcgtatatgagacagatgccccaaaggataccctaccaaagtatttggctctgttcacccacttggcgttcagctcgaagttggtgctggagatagatctgcgccacagcttcttacccaagccgaagaatagcaggcgggggtaggatagtgatgccgtagctccgtattcgtaggagttaatgagtgagttgctaccctcgacatgtgctccggtctgccattcgtatgaaccccagacgttcagtcccaaggtctctgcaccacggaaagcattgcgcttgcgcatgccaaagcttacgccagggcccacgtagttgttgctcttgttggttatcttgccgatgaactcggcatcgtatggtttgtccagcatgccagagattacgacatccagcgtgtcgttggtaagggtggtgtcgcgtggcacaaagcttacgcgcatggacgagaatatatccatgtctgccaacttctgctgcgttacgtcctgattggtttgctggtagaggtcgcccttcttcaggaagaggttgggcatgatggcgcgtagccttagaggcggcttgttctctgtattgctataggcataggtctgccctctgaaggtaacgctgtccgtcagctgaaacttattgtatttatagatgttgatgcgcgtatttcctatataatagggatgctcggcttgattgggcgtctctggcagggggcgtacctgaatctgcaccttctgtggtatcataacggtatcagccctaaaggagatgtattccggcctatagtaaaagtatccgttgttacggaactccttctggagtctgcggcgttcagcatcgaggttctgaacactgaatggcgttccctgctttaggagcgactgacccatggtagcctgtatgatgctgtctgcctgcggatagaagggcagatacttgatagtatctaaatggaatacaggaccgggtgtaacgtgataggaaatcttggctttcttgggattggtcataggtatggtgtcgtacgtcaccttgttgcggaagtaaccatagttcctgagtgtgttatgtgccacagtgcttctgaccttggggttaacactgcttacgtaaacaggcgtggcggcaaagtggttcatcatccagcggccgaacttgctggtgctgttgacatacttgttgtagatccaaagtcttacagggaaggggtgcgtataatagctgctgcccatgatggctccgttaggagagtaggcaagggcggcctttatctcctccttggccgtctcgtagttcagggcatcctgcttgtctgcttttttcagactgtctttcagcgcagccttgtcagcctcgtctgttttcagcgcgctggcatcgcccgtcagcaatccctctacggtgttataggcatcagccaatgccgtgataacgccttgcccctgtatgctgtcgcgtttaagaggcgcatcgtagtccagcttcttgatacctctgtacaatacctcatcgtctggcagattctttgttgtataacatgctgtcagacatagtgttgttaatatgagtatgaagtattttttcatttcttttcctctttcttctttgtgcggaagatgaacaaatcctttaaccgctcggcacgtttcctgagtaccagaccggctcccatttctgttatctcgccttccagcagggactcgtagtttctgtcgtagaacaggcgcacgtaacgggaagagttcttgtcgagacggtattccatagatacattgtcaataatggtctgtcctgtatttacggcattcttacccgtgctaatctttccgcctatgatgatgcttaccctattgccccagaatcgttttctgaagctgaagctatagtctgttgtcgtttcgccaccttgctgcgtgttgttttctattccgaagttcaggtccacgctgttgctcagtgcctgtcctgccagattgttgatggctccctgcagataggcattcatggtgttggtatagtcgaagcctccctgcataccactcttgtcgttcaggtacatacctgttaccaacatggtgatggctatacgtccgcgctcttcctcgctcatggcagaaagttcgttctgtaccgtcatatcctctggtgcctccaatgtgaagagcagacccatatcctccagcgtctgggtaatcttcagtcctacgtcgaaggctacattcttgggcacattgttctctgtaacgctggccttcacacgctcgctggctgcaatattgagtcgtggattcattatgtcgcccacaaactcgacgtaactgccgttggctatcttgaagtcattcagcggaatagccatgatggagtagcgcatggtaccctcgtctatggtgtagcgtccgaacagctgcagctcgttctgcaggtcgtaggtcatggtgatgcttccgcctccctgtagctctatgcggtcgcgtccgtcatcgctcaagaggcaatgaaccttcaccgtcgggtcgatgtttatgttcatctgaatgtccagatgctgattcgaagcctcctccgattcaacactcagggtgtctgtgaagtcgcagaaggttaccaagtcggaaagttggtcttcgacggtaaggggcgaatccttcagtacatacgtgacatccgtgttacccagaacattcagtgcgcctcgcatcttcaggtcgttcagcgttccccagatgcgattgttaatgtcaacataaaccttaccgtatgccagggcgttacgtgtcttgggcgcatttatcagctggtagttcttggcagcgatattcaggttcagctgcacattctccaggttgctgaagtcgatgtttccgtccaacgtcagcgggttgttgccggctgcgtaagcctttatctgaggcaggtctatatgactatgattaatatacaacgtatcgttggggatgcgcaggttgatgttgtatgcctcggctgtaatattcagcgagtctgtggcaatgctgcccgtaaggatgggattgctggtactgccctttacctcgaggtttcctaatgcatagcccgatagtgtgatggtctctggcggcatgaaggcattggccagactgaagggcagcctgctcagttcggccgtagcatctatctgtccttccttgtctttctcccagtatgtaccactcagataggcaatatcacggtcgttctgcgatactataccatcgacatgatgggtgccgtctccattaggcaggtatatcaggttcatacccaaatcacccatgctggtaccttcatacttcattcccttcaccttcatgtcggtagaaatggtgatggtactgtctgcctgcatgtagtggaggtctccgttcaggaatccttctatcataggcatgaatggcatgacggatgataattcgcccaggttcagcctgttgacgctcagcgagaggtcttgctgggcatcctcgtttggggtggagtagagtttcagacccgtaccgtcgtcagccaacaggtctatcaaagcctccaccttattacccttgataagacggatgtagttgtcggggttcagcttgaagtttctgtaggcaatgatggggttcagtggcgtgaagtgaacattcagtgcctctggcgttacctctgccttcagacccgtgtcgatgcctttcttgcctttggcgtccaagaataatagatgggcggcagcaccattggtggtgaggctggcatttataacgctctcgaagctgacaaccttgttcttgggcccgttcttgactcttccctgcatcgtaagtccttcttccttctgacggatttggcacgaaatggtgtcaagcagtatggctcccgtattcagatggtacatgtagccctccccattcagtccactctcggggttgctggtaaggttcatgtgcatctccctgaacttgtatcccaagacatgattcaggatgttaaagacgggattcttctgaccgctctgcagatgaatattcgcatagggcaggagcgtgcgtagtttgtcctggtcgagatgcaggctatcga

SEQ ID NO: 4572 - DNA, 14214 bp, synthetic construct
  source 1..14214: mol_type = other DNA
  misc_feature 1..14214: note = Synthetic
gtgcggcgtcagtttatcactgtcggccgactcgcaaagcagacgaaacactacgaccaagtcgcaacttttcaaatacgattgcgccgcccaaacgtatggccctatccgaaacgaacaggaacaaatttgggcggcgcaatcgtaaatatgcaaatgctttaagcgtaggcatttttaaacggaaatcatatgcacgtctgtcgtatcaagactaacttacgcctcgatacagccttttattttactaaggtagcgcgaacgatgcgcaagcctattataggcaaacaagcaacagatttacgtaaacgaaaaaaagaaagcctctccgaagagaggccatgggaataaaatccttcggcatatagccttattgtgatatgatgtagaatatccttttcctgaggcaaatttaagaatttcatttgtacatgccaaatttttggtctatttttacagaaaatttacaaacttaccttatgaaaacccgaatattaggcctcgataccggcaccaacagcttaggttgggcagttgtagatcgcgatgaaaacaaccaatatacgcccatctgccgcggagatttaatcttcacggaaggggtgaagcaagaaaaaggcatcgaattttctttggctgccgaaagaacttcttatcgcgcttcgcggcgccattacttccgccggcgtctgcgcaaagtcgaagtgctgaaagttttggtgaagcataagttgtgcccgccgctttctgatgaagcgctcaaccgttggcatacgaaaaaagaatatccgcttgatgaggacttcatactttggcagcgcacgagcgaagctgacaataagaatccttatcacgaccgtcacatttgcttgcaccgcaagttgaacttgaaagattctcagacggatcgctatacgctggggcgtgcactctatcacttgacgcagcgccgcggcttcaagagtaaccgccttgacacgaaagaagaggaaaagaaggaggagaaagctgggtcgaacaagaaaatcgatgtaaagaaggccatctctgatttgtcggaagagatgaagaaggcaggatgcacgttcttgggagattacttttacctactctatcgcacggaaggcaaccgtgtgcgcattcgttcccgctatacggatcgggaaaagcattatttggaagagtttaaagagatctgccgcgtacaagaattggacgaggatctggcgaaagcgctggagaagacgattttctttcagcgcccgctaaaatctcagcgccaaggcgtaggaaaatgtacgcttgaaaaagaccagcgacgctgtgtcctctttcatcctttatatgaggaataccgaatgctctgttatctcaacaatatccgcatcaaaacgccatccaacgaccgcttgcgtccattaaataaagaagagcgagagaaaatcacgcccctcttctacaaagaaaagaacttcgacttcgaaaagattgctgaaaagctcgcaggcaagacgcctttcggctatgtaaaagatgaggaagattggccctaccaatttaattatcgcatgaagcaaggggcaccggcttgccccacgacggcgatgttgataaaagtatttggaaaagactggaaagccggcatggctgaaacttacacgatgaacatcaagcgagacgggacgctaaaaacagaagacgaggtctgcgccgatattctgaacgtactcggctcttttgactccaaagaaaagctgaaagaattcgctctacaaaaattgcaacttaatgaagcgcgagccaaaactttctcttcttttaaaccggcaaaaggctatgccacactcagtataaaggcgatacgcaagattcttttcttcttgcgcacaggcaactactattccaaagctatctttttagcaaacatcccaacaattgtaggtgaaaaggtatggaacgacataaaaattcgttctcgcttgctggataacatagaggctgccttacgcccagaagatgatgataatgaagaaaacgaagccttcatatccaaagaagagaaatacgaaataaaaaacaacaaagctgcagagcgtatcaaggcggcaatcatagctgaaatgcccagtgcacctgtagagttactctatcacccctcaatgattgaggcttatccggatgcgatgcgcaataagcgcttcgattgctaccaactgggatctccgaagacgaatgctgtgcgcaacccgatggcgatgcgatccctgcatatggtgcgcaaagtagtcaaccacttgctgcgcaagcatatcattgatgagaagacagaaatacacattgaatatgcgcgcgaactgaatgatgccaacaagcgccaagccattgtcaaatggcaagataaacttagggatctgcacacggcatacgcgaaaagcattaagcaactctataaagctgaaacgggcttagagattgagccaacgaagacggacattttaaaatatcaactctgggaagagcagcagcacgtctgcttatacactggcaagaagattggcattgccgactttttgggagccaatccgaagtttgacattgagcacacgatcccgcgcagccgaggcggcgatagtacgcaggagaacttaacgctttgcgacagcaagtttaaccgcgatatcaagcgcgacaagttgcccacagaattagacaactatgaagaaatattggcacgcatcgagcattggaagaaacagtgctacgcgctgagaaaagctcaggacgaaattcgcattcacgcgggtttggagaaaggaaaaaaggatactaagatccaatatcgccacctcaagcgcctagaatatggttataaaaatgggaaatatgatcggtttacgatgaaagaagttcccgaaggttttagtcggcgtcaaggtgcgggcatcggcttgatttcaaaatatgccgggctcttcttgaagtcgctctttaaggacccgaaaaacccaaatcgctccaacgtctatgtcgtcaaaggcgctattacggctgagttccgcaaactatggggcttgcagcaagttgatgaggcgaaatcgcgtgagaatcatacgcaccattgcattgatgcttacaccatcgcttgtattgggccgtgcgagtacgctgccttagctgcatattatcggagcgatgaggagttcaagtatggaaggcgccgtgaaaagccgcagtttgagaaaccttggcccacgtttacggaagacttgctgaaactgcaagaggagttgctcatcgtgcatcaaactactgacaaactgggcaaacgagatcggcgaaaagtaaagacgccgcgcgggaagttcctcacaggcggcgactctgcacgcggcaggctgcatcaagaaacgtattatggcgccatcaactacgatggcaaaattaaatatgtcgtaagaaagccgctggatagtttaacagaaaaggatttggataaaattgtcgatgaaacggttaagggcatcgtcaaaggcaccgtagaggcaaagggcagcttgaaagaagcccttgctgacggtatatatatgaataaggagaaggggatcttgattaagcgggtgagaatcttcactcccctagcagagccgcttgccttacgctcgctgcgcgaccaatcgcggaaggagcacaaacgtcaagtgtatgtaaccaacaaaggcaattacatgatgggcatctacgaaggactcgtaaaaggcaagcagaagcgcgaaatagagctgatcaacaacattgaagccgccgagttctttaggaaaaggaataatcgagcgcaaggcctacccctcttgccagagaagagcgccagcgacttccccttaaagcacaccttaaaaataggaacgttggtattgctctatgagacttctccaagcgaaatagacttctccgatcctaaaaatgtagccaaaaggttgtataaggtggttgggatgaattatcatgatggcaagggctcggctggacttatatcgctgcgctatcaccaagaagctcgtccggcaaaagagctttgtttcaagaaaggtgcatataaaaacggagaagtctttcgaccggcaattatattgcgtcacactcaatttaatgctttggtagaagggcaagatttcgatttggacatcacgggtaagatcacattaaaacgaccatagccttatgcttaagcgcagccttgtctttatgcatccggccactttgtctttacgcaatgggcaaatggttatcatcagaaaagaacttcctgatgataaccttaccgttcccattgaagacattggtttggtgatgatcaaccacgcgatggtaagcctaacgatcccgctcttgaatgctttgacggagcaaaacgtggcagtcatcttctgcaatgagaaaggtatgcctgcttcgatgctctacaatttgcagggcaacaccacgcagggagaaaccttacgcaaccaactcgaagtcggcgaggtactcaaaaagacgctttggaaacagatcatcgaagctaaaataaagaatcaggctgcacttttaaacaagatgggcaaggagggtagcatcttaaagcccctttatacgaatgtaaaaagtggagacagcgataatcgggaaggcatcgcggccagattgtattgggccgccttgtttggccgcgatttcatccgcgatcggaacataccgggaaccaatgccctcttaaactatggctactcgatcttacgggcagccgttacgcgggccttggtctcctccggtttgtttccggcattgggcatctttcatcatcatcgcagcaatgccttcccattgtctgacgatttgatggaacctttccgaccttttgtagacgagatcgtgtttgaactaacggcccaaggcgaggcggaactaaacacagcgaccaaaagccgcctgatccgcgtgctatacgtcgacacttacttttccaaaataacacgccccctatccgtgggcttaagtatgacgatggcttccttagccaagtgctatgccaaggagcaaaagaagttggtcgtcccgttattaaaatgagtgaagtcagattaaacgcttatcatattatgtggctctttgtgatgttcgacttacctacgatgaccaagaaagatcgcaaagcctcggccctttttcggaagcaacttgaaaaagatggcttctcaatgcatcagttcagcgtctatatccgccattgtgcctcaaaagaaagtgctgatgtacacataaagcgcgtaagatctaacttaccggcaaaaggatctgtcagcattctctccattaccgacaagcaatacgccggcatcatcaacttttggggtgcagaaagtaaaaagctaccgtctacgcccctacaattagaactattttagtacttttgcccatagaaagttacgcatcagcaccatttcctatacacaaaagagtccctcaagggcttccatctcaatggattatctcatataggttgtggtttgatgtagaagtaagatataacacaacctacgtagcaaactttacttccttcaggtagttgtggtttgatgtagaagtaagatataacacaacgtgtgtctaaagaatgttgggtggcggcggttgtggtttgatgtagaagtaagatataacacaacatgtgcagccttatgagggcgctgagaacggttgtggtttgatgtagaagtaagatataacacaactgccggtttattcacaagccatggataactgttgtggtttgatgtagaagtaagatataacacaacttggtcttgcggttgatgaagtagcgtatcgttgtggtttgatgtagaagtaagatataacacaacttagcaggtgagcctgtctatggtacagtggttgtggtttgatgtagaagtaagatataacacaacagcatcaaagccgctgcgcggcgagttgtcgttgtggtttgatgtagaagtaagatataacacaaccttggcggccgtcgaggccttgcgccgccggttgtggtttgatgtagaagtaagatataacacaacccgacctctgcctgcattttaggcaaatcagttgtggtttgatgtagaagtaagatataacacaacagatacctgaccaatcgcgaatgctgatacgttgtggtttgatgtagaagtaagatataacacaaccgtttactcgaccgttattgaggcgaattagttgtggtttgatgtagaagtaagatataacacaacaagctgcagcacctgcggacgtgttaggcgttgtggtttgatgtagaagtaagatataacacaacgctcgcccagtgcatttgtccgctcacaaagttgtggtttgatgtagaagtaagatataacacaacaacagctacgaaagctattggaaattgacggttgtggtttgatgtagaagtaagatataacacaactaaggcgcgcgccttagggtggttggcagcgttgtggtttgatgtagaagtaagatataacacaaccagtttgagcaacgagattgccagcagcgggttgtggtttgatgtagaagtaagatataacacaacaggaggttccaactaagaaacctgcaaagagttgtggtttgatgtagaagtaagatataacacaacgcaattcttgatgagtacgcgcaggcgcggttgtggtttgatgtagaagtaagatataacacaaccggctttatcggcaaaaatttgattcatcagttgtggtttgatgtagaagtaagatataacacaacaaaacctatttttgatttagtccagtaattgttgtggtttgatgtagaagtaagatataacacaacttgaactagaagatgacacaatattagtaagttgtggtttgatgtagaagtaagatataacacaacgtccacacccattcttaaacctctgcaccagttgtggtttgatgtagaagtaagatataacacaactgaggttctccatcatgtcattgagtacatgttgtggtttgatgtagaagtaagatataacacaacgaagagaagcaaggcgggcgagagaatctgttgtggtttgatgtagaagtaagatataacacaacagttctatatcactgaccgtccccttcgtagttgtggtttgatgtagaagtaagatataacacaactcaaaagtttaggtggacaaaactcctgccgttgtggtttgatgtagaagtaagatataacacaacaggaagagaaatcgaaaacgacaaagtctgttgtggtttgatgtagaagtaagatataacacaaccggttcggaaaaactcgtctatttcacggggttgtggtttgatgtagaagaaagatataacaccacttcttgcggtatatttcaaaggttttgtggtcatttccttgccatagtcatgagaatattcgatatttgcattgtcctttcaccggtgttaaggagcggaaaaccttggtagttaagggtccttgatcgtatggaagtgctgagctaaaccggaggaagggaaaactaccgtctttttattctttttcttcctatttcctttttacttgaagttgcgtttataatgtgtcattgtgcgtcagtgcggcctcggattattgggcttaatgataacttcttagggttggtctctccaaacgtccttgttcttgtacgcgttgggtaatttgaaagaccaaccctatggggttgtacaacggggtagcattaaacagggttaaagcgctgctcgctttaaccctgctctgccgaaagaccaagcctaagggcttgttttttcgcggcaaacttattggcttttgttgtcgcttcgctctaatgccttattctctaaaaggaaaagtctaagggcttataggtggggggagtgagttgtagcgtagtcgttgtgtgagtgatattgattatattaagtcttctgcaggttctggggcgttgtgaactgtgcgttgtttctggaactatgaaaatagttggtatgtccctccaaactaaggagaaatatgccgacttattaaatggaagttttttcttcttttcgaggcgaatgtggtgtttgaagagagacgcgcgaacaaatgtgcttcttcgcctcttggcgtggacgcggacggagggggagcagcgcgctttattattccatctcctttatattatcgttttcctcttttcctcctcgtgcctgttccggcggctttcggctttctgcgctcggcccttttttgctgcacatacttccacgcttttacggcgagcagtttgtcgttgtccgagcggcctgcgtatctgtactcgccctttttggggtcgaaacttatctgttggggcaagtagtttgtaggactgtctgtgtcgatttggggcgctcctaccatttcccaccaattgtcgaggaatgatgcctcgtagattttgtagtgtcccgtctctgtgtctttgacaaagtgggctacgacgctgcattcttcgccgtctttgctcctcactctgcggtattcccaatagagggtgaactcggggttgagttccctaaacatgtcttcttccatttccgacccacataaaaaaaaggccgagtttacgggggcgtagagggctacaagcttcaggtaggtcttgccgtcttggtcgctctccaaacatacgttcaggtttcgctgctcgaacagcggcttagggagttttgtgggtacatgctgtgttgcgttgcacattatggcgaatagtatgaatatgattgctcgtatcattattgctttttgttacttcatcctttgagttggttgcacgccgccgctttttccttctattcatcgtatttactccgagatggctctgcttaaagacctctgttggttggggcggatggggtaaagtgatattcgtcgttgagcttattagataggtcaaatactgttgctatcctcttttagcagtgcccattaagttttctttctcttcttgggctttggttcgggtagttctttgcaagtggatcgcacgagagcagctatgtattcgtgatcatcgagttcttcgatataaaaatagtttttagcgcctttgtatggcggttggagctgctccgtgcgcaggagttttcgccctgcttccgttggctttatgtagaaccggttgtcgcaaatgaggccgaaaatcttgctgtcgcaataaataccatagtcgccaaacattttctttgtgattatttctccggcatcagcacattggtcggcaacgtactgtacaaaatcaggattagaagccattcttgatcagtttttaattgttaacgtatttgctttcgtttattagttttctcctcaaagattatcaagtagtcatactttgaatgaacgaggattctttcagaattgtcgagccatacatagccttatacttttgtggtaatgagtctttggctggcctcgcccaatcgcttagtgaaacattaaaccgcgcgccatactgcctcgcccaacctatgttgaagttgtcagagaaactattgccttcgtatggactttcaacatagtaaaactctacgatgccttcgccgctcgtcagttcgcaaatcagatcgacaaaagcgatgcgccccgtagtagctcccaagtcggtgcgctcaatcttccaattactactttccatcacaatgtcggcaattttcctatctttcatcggatcatcatcagatcgctttgagttgtcaaactcttcttgttgatggatgccccgaatgattttgttaagcatagcctcgtctctccaattgccccgcttggcatagatgtcctccgtcttccaatcacggtaagtgtatctgattttctttatcttaccggtcttgggatcttttacctcaatctctttgccttttttcttcttagagaacagtccgaaacctgcagctttagaagcattactaagtattctcccgagctgcgcttgactttccgtacacataaaagaggctaaaagtacgataagccatatttttatcactcgtcccataacttgaaatgtttaatgaaaaataaaaggtttattctcccctacttgggtttttatgccagtatattcgcttcaaagatattaaaaagatgaaaatgacgccacctttcgaggaaaaaatagacttgtcgggcgagttgttgtcgttaatgttttccgcctctccgcagtaccgaaaaaatagcttagaggagtgtctaaactttcttaggtgatcggaaaaattctcttaggtgatcgggaaaattgtctcctatgatcgtaaaaattgtcctataagacaatttttcttctcttataggaaagtttgacgatgttatatgatcttgataatcagcattatttttgtctttcttcagcgctctttctgctctatgctgttgcgcgtgtcgaggcttttgctttaggcgggcaggaaaaggaagttataagtgaagctgaagcaagctccccctgaaaatttttccgtttagaaggctataatagtagggggtgctttccggaaaagtccgcaacgccgattgttgggcgttgcggacagagcgtggaagggtgttgagcgttttgtaaacgaccaagtgttggggataatagactgaaaggcactgacaataaagtccggactcgtcatccttttctttaagcaggcttttgcagcctattctttgtttgtatctttcagaatttgggcgagaatttcaggtagctcccaattgcacgctttcatttgctcgagcagggttttgcctgctgtcgatagtgagaaatacatttcgcgtttgtcgacctttcccatgacacgtgagatcagagctttcttctcaacagcgcagataatctttgacgtgttggagcaggttaggcctaaggcttcagcaatttcgccagcagtcaaacttttattttcggaaagcaggcacaggagcattccctcgttgatgttcacgccatgaagcttttgcatttcttgttctaaagctgaaatggcacgatagatgtcgcgtaagtggcaaatacaggttttgtccatatctgttacttaaataaagagattaacgtttgcatcttcagcgcgttgcatataagtggcaacaccacctatgcttactccatctatgagttcttttttgtcaattcccatcatgtccattgacatttggcacgcaataaactctacaccattggcgcgcgcttgatcgcgcaagtcttcgagcgaactgatgtttttcttccgcatgatgtggcgcatgagtcgatcccctatacccagcatactcatcttagataggtgtaggctttgggagcttttggggagcatccacgaaaacatcttaccgaagatatctttctttactttaggctttcgttcgcgcttaatcacgttgagtccccaaaatgtaaagaagatggagaccttatgccccgtagctgctgctccattggccagtacaaaggttgcaagggctttgtcgaggtcgtcgctaaacatgatcagcgttttgtttttgctgttgccggtagcgttcggcgtagtttcttgcggatcgtttttctcaatcactacggtatgataaccattctgtatagattttgtaatgagactattgcccgttgtttggcaccacgcctcggcatcgcgggagaagcctgcatctgtggctacgacctcgatacgttcgcctgtttgcgcttggtccatcgcattttttagtttcataatagggcccgggcattgcagtccgcacgcatctattttaagcgtagatatgcagggctttgtcgtgttgacttccggctgctgcttgggcgtggccttatttgtgatgggcgctgtcgcgagggcgtaaatctgataaccaccggagagattacatacgttcttaaagccgtggccttggaggatgcgtattgccaaataaccacgaagtccgacggcgcagaacactacgatgtctttgtccttgggtaattcgttgaggcgctcacgtagtttttccagcgggatgtttattgccccttgaatcgtacccaactcatattcgctctgcgttctaacgtcgagcaggagcgtcttattgcggtcaagattatctatgtctctccaataaatggcaggcatcgcgccactaatgatattatgcgccacatagcccgcaatagctatgggatctttggcagaagagaaaggcggtgcataagcttgctctatgcgaatgaggtcttgcaccgtgcccccttgcttgatgattagtgcaatttgatcaatccgtttgtctacaccatcatttcccacacattgtgcgcccaataagcgccccgtttgggggtcaaaagtcagtttggtagttaggcggaatgaaccggggtagtagccggcgtgcgccgccgaaacggttgtagaactagcataggcgatacctgcttgctttaagcgctttgccggtaatccggtagtagccaccgtgaggtcgaacacctttgcaatggcagtacctatagaaccctcgtatttttcttgtttgcctcgcaccatattgtcagccacgatgcgtgcttgtctattggcaggaccagctaagtagttgagccagttttctcctgtaacggggtgaggatattcaatcgcatctcccacggcgaagatgtcggggacggatgtctccaaatactcgtcaacttgaatgccacgccccacgcgaatgccggcttcggtggctagattcgtggaagggcgaacgccgatggagagcagtacgaggtcggcatctaagttctcgccatttgctaagcagacacggatacggtggtcgacttgctcaaaatggtctacgcctttttcgagatagaggtctacgcctttatctattaaatggcgatgaacgtatgaagccatagagaaatcgataggcgccataacttgattagccatttcgacaatcgaaacctttgctcctgcttcttgaaggttttcggccatttccaagccaatgaaacctccacccacaacaacagcacttttcacttcgtgctcttgaaggtagctcttgatgcggtcggtatcttctacatttcggagtgtgaagattccctcaaggtctattccttttagtggtggacgcacaggcgtagcaccaggtgagagtaagaggcggtcatagccttcttcataacaagagccatcggctttgcgcaccgttaccgtcttcttttcgggatgaatagctatggcctcgctgcaaatgcgtacatctacattaaattgttgtccgaaagcttcaggagtttggacaaagagtttttcgcgatgggcaatcacgccacctatataataaggaagaccgcaatttgcatacgaaatatgtggtcccttttctaaaaggataatctctgcttgttcgtcgatgcggcggatgcgggctgctgctgttgcaccgcccgcaacaccaccaatgataagatgtttcatgtatctgctatgttttcagtgttcctctttcaggagaatatctgcaatcgcacgttcaaaatcgttttgcatcattgcgccggttgccatctgaggcttctcgctcatcggaatgaacaacaaggagggaatagatcggacgccaaagagagcagcaagttcttgctctttatcaacatcgaccttaaacacattgatacgtccatcgtatttttctgccatcttttcgagcaccggcgccgtagctttgcaagggccacaccaagtggcgtagaaatcaataatggctggcttgtcgccaagatatttccattcttgcggatttgcttcaaagtccataatttgcttcttgaagtcggctatcgttaagttttgtacgctcatgtcttcttttatttttgagaattattcagttctaaattttattttccattggaaacttgtgcaaaagtatagataacttttcaatgaaacaaatttcctttggaaaataaataggatgagataaaaaaagatgatgtagagcgctattttatgccagcctatttgagagcctaaactcctttgctcttgtgcaatgtagataactccttacgaccttacgctctttattggccatttctgcttttgtatatttctctgctcgttcggcttcaagata

SEQ ID NO: 4573 - DNA, 13566 bp, synthetic construct
  misc_feature 1..13566: note = Synthetic
  source 1..13566: mol_type = other DNA
ccccgactcgaaatagacgtgcggctcgatgcccctcgacagccagaattccgggaaaaacaggttgaaaaggctgaacagataggcgattccggtactgacggcaaccagcgtatccatgttggccgccccgtggcggagctgtttccaggcgttgacgaagaactcccgtcccagtccgaaaacgaccggggtggagagcgcccacacggcgtatttcacggccggagcgtccatgaacagcatgcctccggccacaatcggaagacaaagccccgccgcccaaagagtccgccgtttgagcgcccggtaatgcgccgcacgaacgtgcgccgcctcgtcctccgccgggccttccgcgtcggtcagcaggtcgtaaccggccgcctgcacggcccgcttcagcgtcccgggagagcactcccccgaacggtagtccacccgcgccgtagcggaagcgtagttcacatgcgcagactcgacgcccggcaggccgttgagcgccttatcgacccggactgcgcacgaagcgcagctcatgcctgcgaccgggaacgtattcgtgatgatcttactcttttccatgggaacaaaggtaaggtcccgacacgctccgggtgttacagaattatggatatgatttatacctacacttcatccagcggtttcaggccgcgtcctttcagccggcggaattcagtgggcgacatcccggtctgggcgcggaactgggcgctgaggtgcgccacgctcgaataacggagtttgtcggcgatctcgctgacggtcaggtcgccgtaggccagcagttccttgacccgctcgatccgctgggcgaggaagtatttctcgatgctgatgccgttgacctccgaaaagagcttgctcaacgcactgtaatcacggtggcagcgttcgcgcaggtaatccgacaggttgactttcgaggcatcttcgctgtaatgcaccaattcgatcacggccgtccggatctgctcgatgaggcgcatccggctgtcgtcgatcagttcgaacccgtaggcttcgagcagtttgcggaacgcctcccgctgctcccggccgggcttctcctgcacgacgaccgttcccagtccgacatcgaggggcgtgaaccccgctttttcgagcagccgggtgacgaccagaatgcagcggttgcaaaccatgtttttgatataaaagacgttctcccgttccataaccgcattcgttttatccgtaaatataacacaaaaacgattccgtcccgccgaccgtcttccagcctttcaggttccggccgttgaaaagcgtcggccacgggacctgcgctccgacgaaggtgcagggtccccaacagtgcaagagtctctttttcctatcagtcgggcagttttgatcgtacgaatatagtctatttttttcgggtcttcagcctgttcccctgcaaaattaacctctgacccgctccgtattccgaaaaagtttcgtaacttcggcacagcaaacccatagacgaagccatgaaacatgcgcacatcctgctgctgctcccttgcggcatgctgccgccgctcgccggggcgcagcgcacggagccgcccggccggttcgacatcgcaccggaataaccaccccgaaaacaagcaaaccaaccaaaaacaaccatgaagaaaaccgcaatcaccctctttttcctgcttcaggccgcgtgtctgttttcgcagatcccccgcccggaatatccccgcccgcagttcgagcggacggactggatcaacctgaacggcgaatggacctacacgttcgatttcggcgcaagcggcctggaacgcggctacgccggctcgaagggattcgacggcaaaatcatcgtgccgttcgccccggagagcaagctctcgggcgtcggccacacggacttcataggccgcatctggtaccagcgtacgatcgacattccggcagactggtcgggacgcaacgtgatgctcaacttcggagccgtgtactacacctccgaggtgtatgtcgacggccgcttcgtcggacgccacttcggaggcagcacgtcgttctcctacgacatcaccgcattcgtgaagccgggcggcagccacagtctggtcgtcttcgccacgagcgacctgcgcagcggcaaacagactgccggcaaacagtcgctgcaatacgcctcgcacagttgcgactacacccgcacgacaggcatctggcagacggtgtggatggaggccgtggctcccgaggccctcgcacgcgtccaaatgacgaccgacatcgaccagcagcagctgatcgtcgccccgcagttcttccgggaaagcccgaacacgctccgggtgacccttcgggacggcggcaaggtcgtcggcacgcggcaggtccgggcgtcgaacagcagcgtcgtcgtcatcccggtcaaaaaggcccggctctggagtcccgaagacccgttcctctacgacctgacctacgaggtggtcgcccccgacggccaggtgctcgacgccgtgaaatcctatgtcgggatgcgcaaggtccacatcgaaggcaacaaaatctacctcaacaacgaaccctattaccagcggctggtgctcgaccagggtttctaccccgacggtatctggaccgccccgtcggacgacgccctgcgccgcgacatcgagctgggactggccgccgggttcaacggcgcacgcctgcatcagaaggttttcgaggaacgctactattactgggccgacagactcggctacatcacctggggcgaaagccccagctggggaatggatgccaacgacgtggaaacggcccgcaacttcctctccgagtgggccgaatgcgtggtccgcgaccggaaccacccctcgctgctgacgtggacgccgatgaacgaggagtggtggcccgacaacacgcagttcccgcgcttcgcctccgacgtctacgacctgacggggcgcctcgacccgacgcgccccgtcaacaccgtcagcggcggcgccgtcgtcaggaccgacatctgggccgtccacaattacgagcagaacccggccaaactgaaagagaaaatcttcagcgacggcacgttcttccatccccgcctgcggacgacccgcgaccagacgcgcaacatcggattcaacgaggtgaaggcgaccgcaaactacgcctggccgcagtacgatggctcgtgcccctacctggtcgatgaattcggcggcatcaaatgggtgaaggaccaggagaagcaggccacggattcccagaccgaatcgtggggttacggacaggcgccccgtacgctcgaagagttctacacgcggctcgaaggccaggtagacgcgctgctctcgctctccggacaggtgtggggctattgctacacccagctcacggacgtggaacaggaacagaacggcatctattgctacgaccgctcggccaagttcgacatggaccggatcaaggccattttcagcaaacgcccggaacatcccgcccgataacgcgccggacagccgcccgcccgaatgaagcgcaccccgaaaatccggaaaaggatttcggggtgcgctttttatccggttcgtcatcgtccgcccgcggcagagcctcgtgcgcgaatgcgcccgggaacagaaggcgtcgctgaatttccattcgcgtgttttcccggtttcagagtctcgatataaagtattcctgcatattccaacgatatgcccttgatgaacgctgcaattggggatgcttcatgtcggtgcgtcgcacggcgagtggcggacggtccgacatgcgaccttctgttttcggcaccatgaactcccgaaggcaaaaagccacagcgccggcacactccgcaatagcaaccgacggtttttaaattattcacgaaatataaaaaaagtctccacggagtacgcggagacaataggttgaaaaccttcggcatatagccttattgtgataagatgtagaattcttacaccacaaatatagtaaaaaaagatgaatttctgcaattttttatttaattttacagaaaacactttcttcatatggcaaaagtattgggtttggaccttggcaccaactcactgggatgggcccttgtcgatgaatcggagaacgaatatacgctgattgacaaaggtgtagacattttccaggagggagttgcccgcgacaaaaacaatgaaaaacctgccgttcaggatcggacgagcgcccgggcactgcgccgccactatttccggcggcgtctgcgaaaaatcgaactgctcaaaatactcatccgttacgacctttgcccgccgttgcccgaggagctgttgaccgcctggcaaaaagagaaacgttacccgcaggacaatgaattcctccgttggcagcgaaccgacgacaatggggatcgaaatccttaccacgatcgttatgtagccctgtccgagcggctcgatctcgggaatcgcacacagcgctggctgcttggccgggcgctttatcatttggcacagcgacgcggattcctcagcaatcgcaaggaagcaggaaatgagaaagaagacggcacggtcaaggagtgtatcaaaaatctgtcggctgaaatagcagcggcagggtgtcggtacctcggagaatatttctacggactgtaccaacacaaggaacgaatccgcgacaaatacacctcgcgcaacgaacactacctggccgagttcaatgccatctgcgaccggcagcaattgcccgacgaatggcgtaaggcgctgcatcgggcaatctttttccagcgcgacctcaaatcgcagaaggggtcagtcggccgatgcaccttcgagccgacgaagagtcggtgccccgtttcgcatccccgttttgaggagttccggatgctgtcgttcgtcaacaacatccggattacaggaccgggcgacaatgctccacgacctttgacacaggaagagttcgagacgattcgttcgctcttcttccggaaaagcaagccttatttcgatttcgaagagatcgcccgcagaatcgccggcaaagggaaatatgcctgcaaagaggagcgtacagaagctccttatcgtttcaatttcgcccgcacggccaccgtatcgggatgccccgtcacggcatcgctgcaagcgatcttcggagacgactggattacggagattcgcagcctttacctgcttggagcaggaaaaaacgaggaccagatgttgaatgacgtatggcacgccctcttttcgttcaacgacgaaggtcggctgcgtagctgggcctgcgaaaaattgcaactcacggatgaacaagccaaagcgtttgcagccatcaaactcccgcaggattacgcggcgttgagcctaaatgccatcggcaagattctggtctatctgcgctgtggctatcggtacgacgaggcggtattcctggccaacctgcgggcggcacttccgaaggaggtctatgccgacgaaagccgtcggcatgaaatcgaataggacatcgcctcgctgctgcttgactacaagcgaaatccgtataacaagttcgattcaaaggagcaccgcattgccgactatttcagcgatcatggattggatgcctctcgtctgatccgtctttatcatccctcgaaaatcgagacctatccggatgcgcaacccaaggcaaatggcattctgcaactcggctctccacgtactgcgaccattcgcaacccgatggccatgcgggccctgttccgattgcgcaacctgataaacacgctgttacgcgaaggcaggatcgaccgagacacgaagatccggattgaattcgcccgcggactcaatgatgcgaacaggcggaaggccatcgagcagtatcagcgggaacgggaggttgagaatcggaaatatgccgaagagatccacagccagtatgccgccgaaaccggccgcgagataaaaccctcggacgacgaagtgctgaaataccggctgtgggaagaacagcagcacgtctgtccctataccgggcggcaaatccgcatttcggacttcgtcgggtcggctccggatttcgacatcgagcacacgctcccgcaggctcgcggcggcgatgactcgcagatgaacaagacgctctgcgaaaaccggttcaaccgggagacaaaacgggcgaaactgccggccgagttgtccaaccatgtcgagatcatggagcggatcgaatcgtttggctggcgggaaaaaatggagagtctgcaaaagcagattgaagcccaggttcgcaggagcaaaagcgcagcgattaaatccgaaaaggacgacgccattcagcgccgtcactatttgcagatgcaactcgactactggcgcgggaaatacgaacgcttcaccatggccgagattcccgaaggattcagcaatcggcagggagtcgacatcggcatcatcggcaaatatgcacggctctatctgaagacggtttttgaccgaatctatacggtcaagggttccacgaccgccgcgttccgcaagatgtggggactgcaggaggagtatgcccgcaaggagcgcacgaaccacgtccaccactgcatcgacgccatcacgatcgcctgtatcggccgccgggagtacgaccgctgggcgcaatatgtcgccgacgaggagcgatacggctacggcgaaagcggcaaaccccgcttcgagaaaccctggccgacctttaccgaagatgtcaaggcggcggccgacgaactgctcgttgcccaccacacgcccgacaacatgaccaaacagacgcgcaggaagttacgggttcgcggcctgataaagttgaatgccgacggggaaccaatctaccagcaaggagacacggctcgctgccggttgcatcaggataccttctacggcgctattaagcaggatggagagatccgctatgtcatccgcaaatcgctcgcgcagttacagccgacggacatcgacaagattatcgacgatgcagtccgggatcgcgtacgggaggcaatcgacgaggtcggattcaagacggcgatgaatcccgatgaatacacgatctggatgaaccgggaaaagggcattcccatccgcaaggtgcggatcttcacaccgagtgtcaaacatccgatcgcgctaaaaaaacagcgcgacctatctgcaaaagagtacaagcgggattatcatgtcgtaaatgaggggaactattgcacggtcatctatgagggccaggacaaaaagggcaaaacgaaacgcacctttgaactcgtcagcaacctcgaagctgcccaatatttcaaagccagcgctgaccgggaagcccgccccgatctggtaccgcagaccgacacgaacggtttccccttgaaatacatcttaaaaacggggaccatggtcctgttttatgaaaataccccggcagaactttatgaatgtacccgcaaggagttggtaaaacgactctacaaggtaacagcaatggctgcagaaggacgggtacagttcctctttcatcaggaggcccgagatcagaaaacacttacctccttatatggagctgggacctctcaattctgccaatccaatccatcaccgaaattgcgcctcagcgtttccaattttaacatgttggtggaaggttatgatttcgaactgaccgtaacgggcgagataaaattcaaagatgaccggccatgctgaaacgaaccttgtttttttcgacaccctactgtttgagcctgcgcaacggccagatgatcatccacacgcgcgaggcccccgaccaacggaaaagcatcccgatcgaggatatcggcttcgtggtgctggaggaccagcagacctccatcacgctgccgctcttgaatgcgctgtcggacaacaacgtggcagttatcctgtgcggagagaaccgaatgccgaacgccttgttgatgaatttggattcaaacagaacgcaaggtgaacattatcggatgcagatcgctgcatccgaaccgctgaagaagggcctttggaaacagatcgtcgagaccaaaatccgcaaccaggctgccttgctgcggaagctggggtatgacggagacaaactgaaaccctgctacatgaatgtcaagagcgccgacgccgacaaccgggagggcatagcagcgagaatctactggtcagaactgttcggtgccgaattttaccgttcccgcgaaggttcgccgcccaacaacctgctcaattacggctatacgatcctgcgagccgccgtggcccgtgcgatcatgggctccggactgttcccagcattcgggatcttccatcggaatcgttacaactcctttccgctggccgatgacgtaatggaaccctatcgaccgtatgtcgacgaattggtctaccaactttacaggaacgggaatacacaactgaccaaaaaggtgaaaggcgaactgttgcggctcctgtttgtcgatactcgtttcgacaaggttgtgcgacctctcgaagtaggacttatgttttcagcctcttccctggctaaatgctttgctggaacccaaaaaaagattgcatatcctttattggagtagtcgaatgtcagaagtacgcttgaatgcttatcgaatcatgtggttgtttgtcttttttgatttgccaaccaatacaaaaacggaacgacgtcatgcggtgcaatttcgcaaggcgttggaaaaagatggtttcacaatgatgcagtattcagtctatgtgcgccattgtgcatcgaaggagaatatgcaggttcacattaagcgggttcgacgatcgatgcctccgacaggatttacaagtattcttgctgtaacggacaaacagtatggagacatattaaatttttggggtaaaagcgaacgagcaaaaccggaaattccgcaacaattggaatttttctgataaatcgttattttcgttctttgaaatacggaaaatgcatcaaactggcttcgtcggaacacccgatcgtatttttatagtggcagacagcccgtaagtaacactttatcaatcaatatgaggcccgacgttgtggtttgatgtagaatttcgataagatacaacggtggaagggcgtgaacgtcgtcgtcgacggttgtggtttgatgtagaatttcgataagatacaacaccaccaggggctacaggtgctccgccagagttgtggtttgatgtagaatttcgataagatacaaccacagggaaccatcagccactggcgcgcaagttgtggtttgatgtagaatttcgataagatacaaccacttttaatttacacatacatttgcaccgttgtggtttgatgtagaatttcgataagatacaactctaagagccgtgtcaattacaattactcgttgtggtttgatgtagaatttcgataagatacaacgcagagaacagtggggaacttatgtcgacagttgtggtttgatgtagaatttcgataagatacaactaactatgggaattacaaagacactcggggttgtggtttgatgtagaatttcgataagatacaaccagacgcccgaactggcgcgcatcgaccgcgttgtggtttgatgtagaatttcgataagatacaacgcagcagcaaagaaactagcaacagaatgggttgtggtttgatgtagaatttcgataagatacaacctcttgatagtaaacatgatcggtttctcgttgtggtttgatgtagaatttcgataagatacaacgattagacaaacgggttgcaaacgtcttagttgtggtttgatgtagaatttcgataagatacaacgccgacagggaaattcatgtaatccgcgaggttgtggtttgatgtagaatttcgataagatacaacaggccgggcgcatccgcaacctcgggtggttgtggtttgatgtagaatttcgataagatacaaccgcgcggaattaaacacgatgcctgtacccgttgtggtttgatgtagaatttcgataagatacaactctgatagcgggcaaaaaccttcgaagggtgttgtggtttgatgtagaatttcgataagatacaacataaagtaaattgtatacatttgcagtgtgttgtggtttgatgtagaatttcaataagatacaaccggcagtattggaatgctgcataattgcaactgttgtttacattacccttttgactcaagaagatttcaaactcccttaaatacgtcaaatccaattcatcaaaacgcatattgaccgagcggaattgcgacacaaggaccaacgttaccttatgtttgctggcggaactgtacttttcgactttttccaagcgttcgataatctgtttgaagtactccccgaccgtgcagttgattcgtttgccgttctgttcaaacagcgtatcgaatgtaacgggaatttccagcacctccaactttttgattttcctctcgtattcacgtatcttggaggttatttgaaactgtatttctgctctatcggggcagtcggcggtaggttgttgcttgtcgaaatcccaatgcaccaaagcttccgaaatgcccagaccgacgaacttacggcggcggtcatgggtaaagacaagagcaagaggggctaaacggtttctgttgatagcgtctctgcgacatacgacgttgattgtcataatctttacggattacgcaagcaacaaaatgcgattcgtgtgttacacgattttcattagtgtcccgttaaaattgggacgaagttaatattaatcaaatagtccctccaagaggggataatcgagttctttgacatcgttgaaattagtcttttcgaagagatctctcagtggagtcttatccgttagtgagatgctcaaaatctgcaggacctcataagttgaccgctttagtcgcatgtcgtgttggacgatggcgacaaggcaataagttatgattgcagagcaaatttgtattctgacagcgttctctgtagtgccccagaatttcttaatcttgaggtgctgcttgagccacttgaagaacaactcaatctgccatcggttcttgtagagattagcaatttcgagagcggtaagatggaatgcattcgtcaaaaatgcgaagtctctgtcttgctcgtcatcgtgaaatctcacaagtcgcagcctctcaggaaacttcttctgtgtgttcacatccgtgagttcaataacggaatcagaaagcacattcttaggcaatctacgtttccatttcgtacacttgtactgtaagttcttcttcgcccgaaccacgaagtatgattcattaagacaaatcttgtagagttccttgaatgcattgtaaccacggtcaaatacgtagtaagaacctgattcatagggaatctccttcattgcctttgaatcgtgtaccgatgcagtcgtaatatggaagaaagcagaaacttgggactccagatcataaaggacatgcgccttaacgcctcctttcttcttgcggaactttgcccaccagaatactgacaagcagtgcggaatcgttgttgaatcaaatgcataaacattccccttcagcttgaagatgtcggttgctcgtttcttgcgagcctgttccatcatgaagaaggcaaagtcttcaaagatcctgtagtcacgattctgattcgctgtggcaaatgtcgttttcgctattggattacgccccattccaaggtgataacatttggattggtgagtctccaatgcaacgacaacatcacgcaggctctcacggttacagagttgtccgaacatgagtgccatgagctgattccagcaggtgaagttcttgacatacctgttcccatcatacttgtcaaccaggtgacggaacttgttgttgtcgagaaatgcaaccaattgagcgaatacatatttgtctttgttcatagagcagtccctttatgggctgcaaaattacaaattcaaatcgtcgcacatgaaaaactacttctaatagactatgtttcaactatttcaaagaccgacttgcccgcttttacgggacagtagtgcacgattttatgtatcacactctgtatcacaaacggcgatttcaaggcattttgtgttacacaacggacatctgtaacacacggtagaaaaagaaaaacgagcgataattcattgattatcactcgtttgtcgtgagcggaaaacgggactcggacccgcgacctcaaccttggcaaggttgcgctctcaagcccccaaaacgctacgcgttttggggtaaccaactgagctatttccttttacgacgattttctcgaatgtgttttacctcgtttttcgcattggttaaacggatggttaaacatttacgtctgtctgctggtttgtaaatgattgttaattagagaattgtttaacgggctaaataaattctgtaacacgttctttcttgttattcattggcatagtgagtttatggttttcaaataaaaacctcccgaccccaaaggccgaaaggtcgtatcgtgtcttacacagataattgcttaactataactccaccgaacgctactttgcaaactgcatcagatagtttccacagaatcccgctaacgggaatttcaccacctcattccgtccgtcgggtgtggtgtattggaataggattgtatcggctttcacgtggtagtcgaacaaattcacctttttgcccgttccctcgatttgcgcctcgttagccgtcattgtaccgattattccgtccatttcgttaagttcgcactttcatccgaagatgtattgtcgattctttgtaaggataatttcgacgggctttgttatgtctgccatattaggggcaaacatgtagataaatgtttcgggaaatatttcgtctttgggttttcctacaagcaggactattccctctgttgggctccatttgaccgttttttggattatctgtttatcttcacatgtgtcggtcattcattccgttttcggttgtttgtatctgttcatattgcgcaaaatattatgttgtttttatctttataaagataagattattagcggaataaacaaaataagaaagtgacaaactctgcaaaagggtcttatagattaaccttttcacaaagtctgtcactcgacgtgctattctttggttttatttacgggtataataatttgtcgtttcctcttgttcgccgtgttcataaagtaccagcgaactatttgttaattcgttgatagttatctcggcccaaccatcatccccatcatattttatttttagggttttcccattcaccgtataagtgaaattatccgcaccgccatcaaacgtgtctttgcctgttccatcttcattaaagatgagtccatgattagcctctgaacaagtagaatcaaattcatgtttatccccgttgtagatttcgtaccctacttcgcgggtgtgtcgccatgttccgacaatcgacgcatctttgtcatcatcatcggaacaagccgagaaagaaactaccgc

SEQ ID NO: 4574 - DNA, 11963 bp, synthetic construct
  source 1..11963: mol_type = other DNA
  misc_feature 1..11963: note = Synthetic
catcgcgccgctcgccccaggtccacccttcggcgaggcggccctgcgcccagacttcgtggacgttgcgggccatttgttcggtcagtttcccgagagtctcgggcagctcgacatcctgcgtgtcgagcggtgaagggatataagtttccatgcaatggttcgttttgcctgcccgcagcaggacatttgccgatgcaagttaagtatttttatccgaattcggaattgcaggcgcggattggattgcacgaacgagattttatgcttaattttactcactgtatgcccggacgaaaagtcccggtcgccggaacccgcctccaccccacgccggaggccccaaacaacccccgaatgaaactgcgctatttcatctcatcatcgcgtttttcccgaaacagggagacggtcaaggagtgcgtacaacaggtctgcgccgaacagaacatatccctgccccaaggtgccgaagccgcgaaatacgactgcaacctcgacgactcgaccctgcgcgacacccccaaacagaacgaatatctggcaaccatccgccacgacacggacctgttcatcgccatactcgatgccgcatacatcggatactacacctatctggagatcctccatgcctacaagtcctatctgctgacgggattccccatctgtctcatactggagagcaagcagcccgtcgcctgctccaaggggccgaccgaccgtacgctggagaacctctcgaaagccatcgccaacctgtcggacacctacgccccggcggaccgggcagcgggccggaacaaaacgggcgggatcccccacttcctgaccgactacgacaatccgctggctccccgcccgctcggggaggtctgcacggagaacatccggaagatcctgacgaacgagcgactcaagatgaggcaattcgccaaacccggcagagaggtgggcagcgaggagatcatgaatcggcgcggccgggtcgagaacgggtacatcggggagatctacttcgagcgcagcgtagaccgggaggaactggccaacccgaccagttcgttcgtcctcatcaaggggctgccaggcgccggaaaatcgcgtgccctgctccactacatccacaacgcgctgggcaaccagcagatcgtcgtgctccacagccacagggagttcgatgccctgttcgatacgctgttctccgaacggaacggatgctacgaattcgacgagctcgtcatcaaggaaccctactacctgatcatcgacgagatcgacaagttctggctcagttcggtccacaacgacgatttcgtccgccgctgggagcgtctgtgcgacgaggtgtacacccacagccgactgcacatctacgccactaccaccctcgaaggataccaggccgtcgaacaggcgatcgaaccacagaacacccagatcatcacgatcggagcccttgacccgaacaacgaggacgacgcccggatcatacattacttcgggaacggagccaaccgccagtcgctcaccgtaggttttatcgtcccccggagacacgacatcgcccaaaccgtggaccagttgctgcaaaacaattatgtacgcgccttctgcatggcctacaaaaccgtctgcaccttctcacgcaacagccggcagctgctccgatactcggtcatggccacggccgaactgatggccatgcgcaaccagcagatggatccggacgtcatggcggaacaactgaccgcactggcaacccgcggagtcatacggctgttcgatcaggacgacgagatcgaccgcatcaccggcgactacttcaattttcgtaacagggaggtcatcgaaggggtcaatgtggtgccgattctccccaaatggctgaccttctatttcgacgacatcctgctcacctgcatcatggagcatccgtccatcgtccggttcgggcaggagcaggtcatcgagctgatgctggcgacgttccccatgaccgaaagctattcgaaggcgatcacccgggccgaagacaaggcagccgcatggcaacagattcacgaccggtatgcggaccagattctgcgcgaccaggcgatcgaccccgaagagcggcgccgcatgctctcggtgcagatctcctatgcccccacgttcgagactgcgatcgggctgatcgagacctaccgggagagcttcccgctgaccagcatgcagatcggcgggctctactcgcatgtactcacggcccgccgcaacgggctcgacccaaactccatgcttcagacaatccgcaagtacgaggaggcgatctccgaatacgacctcttctacgtccaacggcgcgtacagctgtcggacagctactccgaagttcgcgaactggtcgggcgcatggccccggaactgacggagccgcacggaccgaccatcgactcctttcagaaatacagcatcaacgccctgctctactggatcagcgaccgcgtgagcgaggccgaagagttggacgacatcatggcccgatacgcacgctggaaccagaacaacccctcctgtccgttctctctcacagtcaagccggtatattctcttatcgacaacgccgacgggcaggcggagagactcgaggccatatatgacgcggcgatcgtacgcctcaaaccagcggccttcgcctccgaccgtgaccggctccacttcaaagcgatcgccatggggctcctgatcaagaacgccacggactacatgcaggcacgcagcttcgtcgaacggttgcaacccggagagatccacatgtcctatttttcatcgatgatcgcaaaatgggactttaaggagagcgaagacttcgaacggctgtacgaggacatcgaacggctgaaggagcgtttcgggatcgagctccacatcaacagctacaactcattgatccgcaaggccccgtcggcattcatcgcacaacggatcgtcgcggccatgccataccgcgacaactacacgctgaacctctacctgcagaaaatcttccagacctgcatcgcgagcatctcgcacgcgaaacagcatgagcgcggacgcaccatacgcacctcctacgccacggcctgcaagaccgtgcaggagctgattccggcaatcaacccgcaaggggtgatctgcaaccgcgacggaaaggtttccgacttcgcgggcgtatcgctggatccctttgcggtcaatttcctctaccggatcttcaagaacgacccgcaatgggtcgatacgaccatacgcaactgccgcccgctctgcgagaacgtacgctccaacgaaaacatccatgccatccgcatccgcggatgcgacgactatccccgggcgctagaactgttccggcaatacgaaaaggcctgcctgaagccgctgcttgccatggcccggcccggatcgcgccccatctgcccgatctgtttctgcaacatgttccgggttctgacctcgggcaacaacaaatttacccccgcatacagggaggagttccgggcgatcttcgaacaataccggccctacatctccatgaactcggacacggcctccttctattatgccacctacttcgaagagatcttcgacgggcaggaatcgacggagatcgctccggcgtttgccgaagagatggaacaattcccccagctgagctacgtcccctactatctgctgatcggatgcctccataagatcactttcaagcaggcccttgccgtctatgactttttccacagacgggccgtcgaaacggggatcgaaaagcacatgccggacaacaagagcatcgttcagctgtgcaagtacataaaaacagaccaggaactcatccgcctgcagaggtacctgctcgccgggaaggtcgagccgggcaaaacggccggaagtgcactatacaagctgtgcaaagagcgccggatgggctacctgctcggcgggaacaaccggcagaccgacagcgacaagatcaaggggcagattgcacgcagcaagaacctggaagagattttccggctgctcgacacatatgccaccgaacacgatgcaacgatcgacatacatctgttcgaatatgccctgggagcccttcacggcccggctttccaaacgagtgcggcccgcagcgaggccacggagtatctgaagcttctccgcgaacggcatctggtacgctgcacgcaaaaaacctacaaccagctgctgtcgatctattatcccgaaaaagagaaggtccggttgcttgccgagatgcgcgaacactgcccgttcgacatatacacatatgtagccatcgtcaccgactggtgttgcaacacggaactcaggcaggagtattacgaccgcatcatccgagaatacggggagaacatcgcccccgaaaccttttttaccgccctgaaagttgaactcagccacgtcatgcaaacggacagccgcgatttctcttttgccgtaaagatcctgcgtgaaatcgagcgacgcggctacaccatacaccgcagcgtattcgacaaactggaaaaatgctgcacatacaattcgcacgcccatatccgccaggaatatgcatcgatcggagacatccggcaattcatgctgctctacatgctgcgctacgttgctgacgatcagatatctgtaatctatgatgtagccgatcggaacgggatcgacatctgacacggcaaacgtctctccgccccatccctttccattcgacgacgaccgatccccgacctggcggcatcggaggcaaggccgtccccgcaggaaacacccccgttatcggctcgggtgcgcgacttcgtattcgaagcgatatagcgcgtggcggaccctgccgtctcacggtttgggccgggccgattggcgggaagtggggccgtaaccggagtcgcaaggaaggactagcagcggggaaaccatcggatttttaaatgcagatacaaacaaaaagtctccacggagtacgcggagacaacaggttaaaaaccttcggcctatagccttattgtggtaagatgtagaattcttacgtcacaaatataagcaaaaaggaggtttattgcaactttttatttaatttcacaaaaaaatatcttccacatgactaaagtattggggctggatctgggcacgaactccctgggatgggcgcttgtagacgaatcggagaatggatatgcgctcttggacaaaggcgtcgccatttttcaagaaggggttgcacgcgacaagaacaatgaaaaaccggccgttcaggatcggacggatgcccgcgcactacgccgtcactatttccggcgacggcttcgcaaaatcgacttgctcagggtactcgttcgttatgacctctgtccaccattaaccgacgaacaactctccacttggcgtcagaaaaagcaatacccgctcgatgaggagtttcttcgctggcagcggaccgacgacaacgaagaccgtaatccctaccacgaccgttatgtagcattgaccgagcggctcgacctcgagaatcgcgcacagcgatggctactgggacgagcattctatcatctggcacaacggcgcggattcctcagcaaccgcaaggaggccgggaatgaaaaggaagacggaacggtcaaggagagcatcaagaatctgtcggccgagatggaagcagccggatgccggtatctcggggagtacttctacgggctctaccaacataaggagcggattcgcggcaaatacacctctcgcaacgaacattacctgaccgaattcaatgccatctgtgaccgacagcaactgcccgacaaatggcgccgagccctgcatcgtgctattttcttccaacgcgaactcaaatcacagaagggatcggtcggccgatgtaccttcgagccgacgaaaagccggtgtcccgtttcacacccccggttcgaggagttccgaatgtggtcgtttatcaacaacatccgggtaacgggcccggatgacggcacgccgcggccattgacccccaaggagatcgaaacgatccggccgctcttcttccggaagagcaagtcctatttcgatttcgaggagattgcccgcaggatcgccggcaaggggaaatacgcctgcagggaggagcgcatcgaagccccttaccgcttcaatttcgcccgcacggccaccgtgtcgggttgtcccgtcacggcttcgctcatggacattttcgggaaggagtggcttcgggaaatccgcagtctctatctgctcggcgacgggaaaaccgaggaacaggtgctgaacgacatctggcatgcccttttctcgttcaaggacgaggagcgcctccgggactgggcctgtgaaaaactccagctttcggaagaacaggccaaagcgtttgcggcgatcaaacttccgcaggattatgccgccatgagcctgaatgccatcaacaagattcttccctacctgcgttgcggttatcggtatgacgaagcagttttcctggccaacttgcgcgcggcactcccaaaggaggtctacgcagacgaggatcgccgacacaacatcgagcaggagattgcctcgctgctgctcgactacaagcggaatccatacgacaaattcgattcgaaggagcgtcgcatcgccaactacttcagcgaccacgggctcgatatgtcccgtttggaccggctgtaccatccctcgaaaatcgagacctatccggatgcaaaacccaatgccgaaggaatcatgcagctcggatccccgcggacttcggccatccgcaacccgatggccatgcgggcgctgttccggttgcgcgacctgataaacacgctgctgcgcgaaggccggatcgaccgcgacacgaagatccgcatcgaattcgcccgcgggctcaatgatgccaatcgccgcaaggccatcgagcagtaccagcgtgagcgggaggctgagaatcggaaattcgccgaagagatccgccgtcaatacaccgccgaaaccggccgcgaaatagagccatcggacgacgaggtgctgaaataccgcttgtgggaggagcagcagcacatctgtccctacaccggccggcaaattcgcatttcggacttcatcggggccaatccgggtttcgacatcgaacatacgcttccgcgtgcccttggcggcgatgattctcagatgaacaagactctctgcgagaaccggttcaaccgggagaccaaacgggcaaaactgccggccgaactctccaaccatgccgaaatcatggagaggatcgaatcgttcggctggcgggagaaggtggagagcttgcaaaagcagatcgaagctcaggtccgcaggagcaaaggtgcagccaccaaacccgaaaaggacagcgcaattcaacgtcaccactatttgcagatgcaacttgactattggcgcggaaaatgcgaacggttcaccatgaccgagattcccgaaggtttcagtaaccgacagggagtcgatatcggcatcatcgggaaatatgcacggctctatctgaagacggtttttgaccggatctatacggtcaagggctccacgactgccgcgttccgcaaaatgtggggcttgcaggaggaatacacccgcaaggagcgcgtgaatcacatccaccactgcatcgacgccatcacgatcgcctgcatcggccgccgggagtacgaccgttgggcgcagtacgccgccgacgaggagcgattcaattacggtgaaaccgacaaaccccgcttcgagaagccgtggccgacctttaccgaggatgtcaaggcggtggccgacgaactgcttgtggcccaccatacgcccgacaacatggccaaacagacacgcaaaaagttgcgggttcgcggccgggtcaagctgagtgccgacggaaagccgatctatcaacagggcgatacggcccgttgccggctgcatcaggagaccttctacggagccatcaagcgagaagacgaaattcggtacgttgtacgcaaatcgattaaactgttgcaacctagcgacatcgacaaaattgtggacgatgcagtccgggatcgcgtacggatggcaattgatgaagtctgattcaagacggcgataaatccggatgaatacacgatctggatgaaccgcgaaaagggaatccctatccgcaaggtgcgcatcttcacgcccggcgtcacccagccgattgcactaaaaaaacagcgagatctctccgacaaagagtacaagcaggattatcatgttgcgaacgacggaaactactgtatggccgtctatgaaggtaaagacaaaaaaagcaagctgaaacgctcctttgaacttgtcagcaaccttgaagcagcacaatatttcaaagccagtgccgaccgggaagcgtgccccgatctggtaccgctggccgatgcgaacggatttccgctgaaatgcattttgaaagcaggtaccctggtcctgttttatgaaaattcgccggcggaactttgcgattgcacacccaaggagctgacaaaacgactatataaagtaacgggattcagcacgctgacagtctcgaataattcatatggtcgtcttgcattaaagcaccatcaagaggcccgaccggcaggtgaattgaaggccaaaagcggagtatggaaaacaaacgaggaataccgccccgttatctccatattgcatacccagctcaacgcttatgttgaaggttacgactttgaactgaccgttacgggagaaataaaattcaaacacggaagaccatgctgaaacgcgccttgtttttttcgactccctactgtctgagcctgcgcaacggccagatgatcgtccacacgcgcgaggctcccgaccaacggaaaagcattccgatcgaggatatcggcttcgtagtgttggaggaccagcagacctccatcacgctgccgctcttgaatgcgctgtcggataacaacgtggcagtaattctttgtggagagaaccgcatgccgaacgccatgttgatgaatctggattccaatcgcacgcaaggagaaaattaccgtgcgcagatcgaggccagcgaaccgctgaaaaaagggctttggaaacagatcgtcgaggccaagatccggaatcaggcaactttgctgcggaaaatgggacgtgacggggataaactgaaaccctactacatgaatgtcaagagcgccgatgcggacaatcgtgaaggggcagcagccaaaatctattggacagagttgttcggcagcgagttttaccgctcccgcgaaggttctccgccaaacaacctgctcaattacggctatacgatcctgcgggcggctgtagcccgtgcgatcatgggatccggactcttccctgctctgggcatcttccaccgaaaccgttacaacgcctttccgttggccgacgatctgatggagccctatcggccgtttgttgacgaaatcgtataccgtctttatacaaacggtcatatacagctaaccagggaggtaaaaggggaattgctgcggattttgtttgtcgatacccgtttcgacaagattgtacgaccgcttgaggtaggtttaacctttacaacctcttccatagcaaaatgcttcgctggtacacaaaaaaaggtatcatatcccatgttggaatagaaccatgtcagaaacgcgattgaatgcctatcggatcatgtggttgtttgtctttttcgatctgccgaccaataccaaaacagaacggcgtcatgcggcacaattccgcaaagcgttggaaaaggacggcttcacaatgatgcaatattcggtgtatgtcaggcattgtgcctcgaaagaaaacatgcaggttcacatcaatcgcgttcgacggtcgatgcctccggctggatttacgagtattctgtctgtgacagacaaacagtatggagacattctcaacttctggggcaaaagcgaacgggcaaaaccggacatgccgcagcagttggaatttttctgaaaaaacggtatctttgttctttgaaatacaaaaaagcgcatcaaactcacttcgacgaaggttctgcattcgatttcccggccggacaaaacggcataaagcactgaaatcgaacaaatagcaccccaggcgttgtggtttgatgtagaatttcaataagatacaaccaaaaggtctaaaagtaggcatgccaatggttgtggtttgatgtagaatttcaataagatacaactcaacgatcggggacccgaatcgtctaccagttgtggtttgatgtagaatttcaataagatacaacggtaaaggcagagggatctatcaaccagctgttgtggtttgatgtagaatttcaataagatacaacccgtgcagcagagagaggaatacactcaaagttgtggtttgatgtagaatttcaataagatacaacagcattggggcagtggcacgtgtagagagcgttgtggtttgatgtagaatttcaataagatacaacaccgaggacgtacgaacggtggtagccagggttgtggtttgatgtagaatttcaataagatacaacagcgacgggagctctcgggcaacctgctggttgtggtttgatgtagaatttcaataagatacaacggagataaccgacgaaagctgcttgcgagagttgtggtttgatgtagaatttcaataagatacaacgctgtggaacatcagctggacggacaccggttgtggtttgatgtagaatttcaataagatacaacactcgtcaccgagttccgagaggaaccagtgttgtggtttgatgtagaatttcaataagatacaacttaaatttagaatggattagaatagttaaagttgtggtttgatgtagaatttcaataagatacaaccgagttggaaaacttcggccgtgcaactttgttgtggtttgatgtagaatttcaataagatacaacgccaggcgtgcggacgcttcggaagattcgttgtggtttgatgtagaatttcaataagatacaacgcttcgtgtgcatggtgaatcgttcgaggtgttgtggtttgatgtagaatttcaataagatacaacagcggccagactcatcgccgagttccgaaagttgtggtttgatgtagaatttcaataagatacaactcatacccggagaatttcagcatcacgggctgttgtggtttgatgtagaatttcaataagatacaaccggcaggaactattcgttggaggtccatcagttgtggtttgatgtagaatttcaataagatacaacctggcagaactgggcagtgatggcttgacgttgtggtttgatgtagaatttcaataagatacaactcaatcatagggatgtttttctggtacatggttgtggtttgatgtagaatttcaataacaaagcacacaaagaacttaaacatcatgcaggagagaattaataaattccggtagatcgaaaacgagatgatttgacctgtaaaatatggacagatacctttagcgtcttgtcattatcatctactatgccgtcagcaccctacagatacgacgcatctcgcggctgatattcgcctcggaggtctttacatagcgtcgtgtcatgttcgtattcgtatgacccggaatcttggcgataatgtcgatcagcatcccgtattcgccaaaataaggtacgatattcgcaaatcagcttgaaatgccggacatccatattcggattccggcgcagaaagacatggcgcatgcccgccacgccgttcttggcctcctgctcaaggtcatcgggatggatccgcccccgcataaccgccctgcggatcgctgaaaagcgcccggtgaaactccgactcgtagacgtgtgccgcggtgcaggccgaagaccgaaacggcacacccgaacaaaaggaccggcgcggcg

SEQ ID NO: 4575 - DNA, 10938 bp, synthetic construct
  source 1..10938: mol_type = other DNA
  misc_feature 1..10938: note = Synthetic
cgatggcataggcggctgcggccgcttcggatacgtcggccggccggtgccgttccttggcgtccaatgttacgaccgccccgatgatgcggatgtggccgtagccggcaagccgttccagcggtcggtatcgaaaggcggacaaccccatatccggccgtaattaccgcatgcccggcaatattcctcgatgcggcgtgcgtcgcagtagctgcggaggtaatctccggcgggcaggctggcggttatgtagcgggtacagggcatctcggtgcctgcaaagatagcgaacgcgcggcggattgctgcacttttttccgtcggcttcattccctgtggacatttctattttttgtaaagcggccgtaacgctttcgtaacgggctccgggtagttttgcggcgtcaaataattgttcgggataaagatatgagattgtacacaccgagaattctgtcgttttttcttgcgctgtgccccttccttgcggcggaggcggcgcagccgctttactccgtgtcgggcagggtgaccgatgccgccacgggcgaaccggtgacaggcgccgtagtcatggtcaaggatacctacaaggaaccgaaaccgatatggagggccgttggcgcctcgacaaccttgccgcggggattatacgttcgccgtcagtttcatctcctacaagagcatcgaggtgtcgtgcagggtggccgccgatgtggagggggtggatgtctgcctcgaaagcgattcggaagaggtcgaagaggtggtcgtgaaggcccgtatgcggagcgacaccgagatagccatgctcggaacgataaaggccgttccgcaggtcacgagcggtgtttcggcggcccagatatcgaaaagccccgaccggaacgcttcggaagtcgtccgtcgcgtccccggcatcaccatcatagacgaccgtttcatcatcgtgcgcggcctgtcgcagcgctacaacaacgcatggataaacggactggccgtcccgagtaccgagacagacagccgtgccttctccttcgacatgattcccagcagtcagattgacaacctgctggtctataaatccccctcgccggagataccgggcgacttctccggcggtttcgtcaagatagtgaccaaaggtatccccgaagaaaacagcatcgaagtcggttattcgaccgggttcaatgtcaggacgcaattcaggcagttccgcatgaaccccggaagctgtacggatttcctcggtttcgacctcggcaagaggccgctcggccgctcgtttccggcgcacatggacctcgtcacttcgcccgacgagataacgaggctgacgagagaagggttcaacaacgactggcgcatccggagttttatccccatgcccgaccagcggctctccttctcgatggcccgccgctgggatacgaagcgcggccgtaccgtgggcaacatcaccgccgtcacatacagcaatacgtttaaaggagtcgaaggtatcaagaacgcccggtacggcatctactccgcggccgccgacacgcccatctatctcgacgattattatgacaaccaatattcgaacgatgtccggctcggagcgatgcacaactgggcgttcatcctcgacgcctctaaccgtatcgagttcaagaacctgctcaatatattggggcgtaaccgtctgaccgaacgccggggcatcaaggacatgagcagcatgtactatctcgaacagaccgagatgcagtactcttcgcgcctgacctatacggggcagttctccggcacgcaccacctggccggtaccgatgcgacggtgacgtgggatgccggttactcctatgccgaccggaacgaacccgaccgccgcatcgtctccaatatggccggtatcggaagtacggatgacctggcggatgtggtgacgggcaacgacaacatcaaacgctacttccagaccctcggcgaccacatcgcttcggcttccggcaactatgtgcagcagttggcctgggggggtatccgacccacgttgaaggccggcatctacggcgagtaccgttaccgcagctacgaccagcgcgagttcatctaccgttacgacaacctttccgccgaagagcggcaatattatctcaagctgcctttccaggagatgctgtcgcccgaatggctgggagcggacaaggtctatatcgacgagataacccgcaagaccaatgcctacaccgccgacatctattacggagcggcttatgcggcgctcgacattccgctcggaaaattcgatatctatgccggggcacgtctcgaaagctacaccacgaagctgacgcgagaccgttcggatgcacccgaacttatcctgatgaccaccaagacgcaccacgacctcaatctgctgccttcggtcaatgtcacttaccggatagatgaccggcatcagttgcgggcggcttacgggcgttcgctcaaccgtccggagctgcgtgagctttcccctacggtctattacgatttcgacctcttcagcgagatagccggtaacgagaacctcaggacggccgtcatcgacaacgtggacctgcgttatgaattctatcccgcaccgggcgagacggtgagctcggtgccttctacaaacatttccgcaatccgatagagtggacctatatcgacatgggcggttcgctccgctatatgtatgagaatgccgaccgggcccaaagctggggtgtggagctcgatgtgaggaaaaacctcggctttatcggtatgccgaacctttcgctggtgctcaatgcggcgtggatatacagcaacgtgacctttgtgcccggcgaggtggtgtccgaacccgaccggcccatgcagggacagtcgccctacgtgataaacgcgggactctattacagttccgaacgactcggactcgacgtggcgctgctctacaaccggattggcaagcggatagtggggctgggcaagtccaacagcgtcaatcccgaccccaatacgctgattcccgattcgtacgaaatgccgcgtaacgtgctcgatttctccgtatcgaaaaggatagggcgacgggtgacgctgagctgttcggtgaaggaccttctctcggaggacgtggtgtacaagcagttcccgaagttcgagaaggacggacagatgtaccggcgggaacaggtcacccggcgctacaatcccggtcagagcgtatcgctgactgtctcggtaaagctgtgaacgatattcgacaggacagacaatagagaaaacaccaattttttaatcgaacagaaaaagatgaaaaagaacatcaagatggccgccgtggcatgtatgctcctctcggcctttgctaccgtaagttgcgacaagaatacggacaacggcggcgagaatcctccgcagggcgaaacgttcgaactgggcgacggttcgaaggataatttcgaaatcgcttccgacatgacgctgacctatccgaacgtctatacgctcaaagggttcgtttatgtgcgacggtgtgacgctgaccatcgagccggtgtggtgataaagggcgacaaggctacgcaggtacgctcattatcgaacggggcggtaaaatcatggcacagggtacgcccggagcgcccgattgtcttctcacttctgcccaggctcccggcagccgcaagcctggtgactggggcggtatcatcctgctcggcaaggcgcccaacaacctcggcgaacagaccatcgagggcggcgtgcgttccaaacacggcggtaatgacccggcggacaattccggcgtgctgagctatgtacgtgtggaattccccggcatcgaatactctacggacaatgaaattaacggaattaccttcggttcggtcgggagcggtaccaaaatcgaccacctgcaggtatcctactcgggggacgactcctatgagtggttcggcggtacggcgaatgcgaaatatctcgtcgcctattcgggttgggacgatgatttcgataccgacaacggcttcagcggcaaggtacagttcgccatgggcgtgcgcaatccgaggataggggacaagtcggcttccaacggtttcgaatcggacaacaacggcgacggtgcggctaccgaaccctacacctcatgcgtgttcgccaacgtcagcttttcgggccggtgtccaatcccgcatcctataccgaacaggccggcgccgagggtagcccggtcgatgcgagattccagccgcgcttcatctgcgccgcaatacccagctcagtatctataactccctcatagcggctttcccggtagggctgattatcgagaacgacaaagggtctaccacacaggattgggctgagcagggcaaactcaacgtaaccaactgcgtgatggccggcatggtgaagaattaccaggatgcacagtattggaaggatggttcccagttcgacgatgaggatgcgggtagtttcgccgacggttatttcaaccgtgcggagggtggaaacagggtgttcgcagccctctccgacctcggcctcagcggcaatccgcttagcctttccgctccggtggtcttccccggcagcgacagtccgcttgcttcgggtgctgcatggacggaggagaaggtggcttcgggcttcgataaagtggactatatcggtgctttcggtccgaatgagaccgctgccgccaactggacgagcggctggtgcaatttcgacccccagaatacggtttactaaaacgtcggcaggttggtcaatttgtcggtgggcgggctgctgcggcggtccgcccttttcccgttccgcggcggagcttccggtgtgccggcaatgcatgcggggattgcgttccgtgcaggaatattacagcccgaggtcttcgtcaatcaagaccaccgtaatcctccctttcggatggcatttgtgcagaatgagccgttcgttgcatatccgtcggggcgatgcacaatccaagcaccggcccgttttcacgcacggcgtgtcgaaatcctcatgacgggccgcattgcgcggggcggccgtttcacggatacgcctgaaggcggcatcgccgtcctccacgattttgttccgaccgacggtcaggatgacgtgccgcggtccgaaggctatcggagcgatgcggttgctatcatgtccagccaatgcagctccccgtcgagggtgacggcattcgcgccggtcaggaacaggtcgcataacagcgcctgccggcgtctttctatcagttccctgaaaggaacgccctgttcgaaagtgtcgatgaacggataggtgcgctgcgtccgcagccactccaccgtccccgtcgcgtagagcgtcatcgagtcgccgaaggagatactcgccggcgcgagttcggcgatgcggctgcggatgtattcgccggcctcgtgtgcgtcggctgctgtcgccacctcaaaaccgttgcgcctcagcctgtcggcacatctctccgttgtctttgcctgttccatcatgtgtctccattatgggcggttccggcagatgttttccggagaccgtaaaaaaagtctccacggagtacgcggagacataggtattaaaacctgcggcccatggccttattgtggtaagatgtagaagttcttacattgcaaatataggaaaaataagtgcacaaatccaaaaattttccttatttttacgaaaaaccgccaatttatggagaaaagattgggtatagatgtaggaaccaattccctcggatgggctatcgtggaggtggacgacgaaggatgtacgctgctcgaccgaggggtggatatctttcaggagggggtagcacgtgagaagaatcaggagaaaccggccgtgcaggacaggaccgatgcccgtgccctacggcggcactatttccgtcgccgtttgcgcaagatagccctgttgcgggtgttggtacggcacgacctgtgtcccgcattgtcggaggagcagttgaacgcctggcaggggaaggggatttatccgttggacgatgcgttcatccgttggcagcgtaccgacgacaatgcggacaggaacccgtaccgcgaccgcttccggtgtctgaccgaagaactcgatttggcctgccgcgaagaacgttacgtgctgggcagggcgctgtatcatctgtgtcagcgccgcggatttctgagcaatcgcaaggatgcgggaaacgaggccgaggagggtaaggtgaagcaggagattaaaaccctctctgccgacatggccgctgcggggtgcgaatatctgggcgaatatttttaccggctttaccagcggaaagagaagattcgcaaacactatacagcccggaacgagcactatctggccgagtttcgtgccatttgccggaaacagcggctcggggaggagttgcagcaggcgctggagcgcgccattttctaccagcgtcccctcaagtcgcaaaagggcttggtaggcaagtgtactttcgaaaaggacaagagccgctgtccggtgtcccatccgcgcttcgaggagttccggatgctccagttcatcaacaacgttcgggttacgggtcccggcgatgcggagccgcggcccctttcgccggaggaggtggagattgtccgtccgctgttcctgcgcaagagcaaaccgcatttcgatttcgaagacattgccaaaaagatagcgggcaaagggaactatgcctgccggggcgagttgctgcaggcgccgtaccgcttcaattgtgccggcaaatcgacggtgacggggtctcccgtatcggcccttttcgcttcggttttcggagatgattggcagcgtgagatttgcagctgtatacgctcggtgccgggaaaaacgaggagcagatactcaacgacgtatggcatgtcctcttcgcctttgaggacgaggagcggttgcaggcctggttgcaggagaaactgcagctttcggccgacgatgcgaaaaccctggcggccttccgtctgccgcaggggtatgcgtcgctgagcctgaacgttatcaacaagatacttccctacctgcggcgcggataccgctacgacgaggcggtattctttgccaacctcggaaaggtgcttccggcggaggtgtatgccgacccggccaggcgccgcgaagtggagcaagggatttccgcccagatggatgatttgggcgacggagagaaaacacggaaggaggaacgtattcgcgattatctgcggcgttattggggcgtagaggagaagcggctggagcgcctttaccatccttcgatgattgaggcgtatccgtcggcgtctcccaacggacagggtctcctgcagctgggttcgccgcgcatcccggctgtccggaatccgatggccatgcgagctctgttccgcctccgcgtactgctgaacgaactcctgcgcgaaggaaagattgaccgtggcacgaaaatcaatatcgagctcgcccgcgagctgaacgacgccaacaaacggaaggccatcgaacgttaccagcgggagcgggaggctgagaaccgcaaatatgccgaagagattcgccaacagtatgtcgaagcgacgggacattccatagagccctccgaagaggatattctcaaataccgtctgtgggtggaacaggggcattgttccctttatacggggaagacaatcgggatttccgagtttctcggcgacggccggcggtacgacatcgagcataccgtcccccgttcgcgtgggggagaggatgcgcagtacaacaagacgctgtgcgaagaggaattcaaccgggatataaaacgcgacaaactgccgtcggagctggccaaccataccgcgatattggcctgtgtcgagtcgtgcggatggttcgagcgcatcgaggggttggagcatcgggtctggggggcggaccgtcgcgcaaagagtgcgacgaccaaatcggcgaaggatttcgccattcaggaccggcactactggaggatgcacctcgattactggcgcaggaagtgcgaggcctttaccatgacggaggtgcccgaaggattcagcaatcggcagggtgtggatgttggcatcatcggccggtatgcgcggctctatttgcagacagtcttcgaccgggtttatacggtcaagggtgctacgacggctgcgttccgcaggatgtgggggctgcaggaggagtatgcggcgaaagagcgcgtgaatcatgtccaccactgtatagatgccattaccatcgcctgcatcggaagccgggagtacgccctgtgggcgcagtacgttcggcaggatgaactctatcggcggggggaagcggataaaccccgttgcggcaagccgtggccgaccttcaccgaggatgtccgggcgacggccgatgagctgctcatttcgcatcacacacccgacaacatgcccaagcagagtcggaaacggctgcgtgtgcggggaaaggtgcagcggaacgacaggggagaggtcaaatacatgcagggcgatactgcccggggtgctctccatcaacagacattttatggagccatcgaacgagacggcgagattcggtatgtcgtgcgcaagtcgctcgaccaactgctgcctgcggatgtggaaaaaatcgtggatgaggcggtcagacagaagtcagggaggctgtcgaggatacggtttcaaagaggcgacagacccgacgaaacacaccgtctggatgaacgaggaaaaacggataccgattcggaaggtgcggatattgaccggtgtgaaaaatccgattctcctaaagcctcatgcgatgtatccgttaaggagtataagcgatattaccatgtctcaacgacgggaattactgcatggcgatttacgaaggcagagacaggcagggcaggttgaaacggacgtttgaaatcgtaaataaactggaggcggcccgttatttcaaacggagtgcggaccgggaatcccggcccgatttggtaccgctgtcggatgtcaacggttattcgctcaagtatctcttgaaaacggggacgatggtgttgttttatgaaaattccccggacgagttgtatgaatgttcggtcggagagttggctaaaaggttgtacaaggttgtgggaatggcgcaggatggtcgtgtccagtttctgtttcatcaggagcacgggaccagaaagccgttacggcggagtgtggaatgggaatttcggttttcgatgcacgccatcctgctccgaagttgaggataagagtttccaattttaaaatgttcgtcgaagctatgacttcgaactgacggttacgggggaagtaaaattcaaacggtaattgcttcatggtgaaacgcgcgctgttcttttctacgccttatagcctgagtcttcgggacaatcagatggttatccgtacgaaggaggcccccgacatgcagcggaccgttccggtcgaggatatcggggtggtggtgctggaggaccgacagacgtccgtgacgctgccgctgctgaatgcgctctcggataacaatgcggccgtcatcttctgcggcgacgaccggatgccgaacgccatgctgatgaatctcgattccaaccggacacagggcgagaactaccggacgcaaatcgaggcgagcgagccgttgaaaaaggggatatggcggcaaatcgtcgaggcgaaaatccgaaaccaggccgccttgctgcataagttgggcaaagacggggaacggttgaagccctattaccggaatgtccgcagcggcgatgcggacaaccgggaggggactgccgccagaatttactgggcagagctgttcggccgggatttcgttcgtatgcgggagggagatgttcccaataacttgctgaattacggatatacggttctgcgggcggccgtcgcacggtcgctgatggggtcggggctgtttccggcgttcggcattttccaccgtaaccggtacaatgcctttccgttggccgacgatgtgatggaaccttatcgtccttttgtggacgaattggtgtacgggctccgtatgcagggcgagtcgcaactgacgcaggaggtcaaggggaccctgctgcggatactgttcgccgatacgcgtttcgagaaggtgatgcgtccgctggatgtcggcctgacgtttacggcggcatcgctggcgaaatgtttcgctggaacgcaaaagaagattgtttaccctttgttggagtgacaggatgtcggaagtccgtttgaatgcatatcgtatcatgtggctgttcgtgtttttcgatttgccgaccaataccaaaaccgagcgtcgtcatgcgactcagtttcgcaaggccctggagaaggatggcttttcgatgatgcagtattcggtgtacgtgcgtcactgcccctcgaaagagaatatggaagtacatctccgtcgggtgcagaagtcgatgccgcctgccggatataccagtatcctgagcgttacggacaaacagtacagtgagattcggaactattgggggaaaagcgaacgggcccggcccgagatgcctcagcagctggaatttttttgatatactgctctttgaaatacgaaattacatccgaccaacttccccggtgtgcggcaggacgttttatgcatcggtgtcatatatgtaacgtgcagaatacgaattactgccatgcgcgaggttgtggtttgatgtagaattggaatgagaaacaacaaatatcaaagaacatccgaggaatgatttgttgtggtttgatgtagaattggaatgagaaacaacttggaaatgctgagggatgacatagtagaggttgtggtttgatgtagaattggaatgagaaacaaccgaccatgccggcggccacgtcgtaaccggttgtg

SEQ ID NO: 4576 - DNA, 10477 bp, synthetic construct
  misc_feature 1..10477: note = Synthetic
  source 1..10477: mol_type = other DNA
ttcaaggaaggcctttcagtgttggagtacttcatctctacccacggtgcccgcaagggtcttgcggatacggcattgaagaccgccgacgccggttatcttacccgtcgtcttgtcgacgtagcccacgacgtgattatcacagaggaggactgcggcacgcttcgcggacttgtctgcacagagcttaagaacaacgaagacgttgttgcaactctcagcgagcgcattctcggacgtgtgtcggttcacgatgtggtagacccattgacaggcgacatcatcgtgaagagcggcgaggaaatcaacgatgcagcagcagagcgcatcgagaagtcgccgattgagtcggttgaagtgcgttcggtgcttacctgcgagtcgaagaagggcgtctgcgccaagtgctacggccgcaacctgtcgaccaaccgtatggttcagaaaggcgaggctgtcggtgtcatcgcggcgcagtcgatcggtgagccgggtacgcagctgaccctccgtacgttccacgtcggtggtgtggcatccaatatcgcagccgtatcgtcagtgacatcacgctacgacggtgtgcttgagattgaagagctccgcacggttaagacagaggactgcgacgtagttgtaggccgtctggcagaaatgcgtatcgtcgacgccaatacgggcatggtgctgacaaacaccaacatcccttatggttcgaaactttacttcggcaacggagcaacagtcaagaaaggcgacgtaatctgcgaatgggacccgttcaacgccgttgttgtcagcgaggttgccggtaaggcacaattcgtcaacgtgattgaaggtgttacttaccgcaaggaaaccgacgagacatccggtttgcacgaaaagattatcatagagtcgaaagaccgcaccaaggtgccggaggtcaacatcgttgacgccaacggacaggtgctgaaaacatattcattccctgtcaacgcccaccttatgattgaggacggcgatgaaatcaaggcaggtcaggtgtttatgaagacaccgcgcgcatctggtaacgcaggtgatatcaccggtggtcttccacgtgtcactgagctcttcgaggcacgcaacccgtctaacccagccatcgtttcagaaatcgacggcgaggttatgttcggaaaaatcaagcgtggtaaccgtgaaatcagcgtgacatcgaagattggcgaagtgaagaaatatctcgtgccgttgtcgaagcaaatcctcgtacaggaaaacgactacgtgcgcgccggcacaccgctttcagacggtgcgatcactccgtcagacattcttaacatcaagggcccgacagccgttcaggaatacatcgtcaacgaggttcaggacgtctatcgcatgcagggtgtgaagatcaacgacaagcactttgaggtgattgtgcgtcagatgatgcgcaaggtctgcatccttgatccgggcgacacccgcttccttgagtcgcaggttgtcgacaagcgcgactttatggatgagaacgaccgcatttggggcaagaaggtggttaccgacgccggtgactcacagaatctccaggctggtcaaatcatcacagcgcgcaagctccgcgacgagaactccgctttgaagcgcaaggacttgaagctcgtacaggtgcgcgatgccgttccggcaacgtccgaccagatgcttcagggtatcacccgcgcagcattgcagacttcaagcttcatgtcggcggcttccttccaggaaaccacgaaggtgctcaacgaggcagcaatcaacggcaagaccgacaatctggagggcatgaaggagaacgttatctgcggtcacttgattccagccggaacaggtctgcgcgactacaactcgcttgttgtaggaagcaaggaagactttgaatatctcgacaagagtctcgacgcccgtcttgaggctgaagcggctgaagacgctgccaaaatcaagaaggctgaagagaaaggcaaataaagaaactgattgaaaaaactgacaataaagatagcccggcgattggttcgtcgggctatctttttaatgagtggacaaacgtactgtgttggaaaagcatccatcatgacatggaacattcgtttgagattacatggaaaaggtgtcttaatagagtgttgtcgatacaaccgtcgttccagtatatcgccaacggaaacggaaaatccgcagttctccttgcccgcctgtattgcagcttttgagggatggggattaatttggacaaacaaaaagcctccacggaaagtacgcggaggcataggatttatatccttcggcatatagccttattgtgataagatgtagaaataatcttatgttgcaaatttctacagaataattgatatttccaaataaatttcgctaaatttacggaatattgaaaaaaccgaaacaaaaaacgatatgaaaagagtatttggaatagatttgggaaccaattcaataggatggtcaatagtagagcagttggaaaatggaaaatacagacatataaaatctggtgttgacatttttaaggatggagtggatcacgataaatcaggagagcatccatgtgtgcaattacgaactaatgcgagaggattgcgccgacattattttcgccgtcgtttacataaaatagagttgcttaaaatattgatagaggaaagaatgtgcccgccgttgacagatgaagatcttaaacggtggcggtttaagaaaatctaccctaaagaagacaattttatggaatggcagcgcacaaacgacaatttggagaaaaatccgtatcatgatcgatatgttgcgttgacacgaaaacttgatctgtcgatagagagcgatagatatatacttggcagggcattttaccacttgtcgcagcgcagaggattcttgagcaatcgtaaagattcaacgaaagagcaagaaggagaggtcaaggctgctatatctgaattgtcagataaaattaaagaggcaggatgtagttatctttgtgagtatttctacaaattgtatcaagctggggataaaatacgagggcattatacggctcgcaaagagcattatctgaaggaatttcaggcaatttgtgacaagcagagcctcggggctgatttgtgcaagcgtttgaataatgcaattttttaccagcgacctctgaagtctcagaaaggaaatattgggcgatgtacgtttgaacttggcaagcaaagatgttcgacatcgcatccagcttatgaagagtaccgcatgttgtgttttataaataatatccgtttgcatcgtcaaggggaggattctgatttccgtgtgcttacaaaagaggaggttgacgcaataattcccaaatttgtatgcaagtcgcaatttaaatttgaaaaattggcaaaggtgttggctcataaaaaagagaattatgggttcaagtatgattctgatgaaagtactcttaaatttaattatcgaaaagaaacaagcattgctggcagcccggtgactgctggattgaaagaaatattcggagaagaatggaaatcggaaatctgtagtgtgtatatgaagtcggaaggaaagacagaggaccggataatcgatgatgtgtggcatgtgctctattcttttgacaatgatgaaaacatccgggattgggcaaaaaagaatctgcagcttgatgatgaacaggcagaaaagttgctaaaatcaaaatcgaacgtgattatgcatcgttgagcctgaatgctatccgaaagattctgccatatttgcgacgtggtttgcgttatgatgaggctgtgttctgtgcaaatattccggcggcgcttgggaatgtagaagatgttgatgaatataggaaaattgaggatgacatagtcgcatgtgtgcgaaatttcaaaagctgtgaagtggcagggagaaaaaatacattggaaaaagaagtggcagaattgttggaggagaagtatggcgtagacaaacgtcatcttggaaagatttatcatccgtcaaaaacagaaacttatccaattgcacagcccgacaataacggtctgcggttgcttggctcgcctcgaacggcatccgtgcgcaacccaatggctatgcgggcgttgtttagattgcgggcgttgacaaacgagttgcttaaaaagggagaaattaattcagaaacggttgtcaatattgagtttgcaaggggattgaacgatgccaatatgcgcaaggcaatagaaaactatcagcgggaaattgctgataggcatcagaaatatgccaaggaaataaaggactgttatttaaaagaaactggaaaaaatattgagcctacagaaaatgagattctgaaatatcaactttgggaggaacagaatcatcagtgtttatatacaggcaagatgataagtgtcgctgattttatcggggctaatccaaagtttgatattgagcacactttgccacgagctgctggcggtgatgactcacaggtcaacaagacactttgtgacagccgtttcaaccgagaagtgaagaaggcacatttgccatcggaattggcgaatcatgcagaaatattgttgaaggcaaaaaatctgtggcaaaagaaaatttatgagttgaccaagcagatagaagggactaaaggttatgccgccgataagaatgcaaaagacggtaaaattcagcgcaggcatttgcttaaaatgaagcgtgattattacattggaaagttgcaacggtttgagatgaaagaggttcctgcagggttctctaatcgacagggtgttgatattggtattataggcaagtatgccaagttgtatctgcacaccgtgtttgacaagatttttgttgtgaaaggagctacaactgcggctttccgaaaggtttggggcctgcagtcggtgtatgagaagaaagaacgcataaatcatgtgcatcattgtgtggatgctattacgattgcatgtatcgggaaaaagcagtatgatgactggaaatgttatcaggaggcggaagatatgtattatcgaggagaaactgggcgtccgtcaatggacaaaccgtggtctacattcaccgaggatgtaaagcagttgacagagggcttgctgattcatcattatgtgcccgacaatgctggaaaagcatcgaaaaagaagttgcgcgtccgtggtcgcattcagcgtaatgccgaagggcgggcgttgtatgctactggcgattgcgcacgtttgtcattgcatcagcaaactttctatggggcgattaaacaggatgatgagatacggtatgtggtgaggaaaccgttggattcccttgagaagaaagatatagaaaagattgtagacccagaggtccggcagaaagttaaagaggctgttgacgccaaaggtatgaaagaagctgtagctgacggaatctggatgaatgaagaaaaaaggattccaataaaaaaagtgcgtatatacacatcaattgctaatcctttgcgattgaagcgtcaacgagatttgtcggtgcatgactacaaacgagattattatgttgccaatgatggtaattattgtatgggaatttatgagggaaccgatgcaaagggcaaaaagaagaagacgtttaagatagtcaacaatatggatgctgcaaactattttaaggcaagacaacgcggcgaagatgtggaattgttgccaatgtcggatggtaatgatttcccattgaaatgtgttcttaagacgggctctgtggtgctcttctatcaagacactccaaaagagttgaaagaatgctcaaagaaagagcttgcgaaaagattgtaccgcgttgtgggaatgtcggagatgagaataactcgtaaaaaaggaaaaatagactgttatggaatgctctctttgactttccaccaagaggcccgtccgagcattgacctgaaagataaaaatggggagtggagaattggggaggatgtgcgacccaaaattaagttaacgcataatcaaacgaatttccttgtagaaggaattgatttcagattgacattgtcaggagatgtggaatggctaaaataaaaaaattatgttgaagcgggcactgtttttcactcagccgtttatgctgagtcttcgcaattgtcaaatggtgatatgcactcgggagatgtcgcaagaaaagcgaaccataccgatagaagatataggttatgtaattcttgaacatccgcagattagtgtttcgttaccgttgctcaacgctttgtctgataataatgtctctgtcatattttgtggagacaatcgtatgcctaatgcaatgttgcttaaccttgattctaacgcaacgcagggggagagtttccggaatcaggttgaggtgtcgcctgcgttgaaacgcaatctctggcaacaggtggttgtggcaaaaattcgcaatcaagcagctttgttgacaaagttgggaaaggatggcgatttgttgcgtccgttgtggcagaacgttaaaagtggagattctgacaatagggaaggggtggcatcaaaaatttattgggcagaaatgtttgggcgttcgtttgtgcgttcgcgagagggaacaggattgaacccattgcttaactatggctacactattcttcgtgctgctacggccagggcattgatgggttccggtttgctccctgcgtttggtattttccatcgcaatcgttacaatgcgtttcctctggcagacgatatgatggagccgttccgaccatatgtcgatgaggttgtttatgagatgatggaggctgggatggttgaattgaataaggaggccaaagggaaattgataggattgctctttgttgatacttatttcccaaaagtgacgcggcctcttgatatagcgttgacaatggcgaccgcttcgttggcaaaatgtgttgcaggggattgtaagaaattaaaatttccgataatgaaatgacagagtttagacttaatgcttatcacattatgtggctgtttgtcttttttgatttgccaaccaatactaagaagcagcgtaaaaatgcggcttctttcaggaaaatgcttgaaaaagatggattcacgatgatgcaattttctgtctacatacgtcattgtgcatctaaagaaagccgtgatgtacatgtgaaaagggttaagtcattcattcctccggaaggaaaggtgagtatactctcagtaacagatcgccaatatggtgacattcataacttttggggaatggtggaggaggaaaaagaaaggcgaccgattcctcaacagttagaaattttttgagttctttgaaatttggatgaaaacgtataattttgttatgtgattaagaagaaaccgttattgatgaatctttagcgagtttttttttaattttctcatcaaactacagcattccgttgaaaatgagaatgtgatttaggcgataatgtgcttgaaaagagcgtcttatgcgccataggttgtggtttgatgtagaaatggaataagatacaacgctcgtatgtggtaggactgcaaaagtacggttgtggtttgatgtagaaatggaataagatacaactaattactgtttaatactccgtgctgtacagttgtggtttgatgtagaaatggaataagatacaacgccatccttggtgtcaaggtcaatgtcggtgttgtggtttgatgtagaaatggaataagatacaactcaacacacgctctttaacggtgtcaagtcgttgtggtttgatgtagaaatggaataagatacaactatcaatagtgacacctttaccaagagcatgttgtggtttgatgtagaaatggaataagatacaaccattgactttgtcaactgaagttttgtaatgttgtggtttgatgtagaaatggaataagatacaacaggaacgtcaaacgtcatatcaacgtcatcgttgtggtttgatgtagaaatggaataagatacaaccgccgaaatcgttgccatcgtggataagagttgtggtttgatgtagaaatggaataagatacaacaaaggcaatgtcatcccgaacgtgcttgaagttgtggtttgatgtagaaatggaataagatacaaccggtcaaattcgggagtaggatagtcagagttgtggtttgatgtagaaatggaataagatacaactaggtacgtgcgttaatgcggtctcgtagggttgtggtttgatgtagaaatggaataagatacaacgtcattgatacagaagcagtgcgagatgggttgtggtttgatgtagaaatggaataagatacaacggagagaggtatttgaattaacgtaagacggttgtggtttgatgtagaaatggaataagatacaacaacgcatgaacgctccctcacccgaatatagttgtggtttgatgtagaaatggaataagatacaacggtgcggccgcagctcggacatgagatgtgttgtggtttgatgtagaaatggaataagatacaactggctctgtgaagaggttgaccgcttctgggttgtggtttgatgtagaaatggaataagatacaaccctgaacgatgctatccgacaatgcaaggagttgtggtttgatgtagaaatggaataagatacaacaataggattgaggatggcagggtcaacctgttgtggtttgatgtagaaatggaataagatacaaccaatttctttgacccggtgcagtttgacagttgtggtttgatgtagaaatggaataagatacaacaaagactttctatacaacgtgcattcatagttgtggtttgatgtagaaatggaataagatacaacattcaaacataagttgctgaatttggtcaggttgtggtttgatgtagaaatggaataagatacaaccgaatcctttgatattagcggacttgctgggttgtggtttgatgtagaaatggaataagatacaacgtagcatcgaagtccttatacaatccactggttgtggtttgatgtagaaatggaataagatacaacgcatatcccacaagaatacatatccaacaggttgtggtttgatgtagaaatggaataagatacaactattatagaaagactgataagcaagcatcagttgtggtttgatgtagaaatggaataagatacaactgagagtaggcactattccattcatttgtggttgtggtttgatgtagaaatggaataagatacaacttcctgtccaattgtccatcatgtaaatgggttgtggtttgatgtagaaatggaataagatacaaccgctgggtcttgttcgccttaaaatcgtcgttgtggtttgatgtagaaatggaataagatacaacagaagaaagtaataaaaggctatggcaaaagttgtggtttgatgtagaaatggaataagatacaacttcttgtgagatttacgcgggaggtgtaggggattgatgctcttgccactgacgtttatttgtcgtaactttgcacggtcatcaatatcgatatggcaaagaagaagtatcagaaaagaaacagcaccgcgcgtcacgtgaggtgacagctgccgtgattgttgtggcggttatcgtggctgtgtggtggtttataggacatgcgaaggagttgggcttcaagcgtgttgagagtggtgcgcccgccagcaatgtcgatgtagaggcgcttatggaagtgaatgctccagaggggttgcggcagcagattgttgcgtatgagggctacaccgcgtcgttcaacgccgacctgcgtattcccaactatgttgtctacgaactcacacgtttcgagactcagggcgcagagcagcgtcacgacaagtttatgtgcgacaccgacgttgagggctgtccgactaccgacgactataagggttcgggctacgaccgcggtcatatggctcccgctgccgatatgaaatggagcaagaaggcgatgcaggagtcgttttttctgacaaatatatgtccgcagaaccattcgctcaacagcggcgggtggaagcgtctggaggagaaagtgcgcctgtgggcagaccgcgacagtgcagtcattgtagtttccgggccaatcgtgcaaggccacatcaaccgtttggaaagcggagtggctgtgcctaccggatttttcaaggtgctgctcgctccgtttgccacaccgaagcgcgccatcgcattcatctacaagaacgaaggcggacaaaaggtgattgagcggcaggcagtaagcgtagacgaggtggaggctctcacggggcttgacttcttttcttcgctgcccgacgaggaggaaaatgaaatagaaaaaacttgtgattattacgaatggaacaattagacatcaaccagcataacgacgacacaatatgcgccgtgtcgacaccggcgggggggggggggaga

SEQ ID NO: 4577 - DNA, 6623 bp, synthetic construct
  source 1..6623: mol_type = other DNA
  misc_feature 1..6623: note = Synthetic
ggttgccggtaaggcacaattcgtcaacgtgattgaaggtgttacttaccgcaaggaaaccgacgagacatcgggcttgcacgaaaagattatcatagagtcgaaagaccgcaccaaggtgccggaggtcaacatcgttgacgccaacggacaggtgctgaaaacatattcattccctgtcaacgcccaccttatgattgaggacggcgatgaaatcaaggcaggcaggtgtttatgaagacaccgcgcgcatctggtaacgcaggtgatatcaccggtggtcttccacgtgtcactgagctcttcgaggcacgcaacccgtctaacccagccatcgtttcagaaattgacggcgaggttatgttcggaaaaatcaagcgtggtaaccgcgaaatcagcgtgacatcgaagattggcgaagtgaagaaatatctcgtgccgttgtcgaagcaaatcctcgtacaggaaaacgactacgtgcgcgccggcacaccgctttcagacggtgcgatcactcttcagacattcttaacatcaagggcccgacagccgttcaggaatacatcgtcaacgaggttcaggacgtctatcgcatgcagggtgtgaaaatcaacgacaagcactttgaggtgattgtgcgtcagatgatgcgcaaggtctgcatccttgatccgggcgacacccgcttccttgagtcgcaggttgtcgacaagcgcgactttatggatgagaacgaccgcatttggggcaagaaggtggttaccgacgccggtgactcacagaatctccaggctggtcaaattatcacagcgcgcaagctccgcgacgagaaccagctttgaagcgcaaggacttgaatctcgtacaggtgcgcgatgccgttccggcaacgtccgaccagatgcttcagggttcacccgcgcagcattgcagacttcaagcttcatgtcggcggcttccttccaggaaaccacgaaggtgctcaacgaggcagcaatcaacggcaagaccgacaatctggagggcatgaaggagaacgttatctgcggtcacttgattccagccggaacaggtctgcgcgactacaactcgcttgttgtaggaagcaaggaagactttgaatatctcgacaagagtctcgacgcccgtcttgaggctgaagcggctgaagacgctgccaaaatcaagaaggctgaagagaaaggcaaataaagaaactgattgaaaaaactgacaataaagatagcccggcgattggttcgtcgggctatctttttaatgagtggacaaacaaaaagcctccacggaaagtacgcggaggcataggatttatatccttcggcatatagccttattgtgataagatgtagaaataatcttatgttgcaaatttctacagaataattgatatttccaaataaatttcgctaaatttacggaatattgaaaaaaccgaaacaaaaaacgatatgaaaagagtatttggaatagatttgggaaccaattcaataggatggtcaatagtagagcagttggaaaatggaaaatacagacatataaaatctggtgttgacatttttaaggatggagtggatcacgataaatcaggagagcatccatgtgtgcaattacgaactaatgcgagaggattgcgccgacattattttcgccgtcgtttacataaaatagagttgcttaaaatattgatagaggaaagaatgtgcccgccgttgacagatgaagatcttaaacggtggcggtttaagaaaatctaccctaaagaagacaactttatggaatggcagcgcacaaacgacaatttggagaaaaatccgtatcatgatcgatatgttgcgttgacacgaaaacttgatttgtcgatagagagcgatagatatatacttggcagggcattttaccacttgtcgcagcgcagaggattcttgagcaatcgtaaagattcaacgaaagagcaagaaggagaggtcaaggctgctatatctgaattgtcagataaaattaaagaggcaggatgtagttatctttgtgagtatttctacaaattgtatcaggctggggataaaatacgagggcattatacggctcgcaatgagcattatctgaaggaatttcaggcaatttgcgacaagcagagcctcggggctgatttgtgcaagcatttgaataatgcaattttttaccagcgacctctgaagtctcagaaaggaaatattgggcgatgtacgtttgaacttggcaagcaaagatgttcgacatcgcatccagcttatgaagagtaccgcatgttgtgttttataaataatatccgtttgcatcgtcaaggggaggattctgatttccgtgtgcttacaaaagaggaggttggcgcaataattcccaaatttgtatgcaagtcgcaatttaaatttgaaaaattggcaaaggtgttggctcataaaaaagagaattatgggttcaagtatgattctgatgaaagtactcttaaatttaattatcgaaaagaaacaagcattgctggcagcccggtgactgctggattgaaagaaatattcggagaagaatggaaatcggaaatctgtagtgtgtatatgaagtcggaaggaaagacagaggaccggataatcgatgatgtgtggcatgtgctctattcttttgacaatgatgaaaacatccgggattgggcaaaaaagaatctgcagcttgatgatgaacaggcagaaaagtttgctaaaatcaaaatcgaacgtgattatgcatcgttgagcctgaatgctatccgaaagattctgccatatctgcgacgtggcttgcgttatgatgaggctgtgttctgtgcaaatattccggcggcgcttgggaatgtagaagatgttgatgaatataggaaaattgaggatgacgtagtcgcatgtgtgcgaaatttcaaaagctgtgaagtggcgggtagaaaaaatacattggaaaaagaagtggcagaattgtggaggagaagtatggcgtagacaaacgtcatcttggaaagatttatcatccgtcaaaaacagaaacttatccaactgcacagcccgacaataacggtctgcggttgcttggctcgcctcgaacggcatccgtgcgcaacccaatggctatgcgggcgttgtttagattgcggcgttgacaaacgagttgcttaaaaagggagaaattaattcagaaacggttgtcaatattgagtttgcaaggggattgaatgatgccaatatgcgcaaggcaatagaaaattatcagcgggaaattgctgataggcatcagaaatatgctaaggaaataaaagattgttatttaaaagaaactggaaaaaatattgagccaacagaaaatgagattctgaaatatcaactttgggaggaacagaatcatcagtgtttatatacaggcaagatgataagtgtcgctgattttatcggggctaatccaaagtttgatattgagcacactttgccacgagctgctggcggtgatgactctcaggtcaacaagacactttgtgacagccgtttcaaccgagaagtgaagaaggcacatttgccatcggaattggcgaatcatgcagaaatattgttgaaggcaaaaaatctgtggcaaaagaaaatttatgagttgaccaagcagatagaagggactaaaggttatgccgccgataagaatgcaaaagacggtaaaattcagcgcaggcatttgcttaaaatgaagcgtgattattacattggaaagttgcaacggtttgagatgaaagaggttcctacagggttctctaatcgacagggtgttgatattggtattataggcaagtatgccaagttgtatctgcacaccgtgtttgacaagatttttgttgtgaaaggagctacaactgcggctttccgaaaggtttggggcttgcagtcggtgtatgagaagaaagaacgcataaatcatgtgcatcattgtgtggatgctattacgattgcatgtatcgggaaaaagcagtatgatgactggaaatgttatcaggaggcggaagatatgtattatcgaggagaaactgggcgtccgtcaatggacaaaccgtggtctacattcacagaggatgtaaagcagctgacagagggcttgctgattcatcattatgtgcccgacaatgctggaaaagcatcgaaaaagaagttgcgcgtccgtggtcgcattcagcgtaatgccgaagggcgggtgctgtatgctactggcgattgcgcacgtttgtcattgcatcagcaaactttctatggggcgattaaacaggatgatgagatacggtatgtggtgaggaaaccgttggattcccttgagaagaaagatatagaaaagattgtagacccagaggtccggcagaaagttaaagaggctgttgacgccaaaggtatgaaagatgctgtagctgacggaatttggatgaatgaagaaaaaagaattccaataaaaaaagtgcgtatatacacatcaattgctaatcctttgcgattgaagcgtcaacgagatttgtcggtgcatgactacaaacgagattattatgttgccaatgatggtaattattgtatgggaatttatgagggaaccgatgcaaagggcaaaaagaagaagacgtttaagatagtcaacaatatggatgctgcaaactattttaaggcaagacaacgcggcgaagatgtggaattgttgccaatgtcggatggtaatgatttcccattgaaatgtgttcttaagacgggctctgtggtgctcttctatcaagacactccaaaagagttgaaagaatgctcaaagaaagagcttgcgaaaagattgtaccgcgttgtgggaatgtcggagatgagaataactcgtaaaaaagggaaaatagactgttatggaatgctctctttgactttccaccaagaggcccgtccgagcattgacctgaaagataaaaatggggagtggagaattggggaggatgtgcgacccaaaattaagttaacgcataatcaaacgaatttccttgtagaaggaattgatttcagattgacattgtcaggagatgtggaatggctaaaataaaaaattatgcttaagcgggcactgtttttcactcagccgtttatgctagtcttcgcaattgtcaaatggtgatatgcactcgggagatgccgcaagaaaagcgaaccataccgatagaagatataggttatgtaattcttgaacatccgcagattagtgtttcgttgccgttgctcaacgctttgtctgataataatgtctctgtcatattttgtggagacaatcgtatgcctaatgcaatgttgcttaaccttgactctaacgcaacgcagggggagagtttccggaatcaggttgaggtgtcgcctgcgttgaaacgcaatctctggcaacaggtggttgtggcaaaaattcgcaatcaagcagctttgttgacaaagttgggaaaggatggcgatttgttgcgtccgttgtggcagaacgttaaaagtggagattctgacaatagggaaggggtggcatcaaaaatttattgggcagaaatgtttgggcgttcgtttgtgcgttcgcgagagggaacaggattgaacccattgcttaactatggctacactattcttcgtgctgctacggccagggcattgatgggttccggtttgctccctgcgtttggtattttccatcgcaatcgttacaatgcgtttcctctggcagacgatatgatggagccattccgaccatatgtcgatgagattgtttatgagatgatggaggctgggatggttgaattgaataaggaggccaaagggaaattgataggattgctctttgttgatacttacttcccaaaagtgacgcggcctcttgatatagcgttgacaatggcgaccgcttcgttggcaaaatgtgttgcaggggattgtaagaaattaaaatttccgataatgaaatgacagagtttagacttaatgcttatcacattatgtggctgtttgtcttttttgatttgccaaccaatactaagaagcagcgtaaaaatgcggcttctttcaggaaaatgcttgaaaaagatggattcacgatgatgcaattttctgtttacatacgtcattgtgcatctaaagaaagccgtgatgtacatgtgaaaagggttaagtcattcattcctccggaaggaaaggtgagtatactctcagtaacagatcgccaatatggtgacattcataacttttggggaatggtggaggaggaaaaagaaaggcgaccgattcctcaacagttagaaattttttgagttctttgaaatttggatgaaaacgtataattttgttatgtgattaagaagaaaccgttattgatgaatctttagcgagtttttttaaattttctcatcaaactacagcattccgttgaaaatgagaatgtgatttaggtgataatgtgcttgaaaatagcgtcttatgcgccataggttgtggtttgatgtagaaatggaataagatacaaccggcattccggagaaatcaaggttacgaacgttgtggtttgatgtagaaatggaataa

SEQ ID NO: 4578 - DNA, 6049 bp, synthetic construct
  misc_feature 1..6049: note = Synthetic
  source 1..6049: mol_type = other DNA
ttttctaccaacggccgctgaaatcgcagaagggatcggtcggccgatgcacgttcgaaaaggacaaaagccgatgcccggcatcgcatccgcggttcgaagagttccggatgctctccttcatcaaccacatccggctcccgacgcccgacgacccggaacctcgtccgctctcgcgacaggaaaccgaaacgatcctaccgcttttcacgcgcaaaaccaaaccgcacttcgatttcgaggagatcgccaagaagctcgccggcaaaggccgatacgcctgccaaggcgaccgcggcgaggcgccctatcgctttaacttcgcgcggaccgctaccgttacgggatgcccggtcacagcttccctcattgcgctgttcggcgacgactatctgacgaaaatatgcgacctgtatacgctcggggccggaaagacccgagaacagatactcggcgacgtatggcacgcgctcttctcgttcgacgacgaagaacggcttagcgcgtgggcaaagcagaaactgcgcctctccgacgacgaggccggacgcttcgccgcctgccgcaggactacgccgcgctgagcctccatgccattaacaagattctgccctacctgcgtgaaggttatcgctatgacgaggcggttttcgtcgccaacctcaaggcggtgctgccttcggacatctactccgacgaatcggaacgaagcgctatcgaagccgacatcaccgcgctgataaccgatttccgacggaatccgctgaacaggggaacgaccaaggagcaatgcgtccgcgactatctgcgcaactgccggggcatcgacgaaaaacgcctcgggcgcctctatcatccgtcgatgatcgaaatctatcagacggcgcagcccgatgcgcagggcgtcctgcaactgggctcgccccgaacgccggcagtacgcaatccgatggcgatgcgggcattgttccgcttgagggtcttggtcaaccggttgctgcgcgacgggaaaatcgatcgcgaaacgaagattcacatcgagttcgcccgaggactcaacgatgccaaccgccgcaaggctatcgagctgtaccagcgcgaccgcgaggccgagcgcaaagcgtacgccgacgaaatccgccgacagtacgcctcggaatcgggccgggagatcgaacccaccgacgacgacatcctgaagtaccgtctgtggaaggagcagaaccacatttgcccctatacgggcaaacagatcggcctgtccgacttcatgggcgattccgcgcgtttcgatatcgagcataccgtcccccgagcgaggggaggcgacaactcgcagatgaacaagaccctctgcgagagccgcttcaaccgcgaactcaagcgcgacaagcttccgtccgaactcccgaatcacgccgacgtcatggcacggatcgaagagctcgggtggccggagaaaattgccggcctgcaaaaacagatcgagatacagagacgcaagagcaaaagcgctacgaccaaatcggaaaaggacggagccatacagcgccgccacgtcctgcaaatgcagctcgactactggcgcggcaagtacgagcgcttcacgatgacggaagttcccgacgggttcagcaaccggcagggggtcgatatcggtattatcggcaagtacgcgcgactttatctgaagacggtcttcgagcgaatctgtacggtcaaaggcgccaccacggccgaattccgccgaatgtggggattgcaggaggaatatgcccggaaagagcgcgtgaaccacacgcatcactgcctcgacgcgatcgtcatcgcctgcatcggccgcaacgaatacgaccgttgggcgcagtacgcgggcgacgaagagcgttacagacggggcgaaggagcgaaaccccgcttcgaaaagccgtggccgacttttaccgaagacctcgaggccgtcgccgacaggcttctcgtcgcgcatcatacgcccgacaatatgcccaagcaaagtcgcaagcggctgcgcatccggggcaggatacggaccggcaggaacggcgagacgctctatgcgcagggcgatacggcccggggagccttgcatcagcagaccttttacggagccatcgagcgtcaaggagaggtgagatacgtcgtgcgcaaaccgctggggcagcttcagctggccgacgtggataatatcgtcgacgacgcagtgcggcaaaaggtcaaggaagcgatcgacgcggtcggtttcaagacggccatggacacggagagccatccgatctggatgaacgagcagaagcgggtgccgatccgcaaggtgcggatattcgcgggcaaaaatatatctcccaaatccttgggcggaaagaagcaccgggacctgtccgctcttccgcacaaaagaccggtttacgtatcgtacggcagcaactattgcatggccgtatacgaaggggaggacaaacggggaaagctcaagcggactttcgaaatcgtcagcacgctggaagcggcgcagtatttcaaggcgagcgcggacaaggcggcgcgacccgatctcgtcccgcatttgaaatatataaattgggaacaatcctattaaatagaaaatcaaagaaaaataaagcattatacactaatattcaatatattataaacacgcacttagttaattctatttaatcggattgaaataaattcgggatgattgggaacaatttgggaacaatttatatatttgtaccgttactaaaaatcccgattatgaaagcaacagcctttatccgaaaatccgcaagtaaaaacgacaccaatagtgtagctacaatctatttccgattaagagatggtaaaaaggacattaaagctgccagtgagctgacaattaacccaaatcactggagtagcgagaagcaaggttataaagacagagtagcccttgttcatgaagaaaagaaactggcactgaacaacgaagtacagaacatcatcaacctgataagtcaagagtacacaccggaagctgacagcgaatggctaagcacactcatagacaaatatcatcatccaaacagatataaaacagaagaagagattgcagcggaaaccaaacccaccttgctggatttgtttgctgaatttcttgtcaagcataaattatcagaagttcgcatcaagaactttcgagtagtacaacgtgcgttagcacgttatgaactatatgtaagggcaacgaagagaggacaaaagggctttatccttgacgtggatttggtaacacctgacacgcttcgggatatgtgggatttctttcagaacgaataccagtactatgaactttacccgagcatttatgaagccattcccgaaaagaggacaccacagcccagaagcaagaacacgctgatagactgtttttcaagaatacgcacattcttcttgtggtgcttcgataacaagcgtaccacaaacagacctttcgacaaattcccgatagaagaatgtacatacggtacaccttattatataacacttgaagagagagatagaattttcaatgccgacctttcagctaccccacagctggcaatacagagagatatattcatatttcagacactgataggatgtcgggtgagcgacctgtaccgaatgaccaaactaaatgtggtcaatgaagccatagaatatattcccaagaaaaccaaagaggggaatccagttacggtacgtgttccacttaacgacaaagcgaaagaaatccttgaacgctacaaagaatatgaggggaaactgttgccgttcatatccgaacaaaagtacaatgacgccataaaaaagatattcaagttggctggagttgaccgcatcgtaacaatcttagatccgttgacgcacaacgaaatcaaacgaccgatttatgaagtggcaagcagccacttggcaagacgtacttttatcggcaatatctataaaaaagtgaaagacccgaaccttgtttccgcactgtcgggacacaaggagggaagcaaggctttcagacgatacagggatattgacgaagaaatgaagaaagaccttgtaaaactattagactgatacttgtatgggacaacaagaatatgacaatttcaaaagactgataaaggaatggctcgacagccatccggatgaatatgctgatttcgtagaagaaatgaacgacaagaagttcaaagggttcttcaatattttcaatacggctgtaaggcttgttccgaaatataaagaagcagcacgcaagagaataggcgatgatagaaaccctgatttcgaggaactggaaaatgttcttttacaatcagaccttgccgagaaaatagtgaatgaatttcataccccgaataagagaagcattgttcctgccatgcttgcatggctctattacggacgaagctatgagtgcatggtggaacagggtgaggaactgaccaaaaaaaaggatattcccaccttatacaaatggcttgtttccggcatggtcaaattcattatcagaaaaagcatcgccaatagcatgagaaccaaagaggactggcaagtattcaggaagcaacagaaagccattgaggaaaactctcttgtggaatgggcaatagaagaagatgaagacatggacgaggaagaaacagatatgttgcaggaagaacagccaaagaccgcaggacgcaaagccgacacacgcacgttgccagaacttctgatagaaaggcatgacatactgattgaaagaattggcacacgattgaaaacccatgctacggaaacagatatagcacgactgtttatcgcactggtggaataccgattcatgcggaagtgtcccatcaagactttcagaaacgcactgtacaagcagttcaaggaacaagaaatcgtccacgaaagaggcgtccagaaagcatacagaaatctcacttctccgtttgaaaacagcaagaaactggtaaaagacattggtgaagaccatgaagccatcgaggaattgaaagcctatctatccaattgaagttcgtttaattcgcttttcgtttttacgaatttaacgaattgaatatcattgttttacggttgattttcattatatatttgcgccactatcctaatcggggtagtggcttttcgtttataatactgccgaaacgggaagtcttacaaccggcagtttcaagaagcctatgacagacatattggcaattatccaaaacgggaacggcaacatcaagttggaagttacaggagaagatttgctattattctccaaccagttaatcagccgtgcgaaacatgaactttctaccgccattgcggaggcaagaaaggagaagtacctcaccaaagaggaggtgaaaaagatgtgcggtgtttgtgataccacactctggcactggtctaagaaaaactatctgaagcctgtaaaggttggcaacaaggtcagataccgccaatccgacattcagagaattttaggtgaacacaaccctttaatctaagcctatgaaggaggaagaatatatgcgcgtaggaacaactttgtacaaggtggtcaatcagccatgcgccaatggcggttatgaaaagaaacgtgtcgtatggaacaacagcacattacggcaggactatggaaagaattatcttgccaccgtccccaagtatgacggcttttgcactgttcccaatcatctgaactaccaaaaggagattgaggggtttctaaacctttacgagccgatagagcataaaccgcaacagggggacttctcccacatccaatccttgatacggcacatcttcggggaacaatacgagctgggtatggactatatgcaactgctgtatctacagccgacacagaagctacccattgtcctacttgtttcagaggaacgcaacactggcaaaagcacgttcttgaactttctgaaagccgtgtttgagaataatgtgactttcaacaccaacgaggatttccgcagccagttcaattccgactggg

SEQ ID NO: 4579 - DNA, 5744 bp, synthetic construct
  misc_feature 1..5744: note = Synthetic
  source 1..5744: mol_type = other DNA
cacttttaatgttggggtcttgggttcgagccccaagcggatcacaccaagaaaaagaggcttatcctgcgataagcctcttttttcgttgatagacctatattcgcctccacttgatcagtgcggcatcagtttatcacagtcggccgactcgcaaagcagacgaaacactacgaccaagtcgcgacttttcaaatacgattgcgccgcctaaacgtatggccctatccgaaacgaacaggaacaagtttgggcggcgcaatcgtaaatatgcagctgctttaagcgtaggcattcttaagcggaaatcatatgcacgtctgtcgtatcaagactaacttacgcctcgatacagccttttattttactaaggtagcgcgaacgatgcgcaagcctatcataggcaaacaagcaacagatttacggaaacgaaaaaaaagaagcctctccgaagagaggccatgggaataaaatccttcggcatatagccttattgtgatatgatgtagaatatcctttttctgaggcaaatttaagaatttcatttgtacatgccaaatttttggtctatttttacagaaaatttacaaacttaccttatgaaaacccgaatattaggtctcgataccggtaccaacagcttaggttgggcagttgtagatcgcgatgaaaacaaccaatatacgcccatctgccgcggagatttaatcttcacggaaggcgtgaagcaagaaaaaggcatcgaattttctttggctgccgaaagaacttcttatcgcgcttcgcggcgccattacttccgccggcgtctgcgcaaagtagaagtgctgaaagttttggtgaagcataagttgtgcccgccgctttctgatgaagcgctcaaccgttggcatacgaaaaaagaatatccgcttgatgaggacttcatactttggcagcgcacgagcgaagctgacaataagaatccttatcacgaccgtcacatttgcttgcaccacaagttgaacttgaaagattctcagacggatcgctatacgctgggacgcgcactctatcacttgacgcagcgccgcggcttcttgagcaaccgacttgaccaaaacgaggaggcggaagagacgggcaaagtaaaatctgcgatctccgaattgagcaaagagatgaaggaggcgggatgtgagttcttgggcgattacttttacctactctaccgcacggaaggcaaccgtgtgcgcatccgttcccgctatacggaccgggaaaagcattatttgcaagagtttaaggagatctgccgcgtacaagaattggacgaggatctggcaaaagcgctggagaagacgattttctttcagcgcccgctaaaatcccagcgccaaggcgtaggcaaatgcacgatggagaaaggccattcgcgctgcgccgtctcgcatcctttatatgaggagtatcgactgctctgttatctcaacaatatccgaatcaaaacgccattcgatgatcgtttgcgtccattaaatgcggaagagcgagagaagattactcccctcttctaccaaaaaagcaacttcgacttcaaaaagattgctaaaaagctcgcaggaaaaacgccttttggctggataagagatgaggaggattggccctaccaatttaattatcgcatgacgcaagaggcgcctgcttgtcccacaactgcacaataaaggtctttggcgaagattggaaagcagcattggctgaaacttacacgatgagaaccaagcaggatgggacgttaaaaacggaagatgagatttgcacggacatttggaacgtgctctattctttttcttcaaaagaaaagctgaaggagttcgggttaaagaaactgcaactggatgaagcgcaagccaaagccttctcggaaattcgcctaacgcgcgactttgcctcgctaagtttgaaggcaatacgcaaaattctgttcttcttgcgcacaggcgaagactattcgaaggctatctttttggcaaacatcccaacaattgtcggtgaagaaatatggagtaacattgagcgacgctctcgcttgctatatgaagtcgatgtagcccttcacccgcaagaagaggacgaagcagaagagcatcgcacaatcgcagagcgcatcaaaaaggctgtagcggaagaagtgcctgatacgccgatcgatttgctgtatcacccctcaatgattgaggcctatccggacgccaagcgaaacgagcgcttcgattgctaccaactgggctctccgaagacgaatgctgtgcgcaatccgatggctatgcgctcgctgcatatggtgcgcaaagtaatcaaccacttgctgcgcaagcatatcattgatgagaagacagaaatacacattgaatatgcgcgcgaactgaacgatgccaacaagcgccaagccattgccgattggcaacgcgagctaagcaaacggcacacagcatatgcgcaaaacattaggcaactctataaagctgaaaccggcttagagattgagccaacgaagacggacatcttaaaatatcaactctgggaagagcagcaacacgtctgcttgtacacaggtaagaagattggcattgcagacttcttgggcgcgaacccgaagtttgacattgagcacacaatcccgcgcagccgaggcggcgatagtacacaggagaacttaacgctttgcgacagcaagtttaaccgcgatatcaagcgcgacaagttgcccacagaattagccaactatgaagaaatcttagcgcgcatcgagcattggaagaagcagtgctacgcgctgaagctaaaacgagacggcatccgcacgcattcgggcctggagaagagtataaaggattctaagattcgaagacgccatcttgtgggcttagaatacggctacttgaaggggaaatatgatcggtttacgatgaaagaagttcccgaaggcttcagtcggcgtcaaggtgcgggcatcggcttgatttcaaaatatgccggcctcttcttgaagtcgctctttaaggacccgaaaaacccaaatcgctccaacgtctatgtcgtcaaaggcgctattacggctgagttccgcaaactatggggcttgcagcaagccgatgaggcgaaatcgcgtgagaatcatacgcaccattgcattgatgcttacaccatcgcttgcattgggccgtgcgagtacgctgccttagctgcatattatcggagcgatgaggagttcaagtatgggaggcgccgtgaaaagccgcagtttgagaaaccttggcccacgtttacggaagacttgctgaaactgcaagaggagttgctcatcgtgcatcaaactactgacaaactgggcaagcgagatcggcgaaaggtaaagacgccgcgcgggaagttcctcacaggcggcgactccgcacgcggcaggctgcatcaagaaacgtattatggtgccatcaactacgatggcaacattaaatatgttgtcagaaagccgctggatagtttaactgaaaaggacttggataaaattgtcgatgaaacggttaaaggcattgtcaaaggcgccgtagaggcaaagggcagcttgaaagaagcccttgctgacggtatttatatgaataaggagaaggggatcttgattaagcgggtgagaatcttttccgacgtaagcgagccaattaatttaaaacagttacgtgatgtttcaaccaaagaatacaaacggcatatccacttaagaaaagatgagaactatctcttcgccatatatgaaggtatagacaagaagaagaagaataagaagcaaacagaaaccgcgactgtcgactatttagatgcggctaagttctacaaggatagcaaacgaagagacaaagcaaatagtcttgtcggtgactatagtaagaaaaacaagctcccacttaaatgcattctaaagaaaaggcaaatggttttattctatgaacacagcccggaagaaatcaggtttaaagacaaaaaggacctttccaagcgattatatatcgtaacatctattgcgaaagatgggcgcgtaaaatttctgcaccatcaagcagccactgcaacgggaatacagtcatccccaattccttttacaaatgatggagaacatcagccttattatcgtttgtctgcttctaacataaaggtcttagtagctgggattgattttgacattaacattttaggtgagatcacgccaaagctctaatagtcttatgctcaagcgcagccttgtctttatgcatccggccactttgtctttacgaaatgggcaaatggttattatcagaaaagaaattcctgatgataaccttaccgttcccattgaagacattggtttggtgatgatcaaccacgcgatggtaagcttaaccatcccccttctaaatgctttaacagagcaaaacgtggcagtcatcttctgcaatgagaaaggtatgccttcttcgatgctctacaatttgcagggcaacaccacgcagggagaaaccttacgcaaccaactcgaagccggcgaggtactcaaaaagacgctttggaaacagatcatcgaagctaaaataaagaatcaggctgcacttttaaacaagatgggcaaggagggtagcatcttaaagcccctttatacgaatgtaaaaagtggagacagcgataatcgagaaggcatcgcggccagattgtattgggccgccttgtttggccgcgatttcatccgcgatcggaacataccgggaacaaatgccctcttaaactatggctactcgatcttacgggcagccgttacgcgggccttggtttgctccggtttgtttccggcattgggcatctttcatcatcatcgcagcaatgccttccccttgtctgacgatttgatggaacctttccgaccttttgtagacgagatcgtgtttgaactaacggcccaaggcgaggcggaactaaacacagcgaccaaaagccgcctgatccgtgtgctatacgtcgacacttacttttccaaaataacacgccccctatccgtgggcttaagtatgacgatggcttccttagccaagtgctatgccaaggagcaaaagaagttggtcgtcccgttattaaaatgagtgaagtcagattaaacgcttatcatattatgtggctctttgtgatgttcgacttgcctacgatgaccaagaaagatcgcaaagcttctgccctctttcggaagcaacttgaaaaagatggcttctcaatgcatcaattcagcgtctatatccgccattgtgcctcaaaagaaagtgctgatgtacacataaagcgcgtaagatccaacttaccggcaaaaggatctgtcagcattctctccattaccgacaagcaatacgccggcatcatcaacttttggggtgcagaaagtaaaaagctaccggctacgcccctgcaattagaactattttagtacttttgcccatagaaagttacacatcaacaccatttcctatacacaaaagagtccctcaagggcttccatctcaatggattatctcatataggttgtggtttgatgtagaagaaggatataacacaacccaaaaatcattctacctttgcactcgcttaacggcaattaggtagatccgctagctcagctggtagagcacaacacttttaatgttggggtcttgggttcgagccccaagcggatcacaccaagaaaa

SEQ ID NO: 4580 - DNA, 4855 bp, synthetic construct
  source 1..4855: mol_type = other DNA
  misc_feature 1..4855: note = Synthetic
gaacaagtagcacaccgcgccaccgaaggattttcaggttacgactttgccgatcgccgtttttgagtttttgtttcagccgtccgatcacctcgttgtagaagcggaggatccgccccgacacgatcgccagacgagcatattccgagaggatcgacctttcatcgtttctccatggacgaatctttgtttcagcaagcttcctctcggacaacactcacacccctcgaaagtttcgtccgcaatgctactgcgattgacgccgagaggcaggacatacagcaagaaagacatcagatttttaaatagacatacataaataaaaaaagtctccacggagtacgcggagacggtaggttgaaaaccttcggcctatagccttattgtggtaagatgtagaattcttacatcacaaatatagcccaaaaaatgggaaatctgcaacattttatttaattttacaagaaacaacttctttcatatggcaaaggtattgggtctggatcttggcaccaactcactgggatgggcgctcgctgacgaatatgaacaggggtatgcgctgctggacaaaggggtagaaatatttcaggagggcgttgctcgcgacaatcaaaagcgagaaaaaccggccgttcaggatcggacggatgcccgtgcactacgccgtcactatttccggcgacggcttcgcaaaatcgacttgctcagggtactcgttcgttatgacctctgtccaccattgacagaggaacaactttccacctggcgtcagaaaaaacaatatccgctcgatgaggagtttcttcgctggcagcggaccgacgacaacgaagatcgaaatccctatcacgaccgttatgtagcattgaccgagcggctcgacctcgagaatcgcgcacagcgatggctactgggacgagcattctatcatctggcacaacggcgcggattcctcagcaaccgcaaggaggccgggaatgaaaaggaagacggaacggtcaaggagagcatcaagaatctgtcggccgagatggaagcagccggatgccggtatctcggggagtacttctacgggctctaccaacataaggagcggattcgcggcaaatacacatcgcgcaacgagcactatctggccgaattcaatgccatctgtgaccgacagcaactgcccgacaaatggcgcaaggagctacatcgggcgatcttttccaacgcgacctcaagtcgcagcgagggtcggtcggccgatgtacgttcgaacctcgcaaaagccggtgtcccgtttcacacccccggttcgaggagttccgaatgtggtcgtttatcaacaacatccgggtaacgggcccggatgacggcacgccgcggccattgacacccaaggagatcgaaacgatccggccgctcttcttccggaagagcaagtcctatttcgatttcgaggagattgcccgcaggatcgccggcaaggggaaatacgcctgcagggaggagcgcatcgaagccccttaccgcttcaatttcgcccgcacgaccaccgtgtcgggttgtcccgtcacggcttcgctcatggacattttcgggaaggagtggcttcgggaaatccgcagtctctatctgctcggcgatgggaaaaccgaggaacaggtggctgaacgacatctggcatgcccttttctcgttcaaggacgaggagcgcctccgggactgggcctgtgaaaaactccagctttcggaagaacaggccaaagcgtttgcggcgatcaaacttccgcaggattatgccgccatgagcctgaatgccatcaacaagatcctaccctatctgcgttgcggctatcggtatgacgaagcagttttcctggccaacttgcgcgcggcactcccaaaggaggtctacgcagacgagaatcgccgacacaacatcgagcaggagatagcctcgttgctgctcgactacaagcggaatccgtatgacaaattcgattcgaaggagcgtcgcatcgccgactacttcagcgaccacggactcgatatgtcccgtttggaccggctgtaccatccctcgaaaatcgagacctacccggatgcaaagcccaatgccgaaggaatcatgcagctcggatccccgcggacatcggccatccgcaacccgatggccatgcgggcgctgttccggttgcgcaacctgataaacacgctgctgcgcgaaggccggatcgaccgcgacacgaagatccgcatcgaattcgcccgcgggctcaacgacgcgaaccgccgcaaggccatcgagcagtaccagcgtgagcgggaggctgaaaatcggaaattcgccgaagagatccgccgtcaatacaccgccgaaaccggccgcgaaatggaaccatcggacgacgaggtgctgaaataccgcttgtgggaggagcagcagcacatctgtccctacaccggccggcaaattcgcatttcggacttcatcggggccaatccgggtttcgacatcgaacatacgcttccgcgtgccctcggcggcgatgattctcagatgaacaagactctctgcgagaaccggttcaaccgggagaccaaacgggcaaaactgccggccgaactctccaaccatgccgaaatcatggagaggatcgaatcgttcggctggcgggagaaggtggaaagcttgcaaaagcagatcgaagcccaggtccgcaggagtaaaggtgcagctaccaagcccgaaaaggacagcgctattcaacgtcgccactatttgcaaatgcaacttgactattggcgcggaaaatacgaacggttcaccatgaccgagattcccgaaggtttcagtaaccgacagggagtcgatatcggcatcatcgggaaatatgcacggctctatctgaagacggtttttgaccggatctatacggtcaagggctccacgactgcagcgttccgcaaaatgtggggcttgcaggaggaatacatccgcaaggagcgcgtgaatcacatccaccactgcatcgacgccatcacgatcgcctgcatcggccgccgggagtacgaccgttgggcgcagtacgccggcgacgaggagcgattcaattacggtgaaagcgacaaaccccgcttcgagaagccgtggccgacctttaccgaggatgtcaaggcggtggccgacgaactgcttgtggcccaccatacgcccgacaacatgaccaaacagacacgcaagaaattgcgggttcgcggccgggtcaagctgagtgccgacggaaagccgatctatcaacagggcgatacggcccgttgccggctgcatcaggagaccttctacggagccatcaagcgagaagacgaaattcggtacgttgtgcgcaaatcgattaaactgttgcaacctaccgacatcgacaaaattgtggacgatgcagtccgggatcgcgtacggatggcaattgatgaagtcggattcaagacggcgataaatccggacgaatacacgatctggatgaaccgcgaaaagggaatccctatccgcaaggtgcgcatcttcacgcccggcgtacacccagccgattgcactaaaaaaacagcgagatctctccgacaaagagtataagcaggattatcatgttgcgaacaacggaaactactgtatggccgtctatgaaggtaaagacaaaaaatggcaagctgaaacgctcctttgaacttgtcagcaaccttgaagcagcacaatatttcaaagccagcgccgaccgggaaacttaccccgatatggtaccgcttggccgatggaacggatttccgctgaaatgcattttgaaaaccgggaatcccatggtcctgtttttatggaaaattcgccggcggaactttatgaatgttcacgcaaggagctggtaaacgactttacaaagtaacagcaatggcggcagaaggacgggtacaattcctctttcatcaggaagcccgagatcagaaaacgcttaccgccctatatggggctggaacctctcaattctgccagtccaacccgtcgccgaaattgcgcctcagcgtttccaattttaacatgttggtggaaggttatgaattttgaactgaccgtaacgggcgaaataaaattcaaaggtgatcgaccatgctgaaacggaccctgtttttttcgacaccctattgtctgagcctgcgcaacggccagatgatcatccatacgcgcgaggctcccgatcaacggaaaagcattccgatcgaggatatcggcttcgtggtgctggaggaccagcagacctccattacgttgccgctattgaatgcgctgtcggacaacaacgtggcagtaattctttgcggggagaacagcatgccgaacgccatgttgatgaatctggattccaatcgcacgcaaggagaaaattaccgtgcgcagatcgaagcaagcgaaccgctgaaaaaagggctttggaaacagatcgtcgaggccaagatccggaatcaggccgcattgctgcggaaattgggacgtaacggggataaactgaaaccctactacatgaatgtcaagagcgccgatgcggacaatcgtgaagggactgcagccaaaatctattggacagagttgttcggcagcgaattttaccgctcccgcgaaggttctccgccaaacaacctgctcaattacggctatacgatcctgcgggccgctgtagcccgtgcgatcatgggatccggactcttccctgctctgggtatcttccaccggaaccgttacaacgcctttccgttggccgacgatctgatggagccctatcgaccgtttattgacgaaatcgtataccgtctttataca

SEQ ID NO: 4581 - DNA, 4128 bp, synthetic construct
  misc_feature 1..4128: note = Synthetic
  variation 1222..1243: note = note, n is a, c, g, or t
  source 1..4128: mol_type = other DNA
aacaattgctcggtcttcatgatgcaaagataccaaatacctatgaaattatgtacatgaggagagagggttgcaactgggttttacgactgacccaaaattgaaaaggggatagaatcttctaaggctgccgaacgttccgggtataaggctatacggaaacaatattttcgacgtcgcttacgcaaaatacaggtgttgaaggtgctggttaaatatcatctttgtccttatttgagtgatgatgatttacggcagtggcatttacagaagcaatatcctaaaagcgatgagttgatgttgtggcagcgcacaagcgatgaagaggggaaaaatccttattatgatagacataaatgtctgcacgagaaattagatttaacgatagaggctgatagatatactttagggcgtgctttatatcatttaacgcaacgtcgtggttttttgagtaatcgactggataccagtgcagataataaagaagacggagtggtgaaatcgggaatttcgcagctgtcgacagaaatggaagaagcgggatgcgaatatcttggagattatttttataaactctatgataaacaaggtaacaaggtacgcatcaggcaaaggtatacagaccgtaaaaaacattaccaacatgagtttgatgctatttgtgaaaagcaagaactaagcagcgagttaatagaagatttgcaacgagccatcttctttcaacttccgcttaaatcgcaaagacacggtgtaggcaggtgtacctttgaaagaggtaaaccgcgttgtgccgattcgcatcctgattatgaagaatttagaatgctttgttttatcaacaacattcaagtaaaaggacctcacgatttagaactacgtcccttaacatacgaagaacgagagaaaattgaacatttgtttttccgtaaatcaaaacctaatttcgactttgaagacatagccaaggaattggcaggcaagaaaaattattcctggatacatgacaaagacgaacgagcttataagtttaattatagaatgacacagggcgtgccaggatgtcctactacaacacagttgaaaagcatatttggcgatgattggaagacaggtatagccgagacatatacacttattcaaaagaagaatgggagtaagagtttgcaagaaatggtggacgatgtttggaatgtgttgtattctttttcatcggttgaaaagnnnnnnnnnnnnnnnnnnnnnntcctaccattgtaggtaaagagatatggaacaacgagcagaacagaaagtatatcatggagaatgttggtgaactggttttcaattatcaacctaaacaccgcgatgtacaaggaacgattgaaatgctgattaaagattttcttgcaaacaactttgagttaccagcaggggcaactgacaaactgtaccatccttctatgatagaaacctaccctaatgcgcaacgcaacgaatttggcatactgcaattgggctcaccacgaaccaatgccataagaaatcctatggctatgcgctctctacatatcttgagacgggtggtaaatcagttgttgaaagaaaatatcattgacgaaaatacggaagtacatgttgagtacgcccgagaattgaatgatgccaataagcgaaaagcaattgcagataggcaaaaagagcaagacaaacaacacaaaaaatatgtcgatgaaataaggaagttatacaaagaagaaacaggaaaagagattgaaccaactcaaacagatgtgttaaagtttcaactttgggaggaacaaaaccaccattgtttatatacaggtgaacaaataggtatcaccgactttattgggagtaatccgaaatttgatatagagcacactattccacagagtgttggaggagacagcacacagatgaaccttacattgtgtgacaatcggtttaacagagaggtaaagaaagcgaaactaccaacagaactggcaaatcatgaagagatattgacaagaattgaaccctggaaaaacaaatatgaacagctggtaaaagaacgtgataagcaacgcacatttgctggaatggataaagcggtgaaagatataaggatacaaaaacgccataagctacaaatggaaatcgattattggcgaggaaagtatgagcgatttaccatgaccgaagtgcccgaagggttcagcaggagacagggaactggtatcggacttatttctcgttatgcagggttgtatctcaagtcgttattccatcaagcagacagtcgcaataagtcgaatgtttatgtggtaaaaggcgtggcaacagccgagtttcgtaaaatgtgggggctgcaaagtgagtatgaaaagaaatgtagagataatcattcgcaccattgtatggatgctatcaccattgcatgcatcggaaagagagagtacgatctcatggctgaatattatcgcatggaagaaacatttaggcaaggcagaggttccaaacctaaattctcaaaaccttgggctacatttacagaggatgttctcaacatatataaaaacttattggtagtacacgatactccgaacaacatgccaaagcatacaaaaaagtatgtgcagacatctaaaggaaaggtgttggctcaaggggacacggcaagaggtagtttacatcttgacacatattatggcgcaatagagcgagatggagaaataagatatgttgttcggcgaccactcagttcgtttacaaaaccagaagagcttgaaaatattgtcgatgaaaccgtgaagcgaaccattaaagaagcaatagcggacaaaaatttcaagcaggctattgcagaaccaatctatatgaatgaggataaaggcatacttattaaaaaggtaagatgttttgctaattcggtgaagcaacccatcaacatcaggcaacatcgagatttgtccaagaaagaatataaacagcagtatcatgtagtgaatgaaaataattacatgttggctatttatgagggtttggtgaaaaataaagtggttagagaatttgaaatagtaagctatatcgaggcagctaaatattataaacgaagtcaagaccgaaatattttctcgtctatagtgcctactcacagcgccaaatatggattgccacttaaaacaaaacttttaatggggcagctggtgttaatgtttgaagaaaatcctgacgaaatacaagtggataataccaaagatttagttaaaaggctctacaaggtggttggcattgaaaaagatggacgtataaaatttaaatatcatcaagaggctcgtaaagaagggttgcctatttatagcactccttataaaaacaatgatgattatgttcctattttcagacagagaataaaaaatatcaacatattagtagatggtaaagattttactatcgacattcttggtaaagtaacgcttaaagagtaagccgatatgttgaaacgaagcgttgtcttttctcatccagcaagtctttcattgaggtataaccaactggttattaccatgaaagacttgcctgatgagcgacggaccattcctatagaagatataggcttcttaatggttgacaatcccatggtctcaataagcgtaccacttataaatgcattgacagaaaataacgtgtcggtagtattttgcaatcaaaaaggcatgccaacatccatgttgtttaatttagataataacaacacacaaggtgaaactttacgcaatcaactttctgcaagtccgtctttcaataaacagctttggaaacaaataatcgaatgtaagataaaaatcaagcacaacttcttgagaaattaggtaaagaaggaaaatgtttgttcccatattataataatgtaaagagtggggatagtaccaaccgagaagggactgccgctaaactatattggacacaactatttggaaaagatttcataagagatagaactcagtctggcacaaatgcgctgctcaactatggttataccattttacgtgcggcagtaacgcgctcaatcatgtcagcaggactattccctgcattgggcatctttcatcataaccgcagtaacgcttttcctttagcaga

SEQ ID NO: 4582 - DNA, 7229 bp, synthetic construct
  misc_feature 1..7229: note = Synthetic
  source 1..7229: mol_type = other DNA
ggcgtaaaccacaagcccttcggttttgggcatcgagagaggcttgccttccagtttggccgaagcccagacgcgtgtttgtgctaaatctacgggagctaccgtgacggcaagcgccgaactggcggcatagccggcgaaagcaactagtgctaaagcggaaagcttcttaaaatcctgaccataactactcatacaaggctgagtatagtcagaatcggagccccaatccaagatttaacataacctccccggccgcccgattccgcgctcaacactccactctaaacaagatttcgattttgcctcctcacattaggcaatattttacatattggaatcctaaaaagattttttcattatttatgttgtatccatttctgattgagtggtaaactcctcctcagttctaaacatatttataacaggggaaacaggatggataaaaaactcgtttttgcattcgacgtagggacagcctctctggggctggctgcgcgtcggggaatggaaatgatcgaagctcatacgctgctattggatgaagagtatggcaaacgcgatgaacttagaaaagtaatccgggcttaccgaacccgcatggctcatcaggcacgcaatgaatatctggacaacctttgccgggaagtcggtatccctgtactcgagggacgaaaagaggagcaaaagggcgacccacgtcttgagcgggaattccccaggaaggacgatcctacccaatacaactcctacatactgcgaatcatgcttctgcggggagagaaactcgagccgtggcaagtctacaaagcgcttcactcagccattcagcggcgcggcttcgacagcaacgtcccctggaaaaacaggccctctcaaatgaaggaaaccgatgacgataaggattccaagaccgccgcgcgagcccaaaaatatgaagatgatcttcaagaagcggtcggctccaatctgaattaccactatccggcctattactccgcctatcggatgggcctctgggacccgaaaacggaccgcatcaactccagaatcacccataccgccggaggtgtccgcaacgagattatcccaaggaaactggtcgaaaaggaactgctggcgcttctgcgaaatgccgccaggcaattcccgctcctgaagggaaaggaactcactgtactttacgggccggcaggcaaggcttacgcctctttttacccagaactccgtcgggaacacagtctcaaggagggtggcgaaaacgactggcaaggagtcctggggcagaagattccccgattcgacaaccggctgccggccgcctgcgctctcattccacgcttccatgtggcacgctcggccgatatcgccgtctacgaggccaccttcctcatgaagctcaagaacatgcgcttttaccgaaccgatgaggctggccggattcaaaaagaatcttccctcagcgcaaaagaaattggagcactcctcaagaatgcgcgcgaaaaagccgacgaaatacgcaaagaagcgggtcccaaagaggcgatcgttaaaatcgccaaggcctacagtctcaacaaaacggactggaaaaactggctcaaaaaatacgccgatagattcccggcaaccgcacctgtgcccgaaactctcttccagcccgctctattgaacctcgccggacaaaaagaatcgccggcgaaaattcccgtcgggaaagaagagaaccgccccctcccgagcaatccattagtggaggctccttcggtctccggccgctcacgctatagccggcctgccgcacgcctcatccgggagctcattctctcgggcaaatcgggcgaagatttttacaaaaagaattccgggctctgcggtcaaaccggcacccttttcgaaaagttcaaaaaagaggacctcgatttcctcaagcagatcaagggcccgtgggataatatctacatcccgacgatgccgctctcgggcgactggaacgcaattcatgtccgggaagaggagctcgatgaaaaaatcgagaaactcatcggggctcagcgcaacgtcctggtcgctcaccgcatcaggcttttcaacgaacaactgcggcgaatgatcaaagctcacggcaagcccgatcagatcgctatcgagttcatccgggaagatttcctgggagaagaggccaagaaaaaactcattaaaatccagaaggataatagaaatgcctgggaacatacacgccagcaggctgcggaaaacaacattcagggcggaggcaatatccgcaagatgcgcctcctgagagagcaggtcaacgtgtgcccctatacgggcgaaacgctttcactctccgaaatcgacgagctggaaattgagcacatcgtccccagagccagaggcggctcggataaccgctgcaatatggtcgttacccgctccgctaccaatagggaaaagggcgacctcaccccctatgagtggctcacccggaaaggaacttttaaggagtattgcgaacgggtcaacgaaatggaaggtctctccaaaaagaagaagatactcctcacagccgaagatcccctcaaattcgatgaaaaatgggattctctggccgagaccgcctacattgcccgactggcgcgcgatgtggcctcaatgcgctgcggctggcagccgggagaggccggagagcgcaaactcgtccaggtcattaacggttctctcaccgcaagagtccgcgccataaacaagctcaactcactcctggccgacggagcggacaaactcgacccggataaactgatgaagaaagtccggagcaacgacaaacaccacgctctggacgccatggttctctctttcatcccggagtgggcccgcaacccgaacctcaagaagaactacaatttaccgccgggtattgatcgggagtatttcaaaaaatgcgtggcgcaggtcgtcccatacaactgcatcctcacccagtcggccctgcaggagaccttttacggcacccgactccttccggatgaatcgggtaagattcaggaaaccgtcgttacccggctcaagatttcagagctgggagtctctttgaataagttcgaccagaacaaagccaggaaagaggccgataacattttggatccggtcctcagggcgcctatcgccgaagcgcttgaaaacaaatctttcgacaaagagagctgggccgcgtggtgcgaaaatttccgccatcccaagagcgggtcacgagtcctcaaagtccgtgcccgtgcacagaagtggaagaagagcgaatatatcaacgtcgctaaggagagagaggccaagggcttccggggacagtaccggacggcacaataccaccaagggtatttaatctatcttgaaaaggataagaaaggagtcgagaaaccggccgtctggcccatctacgcctggcaatcccgcaaaaaggaagaagaaaaactcaaagccaaaaactgccatgtcattgatttcttccaggcaggctgcctcatagagctcctctgcgattacgagcatggagagatcattgtgcagccgggcaaatatattctaagaaccatacggaaagatggttggtttgtattggatagggttcagggagtgttgcctctgtccaagattgagaatatccgggagaacttccggcgagtccggaaatacccgtagagggtgttgaagccatgagccatcacctgctgcatgtctttacgcacggagctttcttgagcaaagaaaagggggttcttctcatgaagagccctcaagagaaagaaatccggcaaatgccgttggaggatatccgcgcgctcattctggccgcgaggggcatctgcctgagcaacgacctcatccggtctctgggagaggctcaggcagtgatcctgcactgcgactgccgttaccgtccggcagctattaccgtccctctgacacagaccacccggcctgaaattatcgaaaatcagaccaatcgctccctgaagctccatgagagactctggcagcggattctccgcaacaaagtgcgcaatcagatgcaaaacctcaggggactgggcaaactctctgacgagctctgggaagaaatatgcagaccgggcttcacccctgatgaatctctctgggcacggcgctactggagggaattcttctccctaatggggaacccggatgagattcgggatcaggagggcaatacccccttgaacgccatgctcaactatggatacgccgttctgcagtcactcgttcaccgggccatcgtcattcacgggatgattcccaacctgggcttccatcatgccgcacgctaccgggccgatccactggtctacgacctcatggagcccatgcgcgcctttgtggattcgatgctccgggatttctgccaaaaaaatgaacctcagaccgagaccctcccgctctgggcgcggcatatcgcttcgggcctggcccagctccgggtgaagaccccgatccggggacggcaacggctgctccatgccctggatgaatgggtaagcgcggtcgccagatgtctcgaatacaaatccattgctcattactgggagattacccttgatcaaaagtccttacaaaatgggttggatcatggtgatgtttgatctgccggtgaccgaagaggaacaaagaaaggccgccgcacaattccgaaaacaattgttggaggatggttactgtatgctcaatttctcggtctacatacgcccctgccccagctggacccgtatggcaaagcatatcgagcgcctccgatattgcgtaccggtgggcggcaatgttcatatctttttcctcaccgataaacagtggaaagactcggtgagcattattggcaaagactacagcgaaagacgcaaaatccgggaagcgccctccacggaccagctctcattctggtaacctttcccacgccctgccgagagggcgtgaacctccgcgcaaagacaaaaaaagaccggaagctacaggtgttccactgaaggaacagggctgaactcccggccaagtcagttaagacttgagtgttgaaagcaaattaccttttcctcgagaaaaagtcaaccgaaaaaaaattcggaggaacttcacccccttttattcttctcaacacccacttcgagaacttgttaggaggtaaagaccctaacaagtctcgctacacactcaagtcaaaacacccgccgaagctgggggggggcaggggggaccctaacaagtctcgctacacactcaagtcaaaacagtcgcacttctgctcgcacaccgggcgcaaccctaacaagtctcgctacacactcaagtcaaaacggtgtgactccttgggcaaggttgcgaagcaccctaacaagtctcgctacacactcaagtcaaaacgtccgactttaaaacgatgtcaaaatctcgaccctaacaagtctcgctacacactcaagtcaaaactaccacgtatattctgacctgtttaaaccaaccctaacaagtctcgctacacactcaagtcaaaactaaacattctctttcatattatttatttataccctaacaagtctcgctacacactcaagtcaaaacgtcatatctctctccgtaatcgcatgcagtaccctaacaagtctcgctacacactcaagtcaaaactgtctatttttttgcttttttcgaccacgtaccctaacaagtctcgctacacactcaagtcaaaacagcgggctggccatgagattcttcctttcaaccctaacaagtctcgctacacactcaagtcaaaactgtttttttgtgactgaaaacggggtctgaaaccctaacaagtctcgctacacactcaagtcaaaactattttaggagaggacttctggactttggtaccctaacaagtctcgctacacactcaagtcaaaacgaactatgaaatcgttatcgttaccggagtaccctaacaagtctcgctacacactcaagtcaaaactataatagtttacactctctttcgtctccaaccctaacaagtctcgctacacactcaagtcaaaactttttttattctgcaatttattctgaattaaccctaacaagtctcgctacacactcaagtcaaaacactttcattatgggggaccaatggcgccgcaccctaacaagtctcgctacacactcaagtcaaaacggtagcatcccaaatgtcggtattctctttaccctaacaagtctcgctacacactcaagtcaaaacacaaacaccttgagaatgaatttattgagaaaccctaacaagtctcgctacacactcaagtcaaaactactccatatagccgaggtctgagtttgttaccctaacaagtctcgctacacactcaagtcaaaacaatcggtatgattatgcgccggccaacgccaccctaacaagtctcgctacacactcaagtcaaaacgcttagaacaacttatggttgggtgggataaaccctaacaagtctcgctacacactcaagtcaaaaccacgatcgtctgttataataaattttactctaccctaacaagtctcgctacacactcaagtcaaaacgcattgtggcgaggattattcatagtactgaccctaacaagtctcgctacacactcaagtcaaaactggagtggtgcgggcgattggggattataaaccctaacaagtctcgctacacactcaagtcaaaacgatcgcccagatgctggcagctcgctcaataccctaacaagtctcgctacacactcaagtcaaaactgcagcaactttcaataattgcctatactgaccctaacaagtctcgctatacactcaagtcaaaacggtatcgtgctttttttgacatttttttagaccctaacaagtctcgctacacactcaagtcaaaaccttgccttattactacagtctattgtttccaccctaacaagtctcgctacacactcaagccaaaactgtccttgcctgattggtgttattttgtgtccattcgtggttcttccctttttcggtacgcctgtttttgaggcaatgcgtcatccgtggttctgatctcagagccaaaatcttctgtcgtggatacatcaaaagtggacaggtggatacatcaaaagtggaatttagatttgcttcatttgataagctagaagttattggtatagagagg

SEQ ID NO: 4583 - protein, 1074 aa, synthetic construct
  REGION 1..1074: note = Synthetic
MIPSTVVDYKGVFVPFPGEVGVVLGLDLGTASVGWCALEAGWDPQSKAWVPHSILGMGSRIFDPGTSGDIERGKDESRGVERRQARGMRRGLARRAGRMHTLFLALVAGGLLPIPSDPKKPLATRIFQTLKDLDGDLLVAGGDPVRLPYSLRAKAISGPLDPFALGRAFYHLGQRRGFKSNRKAARKEADEETGIVRGSIEALRRQMADQGVSTLGTLFAKHDPENHAGTGPNRIRGRYTSRNMIEAEFEIIWAEQGKHHPCLLTPELKERLHRAIFFQRPLQSADHLIGWCSLEQGRWVKVKKTHRRDGRPLEKGSLVPIYKAPRRMALAHPKAQLFRILQKVNDLKVQWNDGTVSEATPEQRQWLIGELGRGDVSFASIKSQWGIGRRGKLNLAEGAAKGLPGNRTVARIDKAVPGLWSRLDADHQEALVKALRHAEDPDAFASTLQMDWSLSKSEAALLADTALEDGYLAISRQAVEKLLPWLEQGTPYSTAVKQVYGAEPTPTPVDKLPRVIEAFPALRNPMVSRTLTELRKVVHAVIRAWGKPVAIHIELARDLKKSRDVRAAISKKIADRTKDRETAREAIRPFKADPKGRDIEKYLLWQECGGPMALCPYTGKPITLTEVFQASSPWDVEHIIPFSKSLDDSFANKTLCWAEHNRNVKRNLAPMEAYTPGVMAEILGRIENWKDGPGKIVKLQRFRQTELDGDFISSQLNDTAHASRLACQYMSLLYGGLWDQEGRRIHASKGQVTSMLRGLWELNPLLGGGEKNRQDHRHHALDALVIAVTSPGTLKALSDASKNGWEARRSRFSTFSLPWADFSKDAAAALETVTISRRVRRKLQGRIHKETIYGVEGASLIQRIRVEDLGPKDIAKIVDDSVRGRVEARLAEMRQTEPKKAFKEPKDHPHLLCRDGRHIPIHKVRIKVSGTVIPVGQDHRLRHVESDANHHMTIHEALDAKGRSIWKADVVSLFEALRRHAAGEAVIRREDGFVMSLRSGDTVQYEEEGVVKAAWVRTVKTNCQIGLASHSDARLKQEQEKVGAYFLVAPSRARELSLRKTQIDPIGLSRSSRD

SEQ ID NO: 4584 - protein, 1068 aa, synthetic construct
  REGION 1..1068: note = Synthetic
MENEKHYPGEVAYRVGLDLGSASIGWSVVQFAWDGEDWQPNGIEGLGVRIFTAGTEGNVEKGQDESRAVARRMARGARRTLARRAGRMHDLFLALVKSGLLPMPVDLNKGALAPIIDQTIKDLDRELVQQGGDSALLPYYLRTKALDHQLSPHELGRALYHLGQRRGFKSNKRADAKTASDERGKVKDGIKQEQLAMEGANVRTRGELLSRENPETKRIRGRYHARDMVEHEFNAIWTAQKAYHQDLLTEELREVIHECIFYQRPLKPVDHLVGYCSLEPGRWIQVKRNKRRDGRMLDTPRTVSIFKAPRRLALADPLAQRIRLLQRLNDLKIDHADGKTSSLNSEQRTLLLENLQNGDISFKEIRKLLGLAKQEKLNLENVSKNMIGDRTAEKMRAVLGTRWDSFTDIEKTKLVYLVLKAINISELVTTLETQWNMKPEIATSVADVDLEDGYLNFSRTACEKLRPGLEAGMSLNTIREEIYGASKPKDAIDELPIVAEAFPDLKNPVVSRVLTELRKVVKAIIKEWGLPQSFTLELTRDLKKSREARKEITKNIGERTKEREKARKALIDAGLVVNPKARDIEKYLLWAECGGPKAVCPYTGRPITLSELFAGASPWDIEHIIPYSRSLDDSFANKTLCWAEFNRTIKHNKLPMELGSEMMEGFIARIKQWPSASKEVKLRRFRKTEIDGDFITSQLNDTAYATRLAGDFLAMLYGGRYDSEQMRIKATKGQATAKLRGQWGMNKLLGGHEKNRGDHRHHAVDALVIALSTPSALKRLANASKNSYDIYRLTFDDIPMPWPNFFVDAGQALENIVISRQLKGKLSGRLHEETNYGLDKNDEAIKTARVGVESLTKKDLEKQYEKDGVGVVNPVIHSRILAQLESLGVDDPAKAFKDPNNHPFFVTKDGRQIPIHKVKLAFKATTMPVGQKYRTRHVISDSNHHMAVYETVDAKGNTKWTYEIVSLLEATRRHARGEPVVNKKPGFVMTLRAGDTIMYEKEGKLINAWVRSVAADGEVGLAVHTDAREKTEQIKDKTFLRFKINPLGKMNLRKTQIDPLGNLRICRD

SEQ ID NO: 4585 - protein, 1010 aa, synthetic construct
  REGION 1..1010: note = Synthetic
MSDSSYVLGLDLGTNSIGWACVRLNKGKPDGLLAQGVRIFEAGLEIDAYGRGTPLNTERRNARQRRRLHDRRKRRILKVRRILQEAGMLPANKPDHKDAEWKMLLARNPYRLRAKALDEQIDLKEIGLCIYQFAHRRGFLSNSKILKKDDDRGKLKDATKAFAEDMEQKGARTWGEYLSHLDPHEQRIRTNYTLREWYTSEFDLIWEKQQSFYPHVLTDDLYKRVKEALFYQRPLKSQAHLLGQCELEPGRKRAPFALLMAQEFRLLQSLNHLRVVSSTGDERLLTDEERKQALALLRSRGNQKFTTLRKVLNLRGTKFNLERGGEKTIQGNNTAAALGNLFGEAWDHFSSEQKNQIVEDRLTIGDTDALIRRMKKTWGLDSVTAEMFSETELEDGYCGFSRKALEKLLPLLERGHALMEAVQAAYPDYQKNLPRTDTLPPLENLRNPIVQRTLSELRRVVNAIIKEYGKSDKIRIELARDMKQTAKNREKSWDRMRVRERQRKEAAKKILEETGNPAPRRHEIEKVLLAEECNWECPYTGKRICMNTLLGDAPQFDIEHIIPFSRSFDNSFSNKTLCDVNYNRNVKGNKTPYESASETEHEEMVCRVKRFTGDYKEIKLDRFNTRETDSRADFIEEFSTSQLNDTRYASRLAGEYLGKLYGSEWRKHIQIAKGGTTKYLRDAWDLNRILSDGGTKSRDDHRHHAVDAVVVALTTPQTVKALSDANQRAPEHRRYAFSDMPLPWETFRQDVEQAINSITVSHKVCRKANGQLHKETFYGLIKDRKTGDTRTVLRKPLHELTDKEIKRAEIVDSSIRKLIEQKLKDLDQPPKTAFKDRNNHPFIIDKNGNKRFIHKVRVYQDAKPVKIAENRHVKLGGNHHLEIFEVIDKKGNPTWKCEVISLFDTRQRVKEKRPVIVRQDQNGNPLKFSLSIGEAVQLDWNGGRETAVVQKMSKTPNTVEYVFRKHNDARKAADIPYKETITVKSDSALFASNLQKIVITPTGLIRRAND

SEQ ID NO: 4586 - protein, 1304 aa, synthetic construct
  REGION 1..1304: note = Synthetic
VWYTLWEYYTYPLEYMSIKMEVFVENFILGLDLGTNSIGWAIIGCDENANPSRLIDANSRIFLSMMEADGKAPKNKQRRDKRLTRRQIRRHKERRDKLLEILVDQHLLPGEFHQPSDWPCLLNQKGKLPNGELKDFLASNPFLLRSEALERNLTRHEFGRVLMHLAKRRGYKSNRGIKYHALFRYIEENKIGIRYAVQGDEEQTETSEYANQHGDKKEAEETGKVWEGIRVLKRQMRSDETIGQFAVRVAHNEKWKIPRRLHTISMDETKIPTKGKSKGQGKTTAYHLHATRELYEDEFSRIWDRQAENFCHLLSQTPAQIKTLREKIEHAIFHQRPPQLQKGKVGMCTIRLKKKRAATALLESQEYLLLQDINNLKYGEVRGRGKRIQMDTHQPLSAGQRQQLLNALSDHKQVNEQNTLTWDRVREILELDASIKFNLEISSNKDKSGEQIKSGKKGITGNRTALAIARVIPEEWKVFTAAQKKSLVNDLLNIHDKVALFNRLRNHYRLPHQRCPWQFSDQQAFELATLELPAGYMKHCFEVITELLRHFRQGMIYSEAKKELEKDPKFKNQSESGQPRHLGEPPDIANPIVQKALYEIRRVVNAIIEKQGCKPKIIRIEMARDMKASKVHRAEMESRNIENRKLNEKAKEAIRDWNQHNPHQTMGLEPANIEKIKLWIEQRAKPDKESTTKIKLWQEQNHRCLYSGRYISFPQIADGEVDIDHIYPRSLSGMNNYLNKVLVFKSENLAKEQKTPWQKWGNSEKYNQIVKRAQEWYGGSDSPLKAKLYKVKNTLDETSFKEEMRKFTESQLNDTRYICVAVKNYLKTLGYTDQEIQVSRGRATADIRRLWELGNILPRAKRDQESKNEDKETDDNEIDEAEGDKTKKGKKKDRGDHRHHAIDAIITALTDRRTFADLQRRYRYYELNSSWPNAPLEKPMRADGKPWESLRHDVEQIVMNRVVSFSATRKASGGLHDEQPYGLGHYKEKMPIKKLLKSPDIIRTLPDKTPGKKLEDSNTWIADAFFRQKLLEWLVNWERAKCVKNFPPPLLPDGKPLDTVAVAHRCYVKRAPVVEALKRIENNPGKKTWVANDELRNILRNWLRQPGNSVKSAQVNPPTMPSKNGNGNPIHTVRLASVSTAMVQFKGKPQIFAKASNHHVAIFKRIGTVVERKGIFVDMLEAAKRIRKPPVVRKSPQELLALDPAVNPAEWQFEMFLCNNDMVLWDVDDPDWQQRDKIYLDEKNHHLPIYRLQKMTKGTLTFRHFSVTSTADTDNRGVLRRSPTKLRCKKIRINELGNYNICHD

SEQ ID NO: 4587 - protein, 886 aa, synthetic construct
  REGION 1..886: note = Synthetic
VENFILGLDLGTNSIGWAIIGCDENANPSRLIDANSRIFLSMMEADGKAPKNKQRRDKRLTRRQIRRHKERRDKLLEILVDQHLLPGEFHQPSDWPCLLNQKGKLPNGELKDFLASNPFLLRSEALERNLTRHEFGRVLMHLAKRRGYKSNRGIKYHALFRYIEENKIGIRYAVQGDEEQTETSEYANQHGDKKEAEETGKVWEGIRVLKRQMRSDETIGQFAVRVAHNEKWKIPRRLHTISMDETKIPTKGKSKGQGKTTAYHLHATRELYEDEFSRIWDRQAENFCHLLSQTPAQIKTLREKIEHAIFHQRPPQLQKGKVGMCTIRLKKKRAATALLESQEYLLLQDINNLKYGEVRGRGKRIQMDTHQPLSAGQRQQLLNALSDHKQVNEQNTLTWDRVREILELDASIKFNLEISSNKDKSGEQIKSGKKGITGNRTALAIARVIPEEWKVFTAAQKKSLVNDLLNIHDKVALFNRLRNHYRLPHQRCPWQFSDQQAFELATLELPAGYMKHCFEVITELLRHFRQGMIYSEAKKELEKDPKFKNQSESGQPRHLGEPPDIANPIVQKALYEIRRVVNAIIEKQGCKPKIIRIEMARDMKASKVHRAEMESRNIENRKLNEKAKEAIRDWNQHNPHQTMGLEPANIEKIKLWIEQRAKPDKESTTKIKLWQEQNHRCLYSGRYISFPQIADGEVDIDHIYPRSLSGMNNYLNKVLVFKSENLAKEQKTPWQKWGNSEKYNQIVKRAQEWYGGSDSPLKAKLYKVKNTLDETSFKEEMRKFTESQLNDTRYICVAVKNYLKTLGATPTRKSRFHVGVQLLIYAVCGNWATYCPGRKEIKKAKMRIKRLMITRLMKPRAIRQRRGRKKTVATIATMRLTPSSPP

SEQ ID NO: 4588 - protein, 1281 aa, synthetic construct
  REGION 1..1281: note = Synthetic
MENFILGLDLGTNSIGWAVIRCDQNTNPTHLIDANSRIFLSMMEADGKASKNKQRRDKRLARRQIRRHKERRDELLKILIVHHLLPCEFQQPSDWPCLLNQKGKLPNGELKDFLASNPFLLRAEALERNLTKHEFGRVLMHLAKRRGYKSNQGIKYNALFRYIEENNIDIRYTDQEDVEQAEVSGNTNQHGNKKEAEETGKVLGGIRKLKSKMETNETIGQFAVRIAQNEHWETPHRLHTISMDETKTLTKGKSKGQEKTTTYHLHATRELYEDEFSRIWNRQADNLCRLLNQTPEQVKTLIEKIEHAIFDQSPPQLQKGKVGMCSIRLKKKRAATALLESQAYLLLQDINNLEYGKVSGKGKRVQSATMQPLSAEQRQQLLNALSDHGQVDKEDRLTWDTIRKILRLDDDIKFNLEISSNKDKSGEQIKSSKKGIIGNRTALAIARIIPEEWKGISDAQKHPCKFTYPQKALVNDLLNIHDKVALFNRLRNHYRLPPQRCPWQFSDQQAFELATLELPAGYMGHCFEVITELLKHFRDGLNYSEAKKEAKLTNQLESSQPKHLGEPPNIANPIVQKALYEIRRVVNAIIEKQGCKPKIIRIEMARDMKASKTHRAEMGKRNEANRKLNEKAADAIREWNQHNPHQTIGLEHANIEKIKLWIEQRAKPDKESTTKIKLWQEQNHQCLYSGRYISFPQIADGEVDIDHIYPRSLSGMNDYLNKALAFKSENLSKGQRTPWQAWGDSEKYDLIVRRTQDWYGGNDTPLKAKLNKVMDKSDEAAFKDKMREFTEAQLNDTRYICVAVKNYLKKLGYTDQEIQVSRGRATAEIRHLWSLDTILPKTKRDQESKDTDKEPDNNEVDETESDKTEKGKKKGRGDHRHHAIDAIITALTDRRTFANLQRRYCHYELNGTWPNAPLEKPWETLRRDVERIVMNRVVSFSATRKVSGGLHDEQPYGLGHYEEKMPFKKLLKSLDIIRTLPDKTPGKKLEDGDTWIADHLLRQKLQEWLVNWECAKYVKGYPPPLLPDGKSLDTVTVARRCYVKRASVVEGLKRIENSPGKKTWIANDELRKILRIWLKQPGNSVKSAKVNPPTMPSKNGNGNPIRTVRLASVFTSMVQFKGKPQIFAKASNHHVVIFKRVLNGTIVERKGILVDRLEAAKRIRKPPVVRKSPQELLSLVPAINPSEWQFEMFLCNNDMVLWDVDDPDWQQRDKIYLDEKNQHLPIYRLQKMTEGTLTFRHFSVTSTADTGNRGVLRRSPTKLCCKKIRIDELGDYNICND

SEQ ID NO: 4589 - protein, 1083 aa, synthetic construct
  REGION 1..1083: note = Synthetic
MDKPNKGEILMKYTLGLDIGIASVGWCVINEDTHRIEDLGVRTFDKAENPKTGSSLAEPRRLARGLRRRLHRKLQRMLDVRYLLTSSKIISQDELDNLVLTKNEITPYQLRSEGLDRVLKYDEWARVLIHLANHRGFKSNSKRELKKKNDESGKMNSSIEANAALMIEKGYRTAGEMLYKDEKFIEHKRNKAGSYSMTLSRGLLEEEIKTLFECQNKYGNTGANPEIENKYLEIFNRQKHYASGNQIFNKIGNCTFEPEEKRAPKRSYTTERFNLLQNINKTTYYFEGNRLFFTPEQREILINMAYSNSTGIKYSQIRKKLELPEEASFAFINYSSRGKKDKDPENQMFIELKGFHNIKKAIVSTHGEGVWKDYLAHPDKLDIIAEGLTFYKEDNDVISYLSQAGITDGIAESILDITEISGIQHLSHKAMKKMMPFLEEGKLYNEAAELAGYNHTQPNINGEKDILLPLIPAEDIRNPVVIRSLTQTRKVLNAIIRKYGSPYMINIELAREMGKSFDERNKIEKRQTENKNEKDRLKEEIRTEYGVDPRGADLLKYRLWKEQGGFCAYSQAYLDPKKLFEPGYAEIDHIIPWSRSFDDSFNNKVLVTGEQNRIKGNQIPFEYFGNNAEDDNWLNYVGWVNANIRNHKKVYKLLKTSCDAADSRELKERSLNDTRYISSYITQFIRQNLAFAEGKEKNRVRTVNGQVTAVLRGRWGLVKNREEGDLHHALDAAVVASVTPAMIQKMTLYSKWGELYRVKEKKNYVDPETGKPIENVEFGFSDKDHFPMPWEKFRYELIARLSPNPSEGIIKLKLDTYPEDDIEKIKAVFVSRAPSRKISGPAHEDTIRSIKPLKDGEKYTLVKTDLKKVNLASLENMYGKDRDKKLYNELKTQLELSGDNPKKAFAEYIRKPTNNGKNGPIVRSIKLMVSGISGVQVNKGLAHNGSMIRVDVFMKDSKYYIVPLYVSDLVNKILPNKAIKSFTDEERWPEMDEKYRFMFSLYPNDLVYIETNKESYWGYYIKTGRASGQIVIENHDKSQNPFVLSISSCRTIKKFNIDPLGKINNVKKEVRCGMEKPVYKQTS

SEQ ID NO: 4590 - protein, 1073 aa, synthetic construct
  REGION 1..1073: note = Synthetic
MKRYILGLDMNANAIGWCAVKIDARNNPIGVIDAGVRILSPNEEAGRDPTTKASLAATRREARMQRRMQKRRKRRRNRLMHELVSSGLMPVDITERKNLEKLDPYWLRREALYSQLKKYEVGRALFHLGQRRGFKSNRIADGVSEGKGDNKEKGAIASGTEKLEKELEHSGFRTLGEYLAERHNTDKQGNNKQGKPIRFRPTVSGSTLQYDLYPTRKMVEDELNHIWNEQKKHYPQILTEELFEKIKKIIIDQRPLKPQFVGNCSIYPDEPRAPKAHPYFQRFRIMDDVSKLRLIIPGFGERHLDDIEFLNAVKLFMSNSSRVITFEKIRKALSINENFRFNFEREDRKGFETDNTARILGSKKAFGRQWRNLDIERQGEIIERLINEEDNDKLLVWLQTEFGLNEDTSKYVSRVRLPQGYASFSIKILKELIVVMENKRIKTKDPKTDRVFSRPLTYNEALNQLGHHHSNWSPNKLMDKLPYYGEVLQRHVIKKADAPNGSQESIGRVSNPTVHIAMNQLRLVINHLITEYGKPEIIAVELGRELKMNKKSKDALKQQQMKNKEQRDKNKKTLEELGIPETKDNLEKLRLYNEMPPDSRMCVYSGKPINISKLFTGEVEIDHILPRSKTLDNSFMNLVLCLRSENQYKANRPPEETWFDDDITQICSRAQNLFPKKAWRFQPGAMNRFDEQGGFLARHLKDTQYTSRLTATYLNFICPSIQTSPGRLTALVRKHWGLNSILSNNSTKNRNDHRHHALDAFVVACIDKRLVEGISKAASSSEERKLERFFCENDFPKLNSKVKSELEHILDSLIVSHRPDHGLSFKGHLPPKVTTGKLLDSLPYGKCNATIDDKEYNLQKRISLSELSDKMISRIKDKHIREMLLNDVGNLPSKEKKKIKNLLIEFGKRTGIRRVRVLDVLETKENVWTKNHTDSSQKTFSASYRKTDNHSIEIFQTLEGKWVGRGITVFDANLPDYKPQNTHPKYPNSRLVMRIHRGDLIECSFGGKLGVWKVIRLEPSANRIRLAMHNEAGSLDKRHNDEDDHFRFLIKSYSKLQEANAKYIRINPIGKHI

SEQ ID NO: 4591 - protein, 1138 aa, synthetic construct
  REGION 1..1138: note = Synthetic
MSQLVNGWTAISEHCNLGRSFQSRQFLRSLVMPAPLIRTLGLDLGTNSLGWCVLETRGEPGEGGEGRIVDAGVRIFSQTEMAGREARSNESLAVGRRMARGARRRRDRYLKRRTRLLALLTDLRLMPADASEREGLVRRTDDGEDGDVSVSVFGLRAKALERALEPHELGRVLFHLNQRRGFRSNRRTDSNDEEQGKIAEGVTRLEQAIAEEGARTYGEWLFKRRQAGLSIRARLSSDGKSYPFYPSRDALEREFDRIVAAQRPFHPEVLTADAVAALRDTIFHQRPLRPVRPGKCSYNPAEDRLPKAHPLFQAFRLLKEVNELEVVGEDQTHRKLRPEERDALVLQLRTGLNKQGKVPFSKLRRTLKLGSETRFNKESDTRKDLAGDVVHFALSQPSCFGPAWSGLPLERRAEIVERLRTEPDAAVLVDWLRTECGLSREVAGNVASVSLPQGFGRLGPSALADLADEMTHGRDENGFVLTEAAASINVYGKTNSQTDPDRKAASLLPKYQEVLERHIPPGTGGEAHPGAPEWDEVMGRISNPTVHIALNQLRRVVNRIIARHGRPDRIAVELGRDLKLTDAGRDEVNRKLGQMTREAEALSVELRDVFRVRDNGYNRMRLRLWKELNPDQPLNRVCVYCGEVIRCGAVFTGETDIDHILPYSLTLDDGRANKILCCRDCNRAKGNRAPADVPQWRGRYDEILARSAVLPKPKRWRFAEDAMERFGGEAGFVARQLTDMQYVSRLALTYLAALYDAEEADLDGVLRRHSRIRALPGRMTEMLRRKWGLNDLLTDDDRADTAKAKNRLDHRHHAVDAAVVAATSRAMIQRIQTAAGRAEAEGAERVVAEIDPPWPGFRQELRERLRTVVVSHKPDHGTVSRKGYEAGRGQTAGRLHLDTAYGPTGERDAAGNEKVVRRIPISNLQKREDLAAIRGNEHGHSELRDRLEAATDGLSGKAFQEAVQRFAETDEKFRGIRHVRIMETRSPVWITHGNGRFRKGYLPGENLRYDLWELADGTWVAEVVSLFDAHQPGYVPRMRQEHHNARKIMSLTKGDMVAYDDPKSGERVIAKVRKFDQRNKQLYLDPHYQAGNLDRLEKEKAYAPFRPMPNPLKKVRPRQVRIDETGRVFDPGPWWEKT

SEQ ID NO: 4592 - protein, 1107 aa, synthetic construct
  REGION 1..1107: note = Synthetic
MADYHTTWGFDLGTNSLGWAVIETRGEPGQGNEGRIVDSGVRIFSQAEMAGRDPQSKASLAVARREARGARRRRDRYLKRRRRLLDLLTQYGLMPVDGEAREKLVRDHEDRKGGDLSESVYALRARALDTALTPHEIGRAIFHLNQRRGFKSNRKTDRNDPEQGKIATAINALEAQMIENEARTFGEWLHMRREQGLSVRARMTADGKGYDFYPSRAALEREFDRIMQTQKRFHPKLLGDGVIADIREAVFFQRPLKPVLAGKCSYNTKETRLPKAHPLFQKFRLLKEVNELEIVGEDQQHIKLRPDQRDALVLALRTDLNKQGKIPFSKLKKQLGLGKEARFNKETDNRSDLEGDVIYFRMSRPECFGNRWADITVEDQAAITDKLRTEADYKELVRWLQLEAGLDETQAKAVVGMPVPDGFGRLGPTALAALIDAMENDTDENGHVITEAAAAKKIYGRTNSEADPNRRGTAYLPKYQEVLERHIPPGTGEADDPYDERMGRITNPTVHIALNQLRRIVNALIAKHGKPDRIAIEVGRELKLNDRQREAVNKRIGKNTKEARRRSAELTDTHKAADTGYNRLRLKLWEEINADQPLNRPCVYCGKPLSAAMVLSAETDIDHILPYSKTLDDSQANKVLCCTACNREKKNRAPADVPQWRGRYPDILARATTLPKNKQWRFAEDAMDRFGAEEGFLARQLTDMQYISRLALTYLAHLYDYEEPDLDGVFRRHARVRALPGRMTEMLRRYWSLNELLPDHNLVDIDLTRHKNRLDHRHHAIDAIVIACTSRALIQKLATAAAQAEEKGAERVVEKIAPPWESFREDVRAAVNDITVSHKPDHGTVSRAGYANGRGQTAGKLHNDTAYGLTGEKDGKGNDLVVRRILITDIRKPADIMKIRANEHGHSELRDRLWQATRGLEGKAFEEAVLDFVNNDSKFKGIRHVRIAEVESPVWIEHGPGGEHRKGYLPGGNDRYEVWEMPDGRWQAEVVTTFDAHRPDFVPRMRQAHHNARKIMSLKKGDMVAYNDPDSGRRIIAIVRKFDQRNKQLYLDPHNEAGELDKREREKTYKPLRPMPNPLKKYRPRQVRIDEIGQVFDPGPWWENRGG

SEQ ID NO: 4593 - protein, 1106 aa, synthetic construct
  REGION 1..1106: note = Synthetic
MKILTTLGLDLGTNSLGWALIETTGEPGQREQGRIVDIGARIFSQSEMAGRDPKSQTSLAVARREARGMRRRRDRYLKRRKRLLALLTDSGLMPADEDERKKLLKQTSDSAGGNLETSVYALRAKALDTVLTPYELGRVLFQLNQRRGFKSNRKTDSNDAEQGKIAEAITKLEAEMLEDDARSFGEWLHKRRLAGLSVRARMTSDGKAYSFYPSRAVLEREFDRITRKQQSFHPELLSDELVDELREAIFYQRPLRPVLPGKCSYNPAESRAPKAHPLFQTFRLLKEINELEIVDEDQQHWKLSPDQRDTLVLLLRTSLTKQGKAPFSKLRKALKLGKEMRFNKESDNRKDLDGDVVAFRLSQPECFGNTWSTLPLERQAEITEKLRTATDTEKLVDWLRFECGLDADRARNVADKPMPTGFGRLGATALATLIDEMRHGVDDKGLVITEAEAAIRAYGRTNSETDPNRLGLSILPKYQEVLERHIPPGTGEKVDEKDPAWDEAMGRITNPTVHIALNQLRRVVNALIKKHGKPDRIAIELGRDLKLNEQKRNEANKRIGENTRAAIKRSQALTETHKQTDNGYNRLRLKLWEELNPDQPLNRACIYCGNAINAEKLFNGETDVDHILPRSKTLDDSQGNKILCCTACNREKGSLPPADVPQWRDRYGEILARAIVLPKNKRWRFAQDAMARFGDEAEFLARQVTDMQYISRLALTYLAQLYDAEETDIDGVFRRHSRVRALPGRMTEMLRRNWGLNELLHDHNYTDPAKPKNRMDHRHHAIDAAVIACTSRSLIQRLASASAKAEADGAERLAGQVAEPWTDFRDELRDKVQAIVVSHKPDHGTVSRAGYDKGRGQTAGKLHNDTAYGYTGEKDSKGNELVVRRIPISSFTKPADIMLIRTNEYDHSELRDRLYGATRDLEGKAFEAAVQNFVETDVKFKGIRHARIVEPLKTIPVRDRYGRPYKGYKGDSNHRYDVWQTLDGKWKAEVVSTFDAHRPGWTSSVKVNSPAAKKVLSLQQGDCLVLDTEDGQRLCRVVKFAESGTLTLCDHNEAGPLKSRDSDKSDPFKYVYRSATSLKRDRARQVRVDEIGQVFDPGAWWEKSPD

SEQ ID NO: 4594 - protein, 1105 aa, synthetic construct
  REGION 1..1105: note = Synthetic
MTKLTTLGLDLGTNSLGWCLIETTGEPGAREEGRIVDIGVRIFSQAEMAGRDPQSKASLAVARREARGMRRRRDRYLKRRARLLDLLTESGLMPAEAEARARLLKETSDGKGGDLDTSVYALRARALDHALTPHELGRVLFQLNQRRGFKSNRKTDSNDAEQGKIAAAVTRLEERMLEDQARSFGEWLDMRRRAGLSVRARMTADGKGYDFYPSRAVLEREFDRICDRQRLFHADLLTEGLVAELREVIFHQRPLRPVLPGKCSYNPAESRLPKAHPLFQAFRLMKEVNELEIVGEDQKHQKLTPEQRDVLVLLLRTGLNKQGNAPFSKLRGKLKLGKEVRFNKESDNRKGLDGDVVHFRLSRPECFGNDWSALPLARQAEITERLRTASDRDELIVWLRTDCGLAAENARAVADTAMPEGFGRLGETALSSLLEEMTRGVDENGFVITEAEAAIRVYGRTNSQGDPNREALDRLPKYQQILERHIPPGTGGKADPKAPEWDEVMGRITNPTVHIALNQLRRVVNGVIAKHGRPNRIAIELGRELKLNEQKRQEVNKRIGANTRAAKERSAKLTETHKQPDTGYNRLRLKLWEELNPQPVNRVCIYCGKPISGNMLFNGEADVDHILPYSKTLDDGEGNKLLCCQACNREKRNRAPAEVPQWRGRYDEILARATTLPKNKQWRFAEDAMTRHGEEEGFLARQVTDMQYMSRLALTYLAALYPAEEAGIDGVFRQHSRVRALPGRMTEMLRRNWGLNDLLYDHNHAEVVKSKNRLDHRHHAIDAAVIACTSRALIQKLATASARAESEGVERVAREVRPPWPTFRDELREKVRATVVSHKPDHGTVSRTGYANGRGQTAGKLHNDTAYGYTGEKDAKGNDLVVRRVPLSHFKKPADLMAIRGNVHGHSELRDRLWEATRGTEGKAFEAAVQRFIESDEKFAGIRHVRVVEPLRTIPIRDANGRAYKGYKGDSNHRYDVWQLPGGKWKAEVVSTFDAHQPGWCSPVRAEHPTAKKVFSLQQGDCVALEGEDGRRLCRVVKFAESGKLTLCDHHEAGTLKSRDADKQDPFKYIYRSASSLRRDRARQVRIDEIGQVFDPGAWWEKTPD

SEQ ID NO: 4595 - protein, 1101 aa, synthetic construct
  REGION 1..1101: note = Synthetic
MKTLGLDLGTNSLGWAIVETRDEPTKYSEGSIVASGVRIFSQSEMAGRDPQSKASLAVARRQARGSRRRRDRYLKRRQRLVDLLVDLGLMPADKAARAELVKNHGDGKTGDLSSSVYALRARALDEALSPYEIGRAIFHLNQRRGFKSNRKADSNDPEQGVISEGMRALDEKMAEAGARTIGEWLHMRRLQGLPVRARIAPDGEGYAFYPSRGALEREFDRIMARQTLFHTDLLTDTAIRELREVVFHQRPLRPVKPGKCSYNPLEERLAKAHPLFQKFRLLKELNELEIVGEDQKHIKLTPEQRNALALQLRTSLTKQGKVPFSKLRSTLKLGREVRFNKETDNRSDLEGDVIYFRMSRPECFGNRWADLPVEMQAAITERLRTEPDYKTLMNWLKAETGLDEVHARAVADTPVPDGFGRLGQSALTALIDALENEVGEGGFVITEAEAAKRVYGRTNSEADPDRKGVDELPKYQEVLARHIPPGTGEPDDPYDDFMGRITNPTVHIALNQLRRVVNALIRTYGKPDRIAIEVGRDLKMNDRERDEVNRRIGRNTKAAIERGVKLTETFRQLDTGYNRLRLELWEDLNQKPENRVCIYCGKAIAGHMLFNGETDIDHILPYSKTLDDSKANRILCCTSCNREKKNRPPSRVPQWRSRYGEILARATTLPKNKQWRFAEDAMTRFGEEEGFLARQLTDMQYISRLALTYLAHLYDYEEVDLDGIYKRHARVRALPGRMTEMLRRQWGLNELLHDHNLIGGDVAKPKNRLDHRHHAIDAIVIACTSRALIQRLATASAAAEERGAERVVERIDPPWSGFREDVRAAVGAIVVSHKPDHGTVGREGYAKGRGQTAGKLHNDTAYGHTGEKDASGNDIVVRRIAVTDIRSPADIRKIRTNAHGHSELRDRLYEATRGLEGKAFEQAVLDFVKGDAKFRGIRHVRITEVANPVWITHGDGRHKKGYLPGGNDRFDVWELADGRWDAEVVTTFDAHRPGFVPRMRLENHNARKIMSLKKGDMIAYNDPVSGQRIIAIVRKFDQRNKQLYLDPHNEAGNLDRREKEKTYKPLRPMPNPLKKYRPRQVRIDEIGQVFDPGPWWERQDG

SEQ ID NO: 4596 - protein, 1100 aa, synthetic construct
  REGION 1..1100: note = Synthetic
MRTLGLDLGTNSLGWAIIETRGEPGEGDEGRIVECGVRIFSQAEMAGRDPQSKASLAVARREARGARRRRDRYLKRRQRLLDLLTQYGLMPADDKARAALVRDHGDGAGGDLSTSVYALRARALDKALTPHEIGRAIFHLNQRRGFKSNRKTDSNDAEQGKIATAISALDAQMMEAKARTFGEWLHMRRARGLSVRARMTADGKGYDFYPSRAALEREFDLIMRCQKRFHPKLLDDAVVDNIRDTVFFQRPLKPVKPGKCSYNPAESRLARAHPLFQKFRLLKEINELEIIGEDQRHIKLAPEQRDILVLALRTGLNKQGKMPFSKLKKQLGLGKEVRFNKETDNRTDLEGDVIHFRMTRPDCFGTRWADMPADEQAKVSEMLRTEPDHTQLVQWLRTQAGLDEARAKAVADIPIPDGFGRLGPSALAALIDAMENEVDENGFVITEAAAAKKVYGRTNSEVDPNRRGAARLPKYQDVLERHIPPGTGEPDDPYDERMGRITNPTVHIALNQLRRVVNALIARHGKPDRIAIEVGRELKLNEKQREEINRTIGRNTKAAIERGKKLVETHGQANTGYNRLRLELWEELNQKPENRVCTYCGKPIACHMLFNGESDIDHILPYSKTLDDSKANRLLCCTACNREKKNRAPADVPQWKARYPEILARAATLPKNKQWRFAEDAMARFGEEEGFLARQLIDMQYISRLALTYLASLYGAEQVDPDGVFKRHSRVRALPGRMTEMLRRQWDLNALLYDHNIAGADVTKPKNRLDHRHHAIDAVVIACTTRSLIQKLATASASAEERGAERVVERIAPPWPCFRDDLRKAVHDITVSHKPDHGTVGRAGYAKGRGQTAGKLHNDTAYGPTGQKDEKGNDLVVRRIAITDIKKPGDIMKIRANDHGHSELRDRLWEATRDLEGKAFEEAVLNFVSNDAKFKSIRHVRVVEPLKTIPIRDRKGRVYKGYKGDSNHSFDVWQGPDGKWASEVVSTFDAHQPGWQSAIRLQHPTAKKVLSLKQGDMVALDGENGRRILRVVKFSEAGSLTLADHNEAGSLKGRDADKGDPFKYVYLSASSLRKNRARQVRIDEIGQVLDPGAWWERRDG

SEQ ID NO: 4597 - protein, 1093 aa, synthetic construct
  REGION 1..1093: note = Synthetic
MKTLGIDLGTASIGWAILDEASIIASGVRIFSQSEMAGRDPQSKASLAVARRDARGARRRRDRYLKRRRRLLDLLTEHGLAPADEKSRKALVREYEDGKDGDLSNSVYALRARALDEALTPYEIGRAIFQLNQRRGFKSNRKTDSNDPEQGKIATAIHVLDAKMDEDKARTFGEWLHMRRLKGLSVRARMTADGDSYDFYPSRAALEREFDRLMASQKRFHPDLLNSSVIDDIRKVVFHQRPLKPVQPGKCSYNHRESRLPKAHPLFQKFRLLKEVNELEIVGEDQRYVKLTPAQRDVLTLALRTGLTKQGRLPFSKLRSILKLGKEVRFNKEKDNRTDLEGDVIHFRVSRPDCFGNRWAAMPVEEQAAVTEKLRTEPDYSALLDWLKNEAGLDEAHARAVADTPVPDGFGRMGPSALSALADAMEHEIDAQGFVITEAEAAKRVYGRTNSEADPGRKGVDQLPKYQEVLQRHIPPGTGEPDDPYDEYMGRITNPTVHIALNQLRRLVNALIRKYGKPNKIAIEVGRELKLNEKQRNEVNREIGQNTRAAMARGQQLVEIFKQPNTGYNRLRLELWEDLNREQPLKRLCTYCGKAIAAHMLFNGETDIDHILPYSKTLDDSKANRLLCCTPCNREKKNYAPANVLQWRDHYGEILARATALPKNKQWRFAEDAMTRYEAEGGFLARQLTDMQYISRLALTYLAHLYDYEEPDLDGVYKRHDRVRALPGRMTEMLRRQWALNELLHGHNLAGGDGAKEKNRLDHRHHAIDAIVIACTSQSLINRLSTAAGEAEERGAARVVERIDPPWPSFREDVREAVNAIVVSHKPDHGTASRSGYDKGRGQTAGKLHNDTAYGETGEKDHNGNNLVVRRIAISDIKRSADIMKIRTNAHGHSELRDRLYEATRDLEGKAFEQAVTAFVKHDAKFKGIRHVRVTEVQNPVWITHGGGKYKKGYLPGGNDRFDVWELPDGKWDAEVVTTFDAHRPDFTPRMRIEHHNARKIMSLKKGDMIAYDDPDSGKRVIAIVRKFDQRNKQLYLDPHNEAGNLDQREKEKTYKPLRPMPNPLKKYRPRQVRVDEIGQVFDPGPWWEKRSD

SEQ ID NO: 4598 - protein, 1524 aa, synthetic construct
  REGION 1..1524: note = Synthetic
MKTILGLDVGTNSIGWALIEHGPENRKGRIIGMGSRIISMGAELSNFERGQAQTKNANRRIARGARKLNKRYKQRRNKLIYALKELGMLPNQIQLVKDFFDPNKIDKISIKPIKKRQPQLTAFDLLELRVKALSEKIELKDLGRIIYKYNQLRGYAGGNAEPDKEDNNDDAEYQEKKNENYIAFARVLQLGIPEEVTIKNRKFNKRKISIETDDGILDGETYLDSLKENDSLELQVNIRRSKSGESITVKLPDKTNWRKKMENLEKELKEKSKELGREVYISEHLFDIVKENPRAKIRNNVILRSRYESEFDAIWDSQYKVNEDFKRLVDNKKLLTKILCFIFPGTSKTQEQFRAEGLEKGLKYVLKNQIIFFQRELKDQSHLISDCRFEPKEKVAPKSHPIFQEYKIWEQINKLLINTKTEVGVNRKGEQKYTYIDRPIPASLKVKLFDDLQNKKEISYGVIYNELKKKYELREKVDFLNGLNVKAKLKGNETRIMLQKSLGNYLWEALNLDAIERQTELWNILYHGKGNEYDIHSERTSRVLRFLKEYGPGIDNVEDTAIRISKIKFSRSYSNLSLKAIEKLLPLVRAGKYFDNAFSNEIHSRIVKLLNENVEDPFEKAAQEFLEKNSMVLEEGGIVNAMAVILVYGKHTAKEFTEDELVKTPTGISFIKNGSLRNPLAEQIINETLAMVKDIWRKYGGKPDEIRVELARELKSSAEERAKIYSVNQKNQKANEAVREKLIELKEELSIANIEKYKLWLSQENLQEEYIKHYSDPSKSEVEKLKLWEEQGHVSPYTGQPIPLSHLFNKARYDIDHIIPKSRYFDDSFTNKVICEKAVNTDKGNRTAMEYFETGSMTQKIFSKDDFIDHANKLFTGRKRKNLLATKVPEDPIQRQIKDTQYIAVKVREELNKIVGNENVEATSGGVTDYLRNHWGLTDKFKSMLKERYENIQPKLSEIAYNEYVKNIQTKQKEYAEKNIPFNDIVLNNELFVEKFNKEFFKKKNNKLVINGWSKRIDHRHHALDALIIACTQPPHIKRLNDLNKVLEDWLKKNKETFLPDFNGSKAELLDEVLNLDENKRKSIFKELDKFTDIQIPWQGFVEEAEEGLKQIIVSHKPKDKLLLQYDEKGNRQIKLRGQLHEGTLYGKTNGRESYRIPLLKLAGKNFATEKIIEKIVDPFLKKQIREHLNQYKGKKDEAFSAEGILDLNNKLAERRGKNDNPAPHTPVSTIKIYYKDPDKNKNANDEEIITLQKLDRSKAFNNSLYVKTGDNYLFAVMEKDYFNKKTRQTEKKRVFDLITFFDAANLLKGEFNKSSDKNTFDKDLLFKKYFEEKNQAKLLFTLKQDDFVYLPEENEDVVFDKESPLFDDFWNDSGVRSKNVYVVQKFSGKQIYFIKHTVADMIKKKVEFGSQDCYEIANGKSIKEHCFKLHVNRLGEITDIINHDEVAESFKQTQSSVVHEPEVVYQTKNVQFFDSLSEMDNEDARFMAMSSPEQHLKNATELNKNIFQEKLSHPMDKKLRFRE

SEQ ID NO: 4599 - protein, 1451 aa, synthetic construct
  REGION 1..1451: note = Synthetic
MKTILGLDLGTNSIGWALIKQDFENKKGEILGMGSRIIPMGAELSKFEQGQAQTKNANRRIARGIRKLNKRYKQRRNKLIYILQQLGMLPEQVKLVNEFSDPNKLDKISILPISKNQQQLTAFDLLELRVKALTEKIELEELGKIIYKYNQLRGYSGGNSEPEKEDNNDDESEEKEKTNESFVVFSKILSLGQPEEIPFKGKKLNKRKITIQTEDGIVEAETFLDSLKENDSLELQFNIRRAKSGDTITIKLPNKTSWRKKMENIEKQLADKSKEIGREYFISELLFDVLKENRWAKIRNNVILRSRYESEFEAVWKEQSKYYPFLESLEKDKLQKILEFIFPGQKESQEKLRQTGLEKGLKYVIKNQVVFYQRELKDQSDLISNCRFEHTEKVIAKSHPVFQEYKIWEQINKLVINTKTENGVNRKGEIRYRYIDRPIPTALKEWLYEELQSKKEVSFGPILTKLKKEFYLRENVDFLNGMNAKDKLKGNDTKAILQKTLGELWDIFGLDDAKRQIELWDILYNGKGNEYDLTSDRTSKVLAFIGKYSPELESRDATAIKISKIKFSRNYSNLSLKAIENFLPLVRAGKFFDQNFSDTLRDKIIKLLNENVEDPFEKSAQEFLDKNQDVLSDGGIVNAIATILVYDQHTTKEYSKEELIKEFTEISRLKQGELRNPLVEQIINEALIIVREIWQKYGFKPDEIRIELARELKNNAVERGKMYSANLKSQKYNAEIRSKLIELKQEISITNIEKYKLWISQENMQEAYLKNYNDPSKSEIEKLKLWESQGHISPYTGQPIPLSELFNRERYDVDHIIPQSRYFDDSLANKIICEKSINNEKGNRTSMEYFEAGSVNHQIYTKEQFIDHANKYFSGKKRKNLLATSIPEDPIQRQIKDTQYISIRIREELNKIVGNENVKTTTGGVTDYLRNHWGLTDKFKVLLKERYETVLPKLAQLEYVNYKKETESKAEEYEKAGVEFNEPILGENIFIEKFKSEFIKKKNNKLIIKGWSKRIDHRHHAMDALVIACTQPAYIKRLNDLNQVLKEWLDKNKEKFFPGFTGSKTELLDEVLNLESEKRKEIFNQLEKFRAIEMPWNGFPEEAEQKLKEIIVSHKPKDKLYVSIDKFDINNPRKKLMPQIKLRGQLHEAKNYGLKNGKETKRIQLSELFDKEKSATLGNLNKITNEFLKRIILKHYEEDYKFNNKDAFSAEGILDLNKKLSERKDEQGNSKPHPPISAIKIYYKDPAKAKKKKIDDEDDISLQRLDRQKSFNNSLYVKTGDNYLFAVMEKEVFNKKLKKNKTERHYDLITFFDAANLLKSEFNDSDDKKNFSKEDLFKKYFEERNQARLLFTLKQGDFVYLPNDTEEVIIDESSSLFTDYWRNIPERSKNIYVVQKFSGKEIYFLKHTIADTITKKIEFGSQDCYQSLNGRSIKEFCFKINSDRLGNISKA

SEQ ID NO: 4600 - protein, 1421 aa, synthetic construct
  REGION 1..1421: note = Synthetic
MKKTILGLDLGTNSIGWALIEQDFENKQGNILGMGSRIIPMGEELSKFERGQAQTKNANRRIARGIRKLNKRYKQRRNKLIYVLEKLEMLPEQIKLSEPFTDPLKLNKVSILPIQKKQKQYSALDLLELRVRALSQPISQKDLGKIIYLFNQLRGYAGGGNEPDDEKDEENETEENVRNENDSYVTVAKILSISDPEKILYQKKELNKYKVSIETEDGILEGDTFLEVLKVGETLELLVKITNSKKNGRTLSFKLPNKTNWRKKMENLEKDLTELSREKGREVYISEYFLSILKENKWAKIRDNVILRSRYQSEFDAIWKEQSKYHKILNTLSQDKLREILQFLFPGTKATQERYRQIGLEKGLYHIIRNQIIYYQRELKDQSSLISNCRFEKGEKAVATSHPIFQEYKIWEQINKLTINTKMENGKNRKGEIRYKYVDKPIPSSLKEWLFDELQDKKEIGFGVVLNKLKKEYGLRDGIDFFNGMNPKAKLKGNETKLIIKKALGNQLWDQLDLKKINKQIELWDILFNARGNEYDIESERTSKVLVFIKKSSNDISNPEQTAIQISKIKFSRNYASLSLKAIEKILPLIRCGKYFNYEFSASLKETIIRLFNENVTDPFEKAAQEYLETNLDVLTDGGIMNAYATILIYGRHTAKEYGENERINRYQEIKRLIPGELRNPLVEQLVSETLMVVKDIWKQFGKPDEIRLELARELKNNAERRAKIYKANNENQKANEEVKNLLIELKQEITLTNIEKYKIWLSQENLADEYLKQYKDPSKTEIEKMKLWREQGHISPYTGQPIPLSELFDRERYDVDHIIPQSRYFDDSFANKVICEKSVNKEKGNRTAMEYFETGSFIQTVFSKENFVNHVNNQFKNYPAKRKNLLATKVPEDPITRQMKETQYISVRVKEEINKIVGNENVKTTTGGVTDYLRNQWGVTDKFKKLLQERYERMKETLAELEYEKRKNIIQNKEAYIESFKKDLIAFKNNKLVLKGWNKRIDHRHHAIDALVIACTEPSHIKRLNDLNKELQTWLESHRNEILPNFEGSPTELLDEILNLEESKKEAIFKQIEKFKAIDMPWPGFPESAELEIKKIIISQKPKDKLLIQPNKEGKLQIKIRGPLHEETLYGKSKYIETYRIPLTKLGNKNIATEKIIEKITNDYLKTILKEHLKDFDNKKEEAFSTEGILYLNKKLAEKKNSQGKVAPHTPISSIKVFYRNPSKIKKKKGDEEPEEALQKLERSKAFNKSLFVKTGGNYLFGILEKNNERIFDIITFFDAVNILKEEFNRCPNKQTFNKDLVFKNYFEAKNGAKLLFTLKQGDPVYMPSDSEEVITDPYSPLFKPFWDDKTARSKNVHYVTKYSGKQIYFIRHNIADLIIKGKEYGSQNAYEIINGLSIKQHCLKLTIDRLGNIQPMPIM

SEQ ID NO: 4601 - protein, 1415 aa, synthetic construct
  REGION 1..1415: note = Synthetic
MKHILGLDLGTNSIGWALIERNIEEKYGKIIGMGSRIVPMGAELSKFEQGQAQTKNADRRTNRGARRLNKRYKQRRNKLIYILQKLDMLPSQIKLKEDFSDPNKIDKITILSISKKQEQLTVFDLVSLRVKALTEKVGLEDLGKIIYKYNQLRGYAGGSLEPEKEDIFDEEQSKDKKNKSFIAFSKIVFLGEPQEEIFKNKKLNRRAIIVETEEENFEGSTFLENIKVGDSLELLINISASKSGDTITIKLPNKTNWRKKMENIENQLKEKSKEMGREFYISEFLLELLKENRWAKIRNNTILRARYESEFEAIWNEQVKHYPFLENLDKKTLIEIVSFIFPGEKESQKKYRELGLEKGLKYIIKNQVVFYQRELKDQSHLISDCRYEPNEKAIAKSHPVFQEYKVWEQINKLIVNTKIEAGTNRKGEKKYKYIDRPIPTALKEWIFEELQNKKEITFSAIFKKLKAEFDLREGIDFLNGMNPKDKLKGNETKLQLQKSLGKLWDVLGLDSINRQIELWNILYNEKGNEYDLTSDRTSKVLEFINKYGNNIVDDNAEEIAIKISKIKFARAYSSLSLKAIERILPLVRAGKYFNNDFSQQLQSKILKLLNENVEDPFAKAAQTYLDNNQSVLSEGGVGNSIATILVYDKHTAKEYSHDELYKSYKEINLLKQGDLRNPLVEQIINEALVLIRDIWKNYGIKPNEIRVELARDLKNSAKERATIHKRNKDNQTINNKIKETLVKNKKELSLANIEKVKLWEAQRHLSPYTGQPIPLSDLFDKEKYDVDHIIPISRYFDDSFTNKVISEKSVNQEKANRTAMEYFEVGSLKYSIFTKEQFIAHVNEYFSGVKRKNLLATSIPEDPVQRQIKDTQYIAIRVKEELNKIVGNENVKTTTGSITDYLRNHWGLTDKFKLLLKERYEALLESEKFLESEYDNYKKDFDSRKKEYEEKEILFEDQELTKEEFIKEYKENYIRYKKNKLIIKGWSKRIDHRHHAIDALIVACTEPAHIKRLNDLNKVLQDWLVKHKSEFMPNFEGSNSELLEEILSLPEKDRREIFTQIDKFRAIEMPWKGFPEQVEQKLKEIIISHKPKDKLLLQYNKAGDRQIKLRGQLHEGTLYGISQGKEAYRIPLTKFSGKKFATEKNIQKIVSPFLSGFIANHLKEYNNKKEEAFSAEGIMDLNNKLAQYRNEKGELKPHTPISTVKIYYKDPSKNKKKKDEEDLSLQKLDREKAFNEKLYVKTGDNYLFAVMEGEIKTKKTSQIKRLYDIISFFDATNFLKEEFRNAPDKKTFDKDLLFRQYFEERNKAKLLFTLKQGDFVYLPNENEEVILDKESPLYNQYWGDLKERGKNIYVVQKFSKKQIYFIKHTIADIIKKDVEFGSQNCYETVEGRSIKENCFKLEIDRLGNIVKVIKR

SEQ ID NO: 4602 - protein, 1115 aa, synthetic construct
  REGION 1..1115: note = Synthetic
MKHILGLDLGTNSIGWALIERNIEEKYGKIIGMGSRIVPMGAELSKFEQGQAQTKNADRRTNRGARRLNKRYKQRRNKLIYILQKLDMLPSQIKLKEDFSDPNKIDKITILPISKKQEQLTAFDLVSLRVKALTEKVGLEDLGKIIYKYNQLRGYAGGSLEPEKEDIFDEEQSKDKKNKSFIAFSKIVFLGEPQEEIFKNKKLNRRAIIVETEEGNFEGSTFLENIKVGDSLELLINISASKSGDTITIKLPNKTNWRKKMENIENQLKEKSKEMGREFYISEFLLELLKENRWAKIRNNTILRARYESEFEAIWNEQVKHYPFLENLDKKTLIEIVSFIFPGEKESQKKYRELGLEKGLKYIIKNQVVFYQRELKDQSHLISDCRYEPNEKAIAKSHPVFQEYKVWEQINKLIVNTKIEAGTNRKGEKKYKYIDRPIPTALKEWIFEELQNKKEITFSAIFKKLKAEFDLREGIDFLNGMNPKDKLKGNETKLQLQKSLGKLWDVLGLDSINRQIELWNILYNEKGNEYDLTSDRTSKVLEFINKYGNNIVDDNAEEIAIKISKIKFARAYSSLSLKAIERILPLVRAGKYFNNDFSQQLQSKILKLLNENVEDPFAKAAQTYLDNNQSVLSEGGVGNSIATILVYDKHTAKEYSHDELYKSYKEINLLKQGDLRNPLVEQIINEALVLIRDIWKNYGIKPNEIRVELARDLKNSAKERATIHKRNKDNQTINNKIKETLVKNKKELSLANIEKVKLWEAQRHLSPYTGQPIPLSDLFDKEKYDVDHIIPISRYFDDSFTNKVISEKSVNQEKANRTAMEYFQVGSLKYSIFTKEQFIAHVNEYFSGVKRKNLLATSIPEDPVQRQIKDTQYIAIRVKEELNKIVGNENVKTTTGSITDYLRNHWGLTDKFKLLLKERYEALLESEKFLESEYDNYKKDFDSRKKEYEEKEILFEDQELTKEEFIKEYKENYIRYKKNKLIIKGWSKRIDHRHHAIDALIVACTEPAHIKRLNDLNKVLQDWLVKHKSEFMPNFEGSNSELLEEILSLPEKDRREIFTQIDKFRAIEMPWKGFPEQVEQKLKEIIISHKPKDKLLLQSTSDTFNCCSSAGRIKQ

SEQ ID NO: 4603 - protein, 990 aa, synthetic construct
  SITE 986: note = misc_feature - Xaa can be any naturally occurring amino acid
  SITE 27: note = misc_feature - Xaa can be any naturally occurring amino acid
  REGION 1..990: note = Synthetic
MIVNMKKILGLDCGTNSIGWALIQQDXKEGKILGMGSRIIPMGSELSKFEQGQAQTKNANRRVARGTRKLNKRYKQRRNKLIYILQELGMLPDQIKLVNQFSDPNKLDKISILPISKNRQQLTAFDLLELRVKALTEKIELEELGKIIYKYNQLRGYSGGNSEPEKDENNEDESEEKEKTNDSFVVFSKVLSLGLPEEITFKGKKLNKRKISIETEDGIIEAETFLDNIKENDSLELQVNIRRAKSGDTITIKLPSKTSWRKKMENIEKQLADKSKELDREYFISELLFDILKENKWAKIRNNVILRSRYESEFDAVWSEQSKYYSFLNHLETDRLQKILEFIFPGQKESQEKLRQTGLKEGLKYVIKNQVVFYQRELKDQSDLISNCRFEPIEKVVAKSHPVFQEYKIWEQINKLVINTKIENGVNRKGEIRYKYIDKPIPVALKEWLYEELQSKKEVSFNPILTKLKKEFNLRENVDFLNGMNVKDKLKGNETKVILQKALGELWNIFSLDDSERQVELWEILYNGKGNEYDLTSERTSNVLAFIEKYSPDLENKNDVAIKISKIKFSRNYSNLSLKAIENILPVARAGKFFDQNFSEALSQKILKLLNENVEDPFEKSAQEFLDKNQDVLSDGGIVNAIATILVYDKHTAKEYSDDELLKEFTQISRLKQGELRNPLAEQIINEALIIVRDIWRKYGFKPDEIRVELARELKNNAVERGKMYSANLKSQKHNAEIRNKLIELKQEISIANIEKYKLWVSQENLQEVYLKNYNDPSKSEIEKLKLWESQGHVSPYTGQPIPLSELFNRERYDVDHIIPQSRYFDDSLSNKVICEKSINNEKGNRTSMEYFEVGSVNYRIFTKDQFIDHANQYFSGKKRKNLLATSIPEDPIQRQIKDTQYISIRIREELNKIVGNENVKTTTGGITDYLRNHWGLTDKFKVLLKERYEAVLPKIAQLEYDNYKKETEKKFTEYKNADVEFNEPXTYFG

SEQ ID NO: 4604 - protein, 1443 aa, synthetic construct
  REGION 1..1443: note = Synthetic
MKKILGLDLGTNSIGWALVQQNFENKTGNILGMGSRVIPMGAELSKFEQGLAQTKNANRRIARGTRKLNKRYKQRRNKLIYILQRLEMLPNQIKLVAEFSDPNKIDKISILPISKNQKQLTAFDLVELRVKALSEKIELDEFGKIIYKFNQLRGYSGGNAEPEKEDNNDEENDEKEKTNESYITFSKILSIGLPEEIVFKGKKLNKRKISIETEEGIIEGETFLESLKENDSLELQINIRRAKSGDTITFKLPNKTSWRKEMENIEKQLTENPKEIGKEYFISEFLLDILKENKWAKIRNNVILRSRYEAEFEAIWKEQSKHYPFLDNLDENKLLKILNFIFPGKKESQEKLRQTGLEKGLKYIIKNQVVFYQRELKDQSDLISNCRYEPNEKVVAKSHPVFQEFKIWEQINKLAINTKTENGVNRKGEIRYKYIDRPIPIQLKEWLYEELQNKKEVSFGPILTKLKKEFNLRDNVDFLNGMNAKDKLKGNDTKNILQKSLGSLWNEFDLDNREKQIHLWDILYNGKGNEYELTSDRTSKILDFLNKYSPHLENKETTAVKISKIKFGRNYSKLSLKAIEKILPLVRAGKFFDNQFSETLNQKIIKLLNENVDDPFEKSAQEFLDKNQDILSEGGIVNAIATILVYDKHTSKEYSKDELLKEYTQVSRLKQGELRNPLAEQIINEALIIVRDIWRKYGFKPDEIRVELARELKNNAIERGKMYSANLKSQKLNSEIRSRLIELKQEISIANIEKYKIWISQENLQETYIKNYSDPSKSEVEKIKLWESQGHISPYTGQPIPLSELFNRERYDIDHIIPQSRYFDDSFSNKVICEKSINNEKGNRTAMEYFESGSVNYTIFTKDQFIDHTNKYFFNKKRKNLLATSIPEDPIQRQIKDTQYISIRIREELHKIVGNENVKTTTGGVTDYLRNHWGLTDKFKVLLKERYETIMPKLANIEYESYKKDIEAKIKEYEKAGTNFNEPILDEQTFIQKFKNEFIRKKNNKLIIKGWSKRIDHRHHAIDALIIACTQPAHIKRLNDLNQVLKEWLEKHKEEFLPGFKGSNAELLDEVLNLDEEKRKKIFNQLEKFRTIEMPWNGFPEDAEQKIKEIVVSHKPKDKLLLQYDKTGNRQIKLRGQLHEAKNYGLSNGKETKRIQLSELFDKEKSATLGNLNKITHDFLKTIVLRHYQDDYQFNNKEAFSAEGILYLNKKLSERVDEKGNLKPHPPISTIKIYYKDPSKSKKKTESEDDDISLQKLDRKKSFNDSLYVKTGDNYLFAIMEKEVVNKKTKEDEKKRHYDLITFFDAANHLKTEFNISEDKKSFDKEALFKKYFRERNNAKLLFTLKQGDLVYLPNVDEEVIFDESSPFYESYWKNIEERSKNIFVVQKFSGKEIYFLKHTVADVISKKNEFGTQDCYQNLDGRSIKEFCFKINFDRLGNISKY

SEQ ID NO: 4605 - protein, 1426 aa, synthetic construct
  REGION 1..1426: note = Synthetic
MKMKKTILGLDLGTNSIGWALVEADEKNDPIGIIAMGSRIIPMGAELSKFEQGQAQTKNANRRIARGGRKLNKRYKQRRNKLIYILQQLKMLPSQIKLSSEFNDPLKLDKVSILPIAKKQKQYTAIDLLDLRVKALSEKIELEELGRIIYLFNQLRGYAGGDMASEKDTENDEEQENDEKKRNESYITFAKVVRISEPEIVTFKNRQLKKIHVTVETEDGIIEGETFLEALKEGEALELLVNIRKSKQGTTITFKLPNKTSWRKKMENLEKELDEASLKKGKEVFLSEYFFDILKEDRWAKIRNNVILRSRYLSEFDAVWDEQSKHYPFLNKLDTDTLTSILHFIFPGSKDSQVKFRAEGIDNGLKYVIKKQIIFYQRELKDQSDLISDCRYEKTEKAVAKSHPTFQEFKIWEQINKLTINTKTENGINRKGEIKYTYEDRPIPSRLKEWLYVELQNKKEINFSIVLNKLKKEYDLRENTDFLNGINAKARLRGNETRLMLKKALGELWDILGLQDINRQIELWDILYNGRGNEYDIQSDRTSRILAFIKKHANGLSDIETIAIQISKIKFSRNYSSLSLKAIEKILPLVRTGKYFESNLSEGLRNKIIKLLNEHVSDPFEKAAQQYLEKNIEVLAEGGIMNAYAIILVYDKHTAKAFGKDELINSYYQIKRLKEGELRNPLVEQLISETLIVVKDIWKYFGSKPDEIRLELSRDLKNNAERRANLYKTTRNNQRDNEAIKDELIELGRTLSLTNSKTPGAAKEMFANQYKYPSKTEIDKMKLWKQQNCVSPYTGQPIQLSELFKRERYDVDHIIPQSRYFDDSLANKVICEKAINTDKGNKTAMEYFETGSVIPGVLSKNSYIDHVNKHFHGIKRKNLLATKVPEDPVVRQIKETQYISIRTKEELNKIVGNDHVKTTTGGITDYLRNQWGLTDKFKELLKSRYEKIAPVRAEIEYEQYKNEVTERQKKVDTPFHETILSKEKFIESFNQNFIKKKNNKWIIQDWSKRVDHRHHAIDALVVACTSPAHIKRLNDLNKELQTWLDTNRNSLLPNFEGTPTELLDEILNLTSDERAKIFIQIERFRKIELPWQGFPEDAEKKIQDIIISQKPKDKLLIQKGRDNKLQIKIRGQLHEGTLYGKSQGVETYRIPLSKLSGKNFATEKVIEKVTDSFLKNTLKEHLKAYDNKKDEAFSAEGILALNKELALKHNSKGLLSPHTPVSSVKIFYRDPAKVKKKKGQEDPDEALQKLDRGKAYNNSLFVKTGDNYLFAVIEKEGKRIFDLITLFDAANLLKDEFNKETDSKKLNKEQIFKNYFEEKWKATLLYTLKQGDPVYMPSDYEDMITDAESPLFNDFWNNKAERSKSIYYVVKYSGRQIYFIRHNIADTIIKGIEFGSQNAYEKINGISIKDKCIKLNIDRLGNVKPA

SEQ ID NO: 4606 - protein, 1445 aa, synthetic construct
  REGION 1..1445: note = Synthetic
MMIKNILGLDLGTNSIGWALIKQDFENKYGEILGMGSRIIPMGAELSKFEQGQAQTKNANRRVARGTRKLNKRYKQRRNKLIYILQELGMLPDQIKLVNQFSDPNKLDKISILPISKNRQQLTAFDLLELRVKALTEKIELEELGKIIYKYNQLRGYSGGNSEPEKDENNEDESEEKEKTNDSFVVFSKVLSLGLPEEITFKGKKLNKRKISIETEDGIIEAETFLDNIKENDSLELQVNIRRAKSGDTITIKLPSKTSWRKKMENIEKQLADKSKELDREYFISELLFDILKENKWAKIRNNVILRSRYESEFDAVWSQQSKYYPFLNHLETDRLQKILEFIFPGQKESQEKLRQTGLKEGLKYVIKNQVVFYQRELKDQSDLISNCRFEPIEKVVAKSHPVFQEYKIWEQINKLVINTKIENGVNRKGEIRYKYIDKPIPVALKEWLYEELESKKEVSFNPILTKLKKEFNLRENVDFLNGMNAKDKLKGNETKVILQKALGELWNIFSLDDSERQVELWEILYNGKGNEYDLTSERTSNVLAFIEKYSPDLENKNDVAIKISKIKFSRNYSNLSLKAIENILPLARAGKFFDQNFSEALSQKILKLLNENVEDPFEKSAQEFLDKNQDVLSDGGIVNAIATILVYDKHTAKEYSGDELLKEFTQISRLKQGELRNPLAEQIINEALIIVRDIWRKYGFKPDEIRVELARELKNNAVERGKMYSANLKSQKHNAEIRNKLIELKQEISIANIEKYKLWVSQENLQEVYLKNYNDPSKSEIEKLKLWESQGHVSPYTGQPIPLSELFNRERYDVDHIIPQSRYFDDSLSNKVICEKSINNEKGNRTSMEYFEVGSVNYRIFTKDQFIDHANKYFSGKKRINLLATSIPEDPIQRQIKDTQYISIRIREELNKIVGNENVKTTTGGITDYLRNHWGLTDKFKVLLKERYEAVLPKIAQLEYDNYKKETEKKFTEYKNADVEFNEPILDEEIFIEKFRSEFIRKKNNKLIIKGWSKRIDHRHHAMDALVIACTQPAHIKRLNDLNQVLKEWLDKNKEKFFPGFSGTKTELLDEVLNLEEEKRREIFNQLEKFRAIEMPWNGFPEEAEQKFKEIIVSHKPKDKLLLQYDIQGNKQIKLRGQLHEAKNYGLKNGKETKRIQLSELFDKEKSATLGNLNKITNEFLKKIILKHYEEDYKFNNKDAFSAEGILDLNKKLAERKDEQGNPKPHPPISTIKIYYKDPSKSKKKKTDDEDDISLQKLDRQKSFNDSLYVKTGDNYLFAVMEKEVFDKKLKENKMERHYDLITFFDAANLLKSEFNNSEDKKNFSKEDLFRKYFEERNNARLLFTLKQGDFVYLPDDNEEIILDESSPLFMDYWKNTSERSNSIYVVQKFSKKQIYFLKHTIADTIVKKVEFGSQDCYEKVGVKSIKDFCFKINSDRLGNISKV

SEQ ID NO: 4607 - protein, 1457 aa, synthetic construct
  REGION 1..1457: note = Synthetic
MNMKKILGLDLGTNSIGWALVEQGIETNSGKILGMGSRIIPMGQELSKFEQGQAQTKNANRRIARGTRKLNKRYKQRRNKLIYILQQLDMLPKQIKLSEPFTNPLKLDRISILPIDKKQKQYSALDLLELRVRALSEQIELEELGKILYLFNQLRGYSGGGNEPDKEDNDDENTENEKKRKNESYVVFGKILSLSEPENITLKGKELKKHKVFFETEDGVLEGDSFLDILKVGESLELLVNITVSKKYGETITFKLPNKTNWRKKMENLEKELTELSQKEGREIYLSEYFLSILKDNKWAKIRNNVILRYRYQSEFDAIWKEQSKYYPFLSNCTQEKLSKILNFIFPGTKDSQEKYRQVGLEKGLYHVIKNQIIYYQRELKDQSDLISDCRFEKGEKAVSKSHPIFQEYKVWEQINKLTINTKIEAGTNRKGETKYKYVDKPIPETLKEWIFDELQEKKEMNFSVVLNKLKKEYNLRDGIDFLNGMNPKAKLRGNETKLILKKILGNELWEKLEMIDIARQIELWHILYNAKGNEYDIDSERTSKVLDFLKKYSGEISNIEQTAIQISKTKFSRNYSALSLKAIEKNLPLVRCGKYFDNEFSEILNEKIIYLLNENVSDPFEKAVQEYLENNVDVLLYGGIMNAYATILTYGKHTAKEYAENERIDNYRKITRLKQGELRNPLVEQLINETLMVVKDIWRNEGYGKPDEIRIELARELKNNAERRSKIYKSNSDRRKTNDEVKNLLIELKQEVTLANIEKYKLWSSQENLEEEFVKAYKDPSKSEIEKMRLWRDQGHISPYTGQPIPLSELFNRERYDIDHIIPQSRYFDDSFANKVICEKSVNKEKNNRTAMEYFEVGSSIPSVFSKENFINHVNRYFRDAKRKNLLATKVPEDPVARQMKETQYISVRVKEELNKIVGNENVKTTTGGVTDYLRNQWGLTDKFKQLLKSRYENVQPLLAESEYEKYTTSVEKKRKEYEKLNIPFTDVVLSKENFIQSFNQNFLQKKNNKLVIKGWSKRVDHRHHAIDALIIACTEQVHVNRLNNLNKELQTWLDNHKKEILPNFEGSPAELLEEILNLDEQKQKAVFMQIEKFKSIDMPWTSFPEDAEKAIQEIVVSQKPKDKLLIQYEERKEGGKIVKTDKLQLKIRGQLHEGTLYGKSQGVETYRIPLSKLAVKDFATEKTIDKIANEYLKAIIKQHLKDFDNKKEEAFSVEGILILNKKIAEKERKNEWKRKGKKKKIGEIASHTPITSIKIFYRDPQKIRKKKGQEEIEDALQKLDRDTAFNDNLYVATGGNYLFAVMEKDEKRVFDLISFFDATNLLKDEFNKAKSKREFNKDMVFKNYFEEKNKARLLFTLKQGEPVYMPSNGEDVIVDVDSPLYENFWKDKTERSKNIHYVTKYSGKQIYFIKHNIATPILNKQEFGSQNAYEKVGDLSIKEHCIKLNIDRLGNIKPL

SEQ ID NO: 4608 - protein, 872 aa, synthetic construct
  REGION 1..872: note = Synthetic
LEKMYFESNIMKKILGLDLGTNSIGWALIEADFESKQGKILGMGSRTIPMGQELSKFEQGQAQTKNAKRRVDRSARKLNKRYKQRRNKLIYVLQQLDMLPEQIKLSEEFNNPLKIDKVSILPIAQKQKQYSAIDLLELRVRALNEPVSLKELGKIIYLFNQLRGYSGGGNEPEKQEIDSDLVENEDRKGNESFLAFGKVIWISEAESFIYKGKELKKYKVKIETEDGELEGDTFLNLLKEGESLEFLIIKTTKKNEETITFKLPNKTNWRKKMENLEKELNEQAKINGREIFLSEYFLIILKENRWAKIRNNVVLRSRYQSEFDRIWKTQSENPKSELYDMLLHLSQNKLFDILKFIFPGTKETQEEYRKAGLEKGLYHIIKNQIIYYQRELKDQSNLISDCSFEKGQKAVSKSHPLFQEYKIWEQINKLTINTKIEDGTNRKGEIKYKYIDKPVPAALKEWIFDELQEKKEISFSVILNKLIKIYNLRSGVDFLNGMNPKAKLRGNETKLILKKVLCNGLWDKLGMSNIERQIELWDILYNAKGNEYEISSDRTSKVISFLKQYSTEIPDIQQTAIEISKTKFSRNYAAMSLKAIEKILPLVRCGTKYFSNELSEILNEKIIRLLNENLSDPFEKAAQEYLENNNDILIHGGIMNAYAIILVYGNHTENKYAEIEQIQNPNQILRLKQGELRNPLVEQLINEALMVVKDIWKEFKEKPQEIRIELARELKNNAERRAKIYKLNSENQKTNDEVRNLLIELKQEITLANIEKYKIWASQESLEEIFVKEYKDPSKSEIEKMRLWREQGHISPYTGKPIPLSKLFDRGMYDVDHIIPQSRYFDDSFTNKVICEKAVNREKNNRTAWSILRLVL

SEQ ID NO: 4609 - protein, 1480 aa, synthetic construct
  REGION 1..1480: note = Synthetic
LQNYELFFSKQVISVEKYIFLEKMYFESNIMKKILGLDLGTNSIGWALIEADFESKQGKILGMGSRTIPMGQELSKFEQGQAQTKNAKRRVDRSARKLNKRYKQRRNKLIYVLQQLDMLPEQIKLSEEFNNPLKIDKVSILPIAQKQKQYSAIDLLELRVRALNEPVSLKELGKIIYLFNQLRGYSGGGNEPEKQEIDSDLVENEDRKGNESFLAFGKVIWISEAESFIYKGKELKKYKVKIETEDGELEGDTFLNLLKEGESLEFLIIKTTKKNEETITFKLPNKTNWRKKMENLEKELNEQAKINGREIFLSEYFLIILKENRWAKIRNNVVLRSRYQSEFDRIWKTQSENPKSELYDMLLHLSQNKLFDILKFIFPGTKETQEEYRKAGLEKGLYHIIKNQIIYYQRELKDQSNLISDCSFEKGQKAVSKSHPLFQEYKIWEQINKLTINTKIEDGTNRKGEIKYKYIDKPVPAALKEWIFDELQEKKEISFSVILNKLIKIYNLRSGVDFLNGMNPKAKLRGNETKLILKKVLCNGLWDKLGMSNIERQIELWDILYNAKGNEYEISSDRTSKVISFLKQYSTEIPDIQQTAIEISKTKFSRNYAAMSLKAIEKILPLVRCGTKYFSNELSEILNEKIIRLLNENLSDPFEKAAQEYLENNNDILIHGGIMNAYAIILVYGNHTENKYAEIEQIQNPNQILRLKQGELRNPLVEQLINEALMVVKDIWKEFKEKPQEIRIELARELKNNAERRAKIYKLNSENQKTNDEVRNLLIELKQEITLANIEKYKIWASQESLEEIFVKEYKDPSKSEIEKMRLWREQGHISPYTGKPIPLSKLFDRGMYDVDHIIPQSRYFDDSFTNKVICEKAVNREKNNRTAMEYFEIGSLTQQIFSKEAFIKHVNKHFQGIKRNNLLTTKVPEDPVVRQMKETQYISVRVKDELNKIVGCNNVKTTTGGVTDYLRNQWGLTDKFKLLLKSRYQNIQPLLAETEYEKYIIGIEKKKKEYKKMNIPFTDTILSKVGFIELFNSNFIQIKRNKLIIKGWSKRIDHRHHAIDALTIACTEPAHIKRLNDLNKELQTWLDNHKKDILPDFEGSPTELLDEILNLDEAKQKAIFVQIEKFKSVDMPWSAFPEDAEKAIQNIIVSQKPKDKLLIQPDKKGHLQIKIRGQLHDGTLYGKSQGIETYRIPLSKLADKKIATEKTIDKIANEYLKIAIKQHLKDFENKKDEAFSAEGILVLNKKLAEKKRFNEWSRKNQKKRVGENAPHTPLTSIKIFYRDPLRVKKKKGFEEAEEVLERLIRKKAYNETLLVKTGGNYLFAVMEKDGKRVFDLISFYDATRLLKEEFNQILDKQKFDKEQVFKRYFEKENRAKFLFTLKQGDPVYMLSKDEDIITDKDSPLYESFWKDKIARSRNIYYVTKFSGNEIYFMNHIVANPIIKKKEFGSQDAYQKIEGLSIKNYCIKLKIDRLGNIEPY

SEQ ID NO: 4610 - protein, 1035 aa, synthetic construct
  REGION 1..1035: note = Synthetic
LISDCRYEPNEKAIAKSHPVFQEYKVWEQINKLIVNTKIEAGTNRKGEKKYKYIDRPIPTALKEWIFEELQNKKEITFSAIFKKLKAEFDLREGIDFLNGMNPKDKLKGNETKLQLQKSLGKLWDVLGLDSINRQIELWNILYNEKGNEYDLTSDRTSKVLEFINKYGNNIVDDNAEEIAIKISKIKFARAYSSLSLKAIERILPLVRAGKYFNNDFSQQLQSKILKLLNENVEDPFAKAAQTYLDNNQSVLSEGGVGNSIATILVYDKHTAKEYSHDELYKSYKEINLLKQGDLRNPLVEQIINEALVLIRDIWKNYGIKPNEIRVELARDLKNSAKERATIHKRNKDNQTINNKIKETLVKNKKELSLANIEKVKLWEAQRHLSPYTGQPIPLSDLFDKEKYDVDHIIPISRYFDDSFTNKVISEKSVNQEKANRTAMEYFEVGSLKYSIFTKEQFIAHVNEYFSGVKRKNLLATSIPEDPVQRQIKDTQYIAIRVKEELNKIVGNENVKTTTGSITDYLRNHWGLTDKFKLLLKERYEALLESEKFLESEYDNYKKDFDSRKKEYEEKEILFEDQELTKEEFIKEYKENYIRYKKNKLIIKGWSKRIDHRHHAIDALIVACTEPAHIKRLNDLNKVLQDWLVKHKSEFMPNFEGSNSELLEEILSLPEKDRREIFTQIDKFRAIEMPWKGFPEQVEQKLKEIIISHKPKDKLLLQYNKAGDRQIKLRGQLHEGTLYGISQGKEAYRIPLTKFSGKKFATEKNIQKIVSPFLSGFIANHLKEYNNKKEEAFSAEGIMDLNNKLAQYRNEKGELKPHTPISTVKIYYKDPSKNKKKKDEEDLSLQKLDREKAFNEKLYVKTGDNYLFAVMEGEIKTKKTSQIKRLYDIISFFDATNFLKEEFRNAPDKKTFDKDLLFRQYFEERNKAKLLFTLKQGDFVYLPNENEEVILDKESPLYNQYWGDLKERGKNIYVVQKFSKKQIYFIKHTIADIIKKDVEFGSQNCYETVEGRSIKENCFKLEIDRLGNIVKVIKR

SEQ ID NO: 4611 - protein, 1435 aa, synthetic construct
  REGION 1..1435: note = Synthetic
MKTILGLDLGTNSIGWALVSSEEKKILGMGSRIIPMGAELSKFEQGQAQTKNANRRIARGMRKLNKRYKQRRNKLIYVLQELGMLPAQIKLAEQFTNPLKIDKVSILPIEKKQKQYSALDLLELRVKSLKQKITLEELGKIIYLFNQLRGYSGGGNEPEKEKEKDNDEGQETDEKKGNESYAIFGKIIELSAPETITYKNKPLKKFKIAIETEEGILKGDTFLEMLKIDESFELLVNITNSKKHGETITFKLPNKTSWRKKMENLEKQLTEISKEKGREIYLSEYFIEILKENRWAKIRNNVILRSRYQSEFDAIWKEQIKHHAILEKLEISRLSVLLQFIFPGSKDSQIKYREEGISKGLSHVIRNQIIYYQRELKDQTHLVSDCRFEKGEKAVAKSHPAFQEYKIWEQINKLTINTKTESGKNRKGEVKYTYEDRPIPSELKEWLYDELQSKKEIGFATIFSKLKKEYKLRENIDFLNGINAKAKLRGNETQLMLKKALGEVLWEQLNLEATDKQIILWDILYNGKGNEYDLESDRTSKVLSFLKNYSVDISNLELTAVQISKIKFSRNYSSQSLKAIEKILPLVRSGKYFDTELSEAIQAKIVRLLNEKVSDPFEKALQEFIEKNETEILTNGGIMNAYATILVYDKHTAKEYNTNERIDNYKQIIRLTPGELRNPLVEQLVSETLIIVKDIWKQYGKKPDEIRLELSRDLKNNAERRSKMYKSNRENQKANEEVKNLLIELREEITLANIEKYKLWLSQENFQEEYVKKYKDPSKSEVEKMKLWKEQGHTSPYTGQPIPLTELFNRERYDVDHIIPQSRYFDDSFTNKVICEKSVNKDKGNKTAMEYFEAGSVIPNVLSKSDFIDHVNRQFHGLKRKNLLATKVPEDPVARQIKETQYISVRVKEELNKIVGNENVKTTTGGVTDYLRNQWGLTDKFKLLLKERYEKVQPLMAEVEYEKYITTFDAKKKELEKAEISLNVPALDKEYFIQSFNQNFIQRKNNKWIIKGWTKRIDHRHHAIDALIVACTEPVHIKRLNDLNQELQNFLDHNREEFLPGFEGTPTELLDEILNLDVERQQIIFRQIERFKNIEMPWSKFPEDAEQKIKEIIVSQKPKDKLLIQKDGRSGKLQIKIRGQLHEGTLYGKSHGVEAYRIPLSKLVGKKFATEKVIDKIANTFLKDSIKEHLKDYDNKKEEAFSAEGILNLNKKLASKKGKNDRPAPHTPISSIKVFYRAPAKQKKKKGQEEPEEALQRLDRAKAFNKSLFVKTGDNYLFAVLDNEYKRIYDLITFFDAANLLKDEFNKTNDKKKFNKELALKQYFEQKNNAKLLFTLKQGDAVYMPENGEEVILNSDSPLYKNYWGNTEARSKHLHYVTKYSGERIYFIKHNVADSILRGKEFGSQNAYEKIGEYSIKDFCIKLNIDRLGNIFPAR

SEQ ID NO: 4612 - protein, 1433 aa, synthetic construct
  REGION 1..1433: note = Synthetic
MNNLTLGIDLGTNSIGWAIRDVSASENQIIKNGVLIFDKGVGEEKGVEFPKVKKRTESRGKRRNYQAEKYRKWEVLEFLINKGMCPLSIEELDQWRKYSKKDKRKYPQTERFINWLRFDFNGDGKPDFNLLGGDKHESYYLFRAKAISEEEKNKKVFQNNPEILGRVFYQLVQRRGFKGRDEEEAKTMLQGSKDGATKGRDEIADYIEKHISLGAALYYYQKDKSSNYEKIRIRQRYNLRKDYENELKEICRVQSLNEDDYKKLYKAIIWQRPLRTQKGLVGLCTYEKNKRRVPISHPFYEEYRTWVFINNLKIEAPQGEDLENYLQKKIYPLFLKSGNDFKLKTVLDRINRDGAKIHSKFSERPDTKVLSAKLLKKLEDILGENWKENYSWKASFERQAQPKKKLNKDYTIEDIWHVLFTFDNEEKLKEFGIQKLGLSEEQAEKFSKIRLQQGYATLSLSAIKKILPYLQKGFIYSKAVYMANLQKVLGTHEVSENFINHFAHEIDRIYEHASTVKQLNNVLNSLFRAELVAEGDYHLSENEDLDVSDLDSIQQKIIENLGKKTWKETDDITQKKYLDYVKKHFKEFLQKPLQAKKGGFMEQPRIHDQIFTYLQEHYPEQVPNGNIKFLWHPSEQEKYPNASDYQEVSLKNKTIYIKETELDRFLHKYPEAETEGISLKLLGDPEPISKGFKNPMALKSLHKLKQLLNFLLQTNQIDAHTRVVVEIARELNNANYRKALEKWQNERERENESFKKRIEEINKECSTSFDVNDKSLLRKIRLWEEQDRKCLYTGETINMCDVLNGEHYDIEHTIPASISFDSELKNLSLANKDFNNLIKGKRFPSQLNNYKEASTFNGKSIEPVIKNIESIFGKRTFYKKKIKRGKVEKEIVVEKWAKIADLEKQLDGLKNLSYIDNKDAKDYKIQQRHLLKFKLDYLKQKLQTFTIEEYKASWKNSQLRDTQIMTKYAVPYLRTVFNRVEVQKGAVVDIFKEVFNVKFLDDKKDRMKHSHHAMDGAILTLIPKPEHRDRIVKEYQLKKEENFRYIHHEQPIDWEDFKPYYIKQIEEESLINNLTEPRTLSQTFKKVRKRGEVDYIKYKDEKGKWQYKLDERYNKITKWAKGDSIRGQLHGESLYGAIKQAKRNEDNTIVFDEEKNMVLEDEIKLVVRKPLVYAKDAASPGFKNLADVEKVIVDKALFQMIAKQVEEAGSFKDALEKGIYMLDKKGEKVNKIRHIRCFERLKHTTAVSPHTHDFASDKEYKQTTYAQNGENVFCLFYKGKIKGKEERAINIIGIYDLAKMKDSIKEEKDFFEIPHFNSIQKKKYQLPLYTVLKSGQKAVFYKESLEELKELSDKELSERLYKMYIFENDGRIRLKHHLISGSTTDIKKEYKESSSMNFAEYTPLLRITANGWNFAIEEKDFEMNLDGSITWKF

SEQ ID NO: 4613 - protein, 1420 aa, synthetic construct
  REGION 1..1420: note = Synthetic
MNNLTLGIDLGTNSIGWAIRDTTEIDNQIIKSGVLIFDKGVGEEKGIEFPKVKKRTESRGKRRNYQAEKYRKWELLEYLIQHKMCPLSINELNEWRKYSKKDKRQYPQTEEFLNWLRFDFNGDGKPDFHLLGGDKHESYYLFRAKAVSELEKDKKVFQENPEVLGRVFYHLVQRRGFKGRDEEEAKTMLQGSKDGTTKGRDEIAGYIDTYKSLGAALYHYQKEHSKNYEKVRIRQRYNLRKDYENELKEICKVQELSDADYKKLHKAIIWQRPLRTQKGLIGLCTYEKNKRRAPISHPLYEEYRTWIFINNLKIEAPEGEELEAYLKEKIYPLFLKIGTDFKLKTILDRVNKDGGKVHSKFADRPETKVLSAKLLKKFEDLLGENWKKDHQWNDSFVREAQPSKKQEEFYTVEDIWHILFTFDNEEKLIEFASTKLGLSKEASTKFSKIKLQQGYATLSLSAIKKILPYLQKGFLYPKAVYMANLQKVLGTYEVSEDFIDHFAGEIDSIYENAATEKRLNNILNSLFRAELVSEGDYHLAENEDLDDADQSLIHQKIIETLGEKTWNETDEKTQKEHFDYIKKEYKRFLQKPFQAKKGSFIEQPRIHEQIFNYLQEHYPEQVPDENIKYLWHPSEQEKYPNASTYQEINLKSKTFFIKEAELDRFLHKNPDAEADGIFLKLLGDPEPISKGFKNPMALKTLHKLKQLLNFLLQTQQIDTHTRIVVEIARELNNANYRKALEKWQNERERENESYKKRIEEINKESKTSFEVNDKSLIRKIRLWEEQDRKCLYTGEVINMCDVLNGEYYDIEHTIPASISFDSELKNLSLANKDFNNRIKGKKYPTQLDNYDDASTFNGKRIEPILKNIESIFGKRTVYKKKIKKGRSEKEIIVEKWAKIADLEVELSKLQNLRGLESKEIKDRLIQKRHLLKFELDYLKQKLQTFTIEEYKASWRNSQLRDTQIMTKYAIPYLNTVFNRVEVQKGNVVNDFKEIYNVKLFGDKKDRSKHSHHAVDAAILTLIPKPAQRDQILKEYNLAKDNGIAKAYHEQPIDWKEFKAYYIKQIEEETLINNLKEQRTLTPTFKKVRKRGKIVKKENGKPIWAKGDTIRGQLHGESLYGAIKQAKRDEDNKIVFDDDKKMILEDDIKLVIRKPLSYAKDAVSAGFKTLKEIEKVIVDRALFEMIKTQVDEADSFKSALEKGIYMLNKKGEKVNKIRHIRCFDRLKHSTAVRPHNHDFISDKEYKQTTYAQNGENVFCLFYKGELKDKEERAINIIGIFDLAKLDIQDEKDFFKIPHFSSLQKKKTKLPLYAVLKSGQKAIFYKENLEELKDLSEKELSDRMYKMYQFEGDSNKIKFKHHLISGANTEINKSLPKGYKEASPFGSFEKQPLMRLTAGNWNFAIEGKDFEMDLDGTINFKL

SEQ ID NO: 4614 - protein, 1420 aa, synthetic construct
  REGION 1..1420: note = Synthetic
MCNLTLGIDLGTNSIGWAIRDTTENDNQIIKNGVLIFDKGVGEEKGIEFPKVKKRTESRGKRRNYQAEKYRKWELLEFLIQNEMCPLSIDELNEWRKYSKKDKRKYPQTEKFLNWLRFDFNGDGKPDFHLLGGDKHESYYLFRMKAVSEEEKDKKVLQENPQILGRVFYHLVQRRGFKGRDEEEAKTMLQGSKDGTTKGRNEISEYIDIYKSLGAALYHYQKEHSKNYEKVRIRQRYNLRKDYENELKEICRVQGLSDSDYKKLQKAIIWQRPLRTQKGLIGLCTYERNKRRAPISHPLYEEYRTWIFINNLKIEAPEGEALDAYLKEKIYPLFLKSGTDFKLKTILDRINKDGGKVHSKFADRPDTKVLSAKLLKKLEEVLGESWKEDFNWNAFFVREAQPSKKQDEVYTVEDIWHILFTFDNEEKLKEFASTKLGLSEEASTKFSKIKLQQGYASLSPSAIKKILPYLQKGFLYPKAVYMANLQKVLGTYEVSEDLINHFASEIDTIYENAATEKKLNNILNSLFRTELVLEGDYHLAEHEDLDDADLDLIKQKIIEILGEKTWSETDEITQKQHFDYVRKQYKQFLQKPLQAKKAGFIEQPRIHDQIFKYLQEHYPEQVPHENIKYLWHPSEQEKYPNASTYQEINLKSKTFFIKEAELDRFLHKNPDAEAEGISLELLGDPEPISKGFKNPMALKTLHKLKQLLNFLLHTQQIDKHTRIVVEIARELNNANYRKALEKWQSERERENESYKKRITEINKECNTSFDINNKSLIRKIRLWEEQDRKCLYTGEVINMCDVLNGEYYDIEHTIPASISFDSELKNLSLANKDFNNNIKGKKYPTQLDNYDDASTFNGKRIEPIIKNIESLFGKRTVYKKKVKKGGVEKEITVEKWAKIADLEKKLDGLKNLSYIDSKDAKDYKIQQRHLLKFKLDYLKQKLQTFTIEEYKASWRNSQLRDTQIMTKYAVPYLKTVFNRVEVQKGNVVNDFKEIYNVKLFGNKKDRTKHSHHAVDAAILTLIPKPTERDQILTKYNLAKDNGIARTYHEQPIDWKDFKTYYIKQIEEETLINNLKEQRTLTSTFKKVRKRGKIVKKENGKPIWAKGDTIRGQLHGESLYGAIKQAQRDEDNKIVFDDNKKMILEEEIKLVIRKPLTYAKDAASPGFKTLKEIEKVIVDRALFEMIQTQVDKAESFKNALEKGIYMLNKKGGKVNKIRHIRCFDRLKHSTAVRPHDHDFVSDKEYKQTTYAQNGENVFCLFYKGEVKGKEERAINVIGIFDLAKLDIKDEKDFYKIPLFNSINKKKTELPLYAVLKSGQKAIFYKENLEELKDLNEKELSNRMYKMYQFEQGKGGDKIKFKHHLISGANTEIVNGLPKGYKEASEYGCFDEQPLMRLTAGNWNFAIENQDFEMNLDGKVKF

SEQ ID NO: 4615 - protein, 1419 aa, synthetic construct
  REGION 1..1419: note = Synthetic
MSNLTLGIDLGTNSIGWAIRDITASDNQIIKKGVLIFDKGVGEEKGIEFPKVKKRTESRGKRRNYQAEKYRKWELLAFLIKQGMCPLTLDELNDWRKYTKRKGRQYPQTEAFINWLRFDFNSDGKPDFHLFGSDKHESYYVFRAKAISETDTDKGVFIDNPEILGRVFYQLVQRRGFKGRDEEEAKTMLKGSKDGTTKGRDAIAEYIVQHKSLGAALYYYQKEKSKDSEKIRIRQRYNLRKDYENELKLICKVQNLSEEFYSKLHKAIIWQRPLRTQKGLVGLCTYEKNKRRAPVSHPLYEEYRTWVFINNLKIQAPDGWEQGRYLNEIIYPIFYKSGNDFSLNTILKQLNKDGAIINSGYSNRDKTKVLSAKLLKNFKDFFGEEWKGNLGWDHAFLRQEQPKKKATATYSFEDIWHVLATFDSGEKLKEFALEKLKLNEQKAIKFSKIKLQQGYATLSLSAIKKILPYLKKGFIYSKAVYMANIQKVLGTHQVSAAFIDHFASEIDVIYEEVATKRKLNNVLNGLFKYELISNGDYHLNKNGDLDASDHALIQHKVIEELGEKTWKETNIEEQKSYLDYIANEYKSFLQKPFQAKKGAFIEQPRIHQHIFNYIQEHYQVANENIKYLWHPSEQEKYPNASNHEKVTLKNKTVYVNENEMEAFLKKNPNAEIEGISIKLLESPEPISKGFKNPMALKTLHKLKHLLNYLLQTNQIDTHTRIVVEIARELNNANYRVALERWQKQRERENNNFKKIIEEINNESGTSYNPEDKHLIRKIRLWEEQGKKCLYTGETINKSDLLNGEHFDIEHTIPASISFDNELKNLTLANKDYNANIKGKRYPTQLNNYNADGLFNGRPIQPIIKNIEAIFGKRTVEKKTIKKRGKKEDIRVVKWSKITDLEKQIDEYVKRTSYASTKEIKDSYIQKRHQLKFDLDYLKQKLNTFTIEEYKSKWRNSQLRDTQIMTKYAVPYLKTVFNRVEVQKGNVVNIFKEVYRVKVSSDKKDRSKHSHHAIDGAILTLIPKPIYRDEIIKKYQLEKDNRTGKTYHEQPQNWEDFTPSFIINIEKETFINNLKDYRTLTPTFKKVRKRGKIDYDKKGNVKWAKGDTIRGQLHGESLYGGIKQPKRDDLGKIIFDENKKMLLENEVRLVIRKPLLYAKDAASPGFKKLEDIEKVIVDQALFQRIKGQVSQAESFKDALEKGIYMLNKKGGRVNRIRHIRCFERLKHATAVQPHKHTFVSSKEYKQTTYAQNGENVYCLYYKGIVKGNEERAISIIGIFDLAKLDIQSEKDFFEIPHFNSVIRKKVQLPLYTILKAGQKAIFYKESLDELIELTKEELSQRIYKMYQFEADSNKIKFKHHLVSGSNTDIVKSLPKGYKEAALFGKYENQPLMRLTSGNWNFAIEGKDFEMQLDGTITWKF

SEQ ID NO: 4616 - protein, 1419 aa, synthetic construct
  REGION 1..1419: note = Synthetic
MSNLTLGIDLGTNSIGWAIRDVSALKNQIIKSGVLIFDKGVGEEKGIEFPKVKKRTESRGKRRNYQAEKYRKWELLEFLINKNMCPLTIGELDEWRKYNKNNPRKYPQTEAFINWLRYDFNGDGKPDFHLLGGDAHENHYLFRAKAISENEADKKVFQENPQILGRVFYHLVQRRGFKGRDEEEAKTMLEGSKNNDTPGRNEIKNYIIKHRSLGAALYHYQKEKSTNGEKIRIRQRYNLRKDYENELKEICQVQGLEKTSYEKLWKAIIWQRPLRTQKGSVGLCTYEKNKRRAPISHPLYEEYRTWVFINNLKIEAPEGWKQEDYLKEKIYPVFYKTGNNFSLKSILNQLDKDEATITSGYAIREKTKVLSTKLLKQFEDVFGENWKENLGWKEAFVRNAQPAKKNSSYYTFEDLWHVLFTFDSEEKLKEFALEKLKLEKAKAEKFSKIRLQQGYATLSLSAIKKILPYLQKGYAYSKAVYMANLQKVLGTYEISDEFINHFAVEIDEIYESVSTQRKLNNVLNSLFRTELVAEGDYHLAEQEELDNSDINLIKQNIIDVLGDKTWEEINEDQKEEYVNYVKEKYKGFLQKPFQAKKGSFVEQPRIHDAIFNYLQEYYPEQVPKKNIQYLWHPSEQEKYPNSDTYQEINQKGKVFYIKEYELNSFLHRYPDAEADGISLKLLGNPEPISKGFKNPMALKSLHKLKQLLNFLLQTQLIDSHTRIVVEIARELNDANYRKALEQWQNEREKENQKLSDTIEEINQECNTSFDPNSKALIRKIRLWEEQGKKCMYTGAMINKCDLLNGEYYDFEHTIPASISFDNELKNLTLADKNYNSNIKGKKFPTQLDNYDSECDFDGKPLQPILKNIEALFGKRSVEKKTLKKKGIQKEITIEKWSKIAELEFQLSKLSSLRGVEPKDKRDSLIQKRHKLKFELDYLKQKLQTFTIEEFKAGWRNSQLRDTQIMTKYAVPYLKTVFNRVEVQKGSVVDIFKEVYNVKLRSDKKDRSKHSHHAVDGAILTLIPKAAQRDKIIKEYQLKKDEGFGEVYHEAPKEWDNFKVSYIKNIEEEILINNLKEHRTLNATFKKVRKRGKIDKKENGNPKWAKGDTIRGQLHGESFYGAIKQPKRDDNNKIKFDNGKMQLHEDIKLVIRKPLVYAKDAASPGFKSLADIEKVIVDKALFGLIKEQVDEADSFKSALANGVYMLNKNGEKVNKIRHIRCFDRLKHSTAVKPHEHDFKSEKEYKQTTYAQNGENAFCLYYKGDIKGKEERAINIVGIFDLAKLDIGNESDFFEIPLFNLIKKKSSEISLYAVLKSGQKAIFYKENIEELKELDEKELSERMYKMYQFEGDSNKIKFKHHLVSGPNTDISKKLPKGYKEASPFGSFEKQPLMRLTAGNWNFAIEEKDFEMNLDGSINWNL

SEQ ID NO: 4617 - protein, 1417 aa, synthetic construct
  REGION 1..1417: note = Synthetic
MKTLGIDLGTNSVGWAIRNTELQDNQIEDCGVITFEKGVASEKGIEFPKVQKRTESRGKRRNYQAEKYRKYALLDFLIEKKMCPLTIAELDRWRKYEKGKHREYPQSKEFIDWLRFDFDGDGKPDFHLFDKDKNESYYVFRAFSIEENYIHVFKSNPQILGRVLYQLVQRRGFKGRDEEEAKIILNGSEKSGTKGRDEIESFIDSYSTLGAALYYYQKENGGRIRQRYNLRKDYEAELRQICKVQSISTSDYEKLWKAIVWQRPLRTQKGLVGNCIYEKNKRRVAVSHPLYEEYRTWVFINNLNIVPPPDTELSDYLHERIYPLFYKSTPDFELNVIDKQLAKDEAKRLSGHVGKTKVISVKLLKSFHDVFGEGWRGKLKWDINGDRAVQPLKKDHKDYTFDDLWHILLTFDGQENLKKLAVEKLKLDEEKAIKFSKIKLQQGYATLSLSAVKKILPYLQKGFLYSHAVYLANLYKVLGENVISGTLINHFAEEVSLFLQKDSLNRKVAAIVNGLISEMLNSNERYYISDNRDLDKDEKEAILNKIIDNYGLLSWERMNETEKSEVIEKVSVQYLDFLKKPITLKSNLFIKPIRIHDQILKFLQDTYHVSEDRKKYLWHPSEQENYSEAEDYFEYSIGKKMYYLRENEVPKFLYKNPDAEFEGRQIKLLGNLEPLSRGFKNPMALKSLYKLKSLINYFLQQDKIDEETRVVIEIARELNDKNKRKAIEIWQKERERENESYRKEIQEYREQFPHIALIDESTIIRKLRLWHEQNKICVYTGKLISITDLLSNNKFDFEHTIPASISFDNELKNLTITDATYNRLYKSNKFPTQLLNYESESAINGETVSPIIRNIEFLFGERTIEHKEIKGKTETIIKWKKITELEKQYDDWKKKASYASSKEIKDNCIIKYHTIKMDLDYWRAKLTSFTITEYKAGWRNNQLRDAQIITKYALPYFKTIFKNVSVEKGSITDIFKKVYKVQSTKDKKDRSKHSHHAQDAAILTLIPNVFHRERIIKLYEAEIDKRTGNIYHEKPLGWESFSEKYIQEIQNKILINNLVDNRTVTQTYKVPRRRGKIDHIKAQDEQGNYNYKLDSEGQKIPKVAKGDTIRGQLHGETFYGAIKQPVRNDEDQILFDENKKMILKDDIFVVVRKPLLYKNDANSPGFKTIEEIEKIIVDKALFKMIKKQVDNSDLKTALTDGVYMLNAEGNETGQKIRRIRCFEKQLKYKTAVKIHKHQFESKKDYKKATLAVNGENPYCLFYKSDEGRAMKVLSIIELSELKLKNLKDLYNEPEFLSSETGKGKNKSAIPLYSILKKEDKVIFYKNSINELKDLDTEELSRRMFKVYQFEGDSNRMKFRHHLAAGIDTELKKENKEYSAVDFEEKQMFLRLSQGQWNFAIEHKDFELTLSGKIKWNL

SEQ ID NO: 4618 - protein, 1417 aa, synthetic construct
  REGION 1..1417: note = Synthetic
MKKVLGIDLGSNSTGWAIRNLDLEGNQIEDFGVITFEKGVAAEKGNEFPKVQKRTESRGKRRNYQAEKYRKFGILQFLIERKMCPLSIEDFNNWKTYRKGKRREYPQSEEFLNWIRFDFDGDGLPDFHLFGKDKNESYYIFRAFTGNPQYKDVFGNNPQILGRVFYQLVQRRGFKGRDEEEAKTMLTGSDKNGTKGRNDIEEYLDKHKTLGAALYYYQKDFGGRIRQRYNLRKDSEAELKWICDLHDISKDDYSKLWKAIIWQRPLRTQKGLIGNCIYEKGKKRVAVSHPLYEEYRTWVFINNLNIIPPLDENKQEYIQAKIYPLFYKSKPDFELSEIDKQLRKDGAKRTSKHHEKTKVLSLKLLKQFQDVFGENWKDILKWDINGERSSQPVKKSHTEYTFEDVWHILMTFDGQENLKKFALEKLNLDEEKANKFSKIKLQQGFATLSLSAIKKILPYLQKGFLYSHAVYMANLYKMLGENEISETLINHLSEEISNILKWDSVNRKNAAIVNSLISEMINDENRYYITDDRDLDSAENKLVLKSVIDNYGQESWDKLEEESKANIIDYVSAKYLEFLKKSFFDKKNLFVQSERIDEKIFNFLKDTYHVSEDMKKYLWHPSEQENYAEAENYLEFSVGRKKYYVKEKNRSGFLTKNPDAEFEGREIKLLGNPEPLSKGFKNPMALKSLHKLKNLVNYLLQEGKIDEETKVVIEIARELNDKNKRKAIEIWQKEREKENEAYRKELAVYREQFSNVKLIDENTLVRKIRLWHEQNKICLYTGKPISFSDLISGYKYDFEHTIPASISFDNELKNLTIADSGYNRLQKGKKFPTQLVNYDNEQVINGEFYNPIIRNIEFLFGEKKIKEKELKGKTEKIITWKKIEELEKLFDEWKKKASYASTKEYKDFCIVKYHTIKMDLDYLKAKLATFTITEYKAGWRNNQLRDTQIITKYALPYFKTLFKRVSVEKGGVTDIFKKVYKVQSKDSKKDRSVHSHHAQDAAILTLIPNAFHRERIIKAYQNEIDNRTGKTYHELPMDWDNFSENYILELKDKVLINNLTDSRTITQTSKTVRKRGKIDFVKIKNEKGEQVYKLDENGNRIPKISKGDTIRGQLHGETFYGAIKQPVRDEDNKILFDDNRKMILKDEIYLAVRKPLLYKKDANSQGFKSLEEVEKAIVDKDLFKIIKRQVEETDFKTALTEGVYMLDKSGNKVNKIRTIRCFENGLKYATAIKVHHHSFVSDKEYKKSTLATNGENTYCLFYKSDAGKAMRILSIVDLAELKLKNVQNLFTEPEFSFIKTGRGKNKFQLPLYSILKKGDKVLFYKDSINELTYLNTEELSERMYKVYQFEGDSNRMKFRHHLVAGIDTELKKDNQEYSSFSFEEKQVFLRLSQGQWNFAIEGKDFEMYIDGTIKWNF

SEQ ID NO: 4619 - protein, 1416 aa, synthetic construct
  REGION 1..1416: note = Synthetic
MKILGIDLGTNSTGWAIRNTELSENQIEDCGVITFEKGVASEKGVEFPKVQKRTESRGKRRNYQAEKYRKYALLDFLIEKEMCPLTNEELNRWKKYAKGNKREYPQSKEFINWLRFDFDGDGKPDFNLLGKDKNESYYVFRALSIDENYKDVFDSNPHILGRVLYQLVQRRGFKGRDEEEARTMLEGSEKNKTKGRDEIEKYIMHYQSLGAALYHFQKENGGRIRQRYNLRKDYETELKLICEVQNISTPEYEKLWKTIIWQRPLRKQKSLIGNCIYEKNKRRVAVSHPLYEEYRTWVFINNLNIIPPSETELSDYLYGKIYPLFFRSSSDFDLDVIDKQLNKDGAYRSSRHSGKTKVISVKLLKNFLDIFGTDWKDLLHWDVSGDRSAQPQRKNGAEYTFEDLWHILLTFDGQENLKKFARENLHLDEEKAIKFSKIKLQQGYATMSLSAVKKMLPYLQKGFLYSHSVYMANLHKILSENNISQGIVNHFAEEITSLLKKDVSERKNTTIVNSLVSDMLNSRDRYYISDNRGLDMEEKKQILSKITDNYGTSSWEKMNEEEKLAVINKVSTQYLEFLKKPLFPKANFFIKPTRIHDRIFEFLKNTYHVTDDKKKHLWHPSEQENYMVAKDYFEYSLDKKKYYIEEHEVSRFVSRNAEAEFEGRQIRLLGNPEPLNKGFKNPMALKSLYKLKNLVNYLLQERKIDEDTKVVVEIARELNDKNRRKAIEIWQKEKEKENDSYRKEIREYRDLFSNIALIDENILIRKLRLWHEQNKICIYTGKSISLTDLFSGNKYDFEHTIPASISFDNELKNLTIADAAYNRKYKAKRLPTQLLNYESESVFNGEAFSSIIRNMEFLFGERTVQRKETKGKEQVIIKWKKIHDLEKLYDDWKKKASYASSKEIKDNCIVKYHTIKLELDYWRAKLAAFTITEYKAGWRNNQLKDTQLITKYALPYFKTLFKNVSVEKGTVTDIFKKVYKIQSVKERKNRSRHSHHAEDAAILTLIPNAFHRERIIKLYEEELDNRTGKVYHEKPMEWETFSDKYILEIQHRILINNLVDNRTVTQTYKISRKRGKIDYTKLKDDKDVYHYKLDDEGRKIPKIAKGDTIRGQLHGETFYGAIKQPLRNDDGQILFDENKNMILKDDVFLVLRRPLIYKNDANSPGFKTIEEIEKIIVDKALFEMIKKQVDDSDFKSALMNGVYMLDSEGNKIGEKIRKIRCFERQLKYSTAVKVHQHQFESKKEYKKRTLAVNGENPYCLFYKNEAGKAMKVLSIIELSELKLKDIKSLYNEPEFSSIEVGRGKNKSIIPLYTVLKKEDKVIFYKDSFSELKELDSEEISRRLFKVYQFEADSGRMKFRHHLAAGIDTELKKENKEYSLFDFKEKQIFLRLSQGQWNFAVEHKDFEVTLDGKIKWH

SEQ ID NO: 4620 - protein, 1414 aa, synthetic construct
  REGION 1..1414: note = Synthetic
MNNLTLGIDLGTNSIGWAIRDITASDNQIIKKGVLIFDKGVGEEKGVEFPKVKKRTESRGKRRNYQAEKYRKWELLDFLIKHGMCPLSIDELNSWRKYTKKEERKYPQSQSFLNWLRFDFNGDGKPDFHLFGSDKHESYYLFRAKAVSEAEIDKRVFKDNPEILGRVFYQLVQRRGFKGRDEEEAKTMLRGSKDGMTKGRDAIADYIKQYKSLGAALYHYQKEKSSHSEKIRIRQRYNLRKDYENELKLICKIQNLNNDFYSKLHKAIIWQRPLRTQKGLIGLCTYEKNKRRAPISHPLYEEYRTWVFINNLKIQAPEEWEHSKYLIQKIYPIFYKSGNDFSLSTILKQLKKDGAIVNSGYGSREKTKVLSAKLLKNFEDIFGENWQNELGWHNAFLREKQPKKKATTNYSFEDIWHVLATFDSEEKLREFALEKLKLSEEKAIKFSKIKLQQGYATLSLSAIKKILPYLKKGFIYSKAVYMANIQKVLGTYEVSSAFIEHFATEIDVIYEEVSAKRKLNNVLNGLFKYELLAEGDYHLGSSQDLDVSDYSLIKQKLINELGEKTWEETIKEDQADYLDYISKEYKSFLQKPFQAKKGAFIAQPRIHQHIFNYIQEHYQVADENIKYLWHPSEQEKYPNASSYEKVELKNETVYINENDIDAFLKKKPNAELEGISLKLLESPEPISKGFKNPMALKTLHKLKQLLNYLLQTNQIDAHTRIVVEIARELNNANYRIALERWQNQRERENNNYKKTIEEINKESGTSYNSEDKNLIRKIRLWEEQGKKCLYTGDTINKSDLLNGEHFDIEHTIPASISFDNELKNLTLANKDYNANVKGKKYPTQLDNYHTDSMFNTRSIQPIIKNIEAVFGKRTVEKKIIKKHGKKEEITVVKWSKITDLEKQIDEYVKKTSYASTKEIKDVFIQKRHQLKFDLDYLKQKIQTFTVEEYKAKWRNSKLRDTQIMTKYAVPYLRTVFNKVEVQKGNVVNIFKEVYRVKMVSDKKDRSKHSHHAIDGAILTLIPKPAYRDEIIKKYQLEKDNHTGKTYHEQPIDWHNFKPIFIKNIETETLINNLKDYRTLTPTFKKVRKRGKIDYDENGKIKWAKGDAIRGQLHGESLYGAIKQPKRDNFGKIIFDDNKKMQLEDEVRLVMRKPLLYAKDASSPGFKKLDDLEKVIVDKALFEIIKKQVVKAESFKEAIEKGVYMLNKKGEKVNKIRHVRCFDRLKYTTAVQPHKHTFVSDKEYKQTTYAQNGENVYCLFYKGNVKGKEERTISIIGIFDLAKLDIQDEREFFEIPHFNSVVKKKTQLPLCAVLKAGQKVIFYKESVKELAELNKEELSQRMYKMYQFESDGRIKFKHHIISGSNTDIKKEHKEISSINFKEFSPLLRISSGGWNFAIEGRDFEIKLDGALIWKF

SEQ ID NO: 4621 - protein, 1404 aa, synthetic construct
  REGION 1..1404: note = Synthetic
MEKTLGIDLGTNSIGWTIRNTDLSDNQIEDCGVITFEKGVASEKGNEFPKVQKRTESRGKRRNYQSEKYRKFALLDFLIQKNMCPLTIEEFDCWKNYRKGNKREYPQSEEFLQWIRFDFDGDGLPDFHLFGKDKNESYYIFRASVVDNNYKSVFDTNPHILGRILYQMVQRRGFKGRDEEEAKTMLTGSEKNGTKGRNDIAEYIEKYITVGAALYHYQKDFGGRIRQRYNLRKDYEHELKVICDVHNISQADYEKLWKAIIWQRPLRTQKGLIGNCIYEKNKKRVAVSHPLYEEYRTWVFINNLNILPPQGECLQEYLLDKIYPIFYKSKPDFELSDIDKQLKKDGAKRTSRHNEKTKVLSNKLLKQFQDIFGEDWKEELQWNITGDRSPQQNKREESLYTFEDIWHVLMTFDGQENLKKFAVEKLNLDEEKATKFSKIKLQQGFATLSLSAIKKILPYLQKGFLYNHSVYMANLYKMLDGAAISETLINHFSEEILKVLKSDSFNRKNAAIVNSLISEMLNDDNRYYISDNRDLDRSEYKTVLKNIIDTYGVEKWESFNEQQKTEITDFVSGKYLEFLKKTYSDKRNLFVQPERIHDKIFAFLQNTYHVSEDKKKYLWHPSEQENYAKADEYSEYSVGSKKYYVKAENVNHFLQRNPDAEAEGRQIKLLGNPEPLSKGFKNPMALKSLYKLKNLVNYLLQTGKIDEETRVVVEIARELNDKNKRKAIEIWQKDREKENESYRKELQTYREQFPHINLIDENTLIRKIRLWHEQNKICLYTGKPIPFSELITGNKYDIEHTIPASISFDNELKNLTISDSVYNRLHKGKRFPTQLSNYDSEQIINGETCNAIIRNIEFIFGERTVEYKEIKGKTEKIVKWRKIDELEKQFDEWKKKASYASTKEIKDNYIVKYHALKMDLDYLKEKLATFTITEYTAGWRNNQIRDTQIITKYALPYFKTLFKKVSVEKGSVTDIFKKVYKVQLRNDKKNRGVHSHHAQDAAILTLIPTAFHRERIIKAYQNEIDNRTGKTYHELPMDWDNFSEKYILDIKGNVLINNLTDNRTITQTYKTVRKRGKVVYDTDKEGSSHKRVSKGDTIRGQLHGETFYGAIKQPLRDEDNKILFDENKKMILKDEIYLAVRKPLVYKKDANSPGFKTLEEVEKVIVDKALFEMIKKQVEASDFKTALTDGIYMLDENGNKVNKIRRIRCFETGLKYTTAIKVHQHSFASGKEYKKSTLATNGENTYCLFYKNDMGKAMRILSIVDLAELKLKTIQSLYNEPEYGNFESGKGKNKYQIPLYTILKSGDKVLFYKENIYELKDLEQKELSDRMFKMYQFEKDGRIKFRHHLVAGIDTELKKDNQEYSSVNFEEKQVFLRLSQGQWNFAIEGKDFEMAFDGKINWKM

SEQ ID NO: 4622 - protein, 1400 aa, synthetic construct
  REGION 1..1400: note = Synthetic
MTKILGLDLGTNSIGWAIRDTSAVDNQIIHSGVLTFEKGVASEKGIEFPRVQKRTESRGKRRNYQSEKYRKYALLQFLIENNMCPLTIEELDEWRKYTKPYGRRYPQSEAFINWLRFDFDGDGKPDFNLLGKDKDESYYAFRAFATNEHYRKVFRDNPQVLGRVFYQLVQRRGFKGRDDEEAKTMLTGSKDGAVNGRDDIAAYIEDYGTLGAALYQYQRARGGRVRQRYNLRKDYENELKEICRVQDISDNDYQKLWKAIIWQRPLRTQKGLIGNCIYEPGKKRAPISHPLYEEYRTWIFINNLNIVPPAGIAKADYLKDKIYPLFYKASDDFDFKSILTQLRKDGAETTARFKENTKVVSARLLRFFNDVLGEDWKERYGWDNIHNREVNQQKKTGTGYTFEDVWHVLNTFDDHESLKDFALNKLGLTEEKADKFAGKRLKQGYATLSLSAIKKILPYLQRGYIYSQAVYMANLYKVLGSDRITDGLIEHFSEDIGKILEANKDLKQINAVVNSLIADELAAGRYSIEDGRSLDADEQARVYKKTIETFTNTAWEKLTEEKKESFIAEISDKFRSFLMTSVRSKSSAFAEQPRLHDQVFDYFKQAYGIPDERKKFLWHPSEQENYVAAQEYEHFTLKGKDVYVPVKKREAFIRKHPDAESEGRSLELLGSPEPVSKGLKNPMALKTMHKLKQLINHLLKTDKIAKDTRIVVEIARELNDANTREAIKKWNNERERENQKYRETIKEINAECNTNFDEYNPNLIRKIRLWEEQGRMCLYTGKLIGGSEVLKGHLFDIEHTIPASISFDNELKNLTLTDTHYNRHVKGKMFPSQLPNYEHDVKIDGKTYPAIITSMERLFGKRSLKTVTRRGKEEIKESWKKIEDLEKLYDDWRNRAKFASTKEIKDNCIQRKHMAKMDLDYWRAKLKTFTLTEYNPAWKNSQLRDTQIITKYTLPYLKTVFNKVAVEKGEVVNKFKEIYEVKPQFEKKDRKKHSHHAIDAAILTLIPPFYDRDKILQKYNEQKDRDNTSCYHEKPKDWDNFSAGKILGIEHEILINNIAENKTTLPTYKKVRKRGKIVKNNNGTIRIAKGDTIRGQLHDETLYGAIKQPVRDDDGKISFDDNGKMILHDKTFVVVRKPLLYKKDPNSPGFKSLEEIEKVIVDKDLYRMIKRQVDASDFKTALTEGVYMLGKNGERVNKIRRIRCFESLNYDNAVKVHTHSFISKKEHKRKTLAINGENALCLFYKSTDGKSKSISIQSIGKVGESKIKDDSYYFYEPFFNQIEMGKGKNAFTVPLHAVLRSGQKVMFFTDFPEELTELTKAELSARMYKMYQFEADGRIKFKHHLASGIDTELKKDNKEFSYYDAKEKQMFLRLTQKQWNFIVEGPDFEMALDGSITFKI

SEQ ID NO: 4623 - protein, 1399 aa, synthetic construct
  REGION 1..1399: note = Synthetic
MSKTLGLDLGTNSIGWAIRDTAAGDNQIIHSGVLTFEKGVASEKGIEFPRVQKRTESRNKRRNYQSEKYRKYALLQFLIDHNMCPLTIAELNEWRKYTKPYGRRYPQSEAFINWLRFDFNGDGKPDFHLLGKDKDESYYAFRAFAADEHYHNVYQDNLHVLGRVFYQLVQRRGFKGRDEEEAKTGSDKNGTAGRNDIAAYIDDYGTLGAALYQYQKARGGRIRQRYNLRKDYENELKEICRVHNISDEDYQKLWKAIIWQRPLRTQKGLIGNCIYEPGKKRAPISHPLYEEYRTWIFINNLNIEPPAGIAKADYLKDKIYPLFFKASDDFELKSILTQLKKDGAATNARFKEDTKIVSAKLLKFFNDILGDNWKDKYGWDDINNREARQQKKTGTGYTFEDIWHVLSTFDDRESLKEFAVNKLGLDEDIANKFASKSLKQGYATLSLSAIKKILPYLQRGYIYSQAVYMANLYKVLGADSITDGLIEHFSEETEKIFRENGRQKQINAVVNSLIADELNAGRYTIEDGRLLDDEEQARVYKKIIETFSTKTWEEFTEEEKEGIIADVSAKFKSFLMTSVREKSGVFTQPLRLHDQVFDYLQKAYNLPDKRKNFLWHPSEQENYTAAQEYAHFTLKGKDVYVPFKKKETFVNKHPDADYEGRSLKLLGSPEPISKGLKNPMALKTMHKLKQLVNHLLKTNAIEEDTRIVIEIARELNDANTRKAIEKWNNERERENQKFRDIIREINAESGTTFSEDDKTLVRKIRLWEEQGRICLYTGKPISGSEVFNGVMFDIEHTIPASMSFDSELKNLTLADTHYNRHVKGKLFPTQLPNYEHDATVNGKTYPAILSTMERIFGKRSLKVVTDRKGKEDIRESWKKIEDLQKLYDDWRNRAKFASTKEIKDNCIQRKHMAKMDLDYWKSKLRTFTLVEYNPAWKNSQLRDTQIITKYTLPYLKTVFSKVAVEKGSVVHAFKEIYEVNPPFEKKNRKVHSHHAIDAAILTLIPPFYDRDKILQKYNEQKDRDNTSCYHENPKDWKNFSAGKILGIEHQILINNIAENKTTLPTYKTVRKRGKIVKNNDGTIRVAKGDTIRGQLHKETLFGAIKLPLRNEDGKILFEENGKMKLDEKIHLVIRKPLVYSKDPNSPGYKSLEQIEKEIVDKDLFRMIKQQVEASDFKTALTEGVYMLGKNGEKINKIRRIRCINDKLKYDSAIRVQRHSFASSKDYKHNTLAENGGNPVCLFYKSKDGNDKNIKVLSIGSLAESKIMNDQQYFEEPYYNHVEIGKLKKSKRIPLHAVLKSGIKAIFYKDSPEELLELSKVELSTRMYKMYGFEGDGRIRFKHHLAAGMDTELKKDNKELPYYNADEKTMFLRLTQKQWNFIVEGPDFEMALDGTVIFKI

SEQ ID NO: 4624 - protein, 1373 aa, synthetic construct
  REGION 1..1373: note = Synthetic
MKRTIGIDLGTNSIGWAIREENQRLENQIINKGVLLFDKGVASDKGNEFPKVQKRTESRGKRRNYQAEKYRKHQLLQYLIERDMCPLSMDELDQWRKYRKGEKRQYPQSIKFINWLRFDFDGDGKPDFHLLNKDKYDSYYAFRALAIDEQFKDVFDSNPHILGRVLYQLVQRRGFKGRDEEEAKTMLTGSKKTGTAGRDEIASYIDTHKSLGAALYYYQKDKGVTTRIRQRYNLRKDYENELAEICRVHGINESDQKKLWKSIIWQRPLRTQKGSVGLCTYEKNKRRVSLSHPLYQEFKTWVLINNLKIIAPAGLDQSTYLKNNIYPLFIRKSDFEITHIVKQIEKDGGRMDSKYASTKQQKTKVVSLSNFYDFEQLFGSDWKGVLKFETSIHDRPSQQTKQVKPEYTIEDIWHVLNTFDDKEKLIEFATNKLNLDQKSAIRFSEIRLNGGHATLSLSAVKRILPYLKQGIPYSSAVYLANMPKVLGSNSVSADLIQFFIDEVSLINERVSNTKTLNQTVNGLIKEHMNDDNRYFIDNNRELDPEEHQLIEDKLSNNFGVKTWTDLDKKMKEQYSSYVADHFKSFLQKRITDKKDIFLPAPRFHQELFNALQEKYDIPDENIKHLWHPSEQEKYSNAKLHHKFSLHGKILFIEEDQIEKFTSNNPNAENELIALKLLGNPEPISQGFKNPMALKTLYRLKQLINYLLQTDQIDEDTKVVIEIARELNDNNMRAAIRRYQNQRERENKKYAAQIEEINQECGTTFDPNDKKLLNKIRLWNEQNKQCLYTGATIHLCDILDGNKYDFEHTVPASMSFDSELKNLTIANTTFNRNVKKKRLPSQLENHEDILQRIEFMKEKVEKLERDLKNKLRDTKTLVDKGKKDMAIQDRHLIKFDLDYWKKKYESFTIEEYKPQWRNSQLRDTQTMTKYALPYLKTVFRNVTVQKGSVVNDFKYIYKVLLDEKKDRNKHAHHAQDAAILTLIPNAFHREKVLEQYNLAKEEYRTYHTSPIGWNNFKASYIIDIEDEVLANNLVDDRTLTQTYKRVRKRGRIVRDEKGRSKWSTGDTIRGQLHSESFYGAIKQPLKDEDGKVQFDKNGHMKLEDEIKMVIKRNLKYKVNPDDDGFKTLDELGKVMVDKVLFEKIKKQIGSTPFREALEKGIWMTDRQSNPVNKIRHVRCFFNALKHTSALPIHEHTYASNKSYKNTTYSKNKMNAYCLYYEGESKGKIDKSIEIISLLELSKLNLTNSQELYTLPLYQSKETKKGTLPLRKILKSGDKFLLYKNHKQELQELNVKQLSQRLYTAYEFEADGRIKLRHHLLAGDLTVAKKQYPEASALNFGSYTPLYRISKGNWNFAIEGIDFNIQIDGQIEFLF

SEQ ID NO: 4625 - protein, 1371 aa, synthetic construct
  REGION 1..1371: note = Synthetic
MTKIIGIDAGSNSLGWAIRDTDIKDNQIIDYGVLTFDKGVASEKGNEFPKVQKRTESRGKRRNYQAEKYRKYELLEFLIGKNMCPLTIEELDKWRKYSKGKKRQYPQSEKFIQWLRFDFDEDGKPDFHLLGKDKDESYYAFRAYAIDEVYKNVYQSNPYVLGRIFYQLVQRRGFRGRDEEEAKTMLQGSEKTGTKGRNDIANYIEEYKTLGSALYHYQKENGGRIRQRYNLRKDYEEELKEICKIQELSDSDSQKLWKAIIWQRPLRTQKGLVGNCIYEKNKKRVAVSHPIYEEYRTWTFINNLKIEPPVGTDRETYLKEKIYPLFYKSSNDFEFKTILNQVKKDRATILSKFGEKTKVISAKLLKSFQDLLGDDWKEKYNWNSISQRDSQPKKKIENGYTFEDIWHVLNTFDGQENLKTFALEKLKLDEEKAEKFSKIKLNKGYATLSLSAIKKILPFLQKGFLYSQAVYLANLYKVLGADKITDDLINYFAEEVKVILETNREEKTLNNIINSLIQDELNEENRYSIEIDRELDNEELRQIQTKIIDVFGEKTWNEFKGEKKSHILNYVSTNFKAFLKKSVLSKHNVFIEQPRLHDQIFALIQEKYQIPIDRKKYLWHPSEQESYVPASEYAYFTLNNKDIYIKEEEKQTFIRKNPNADFQGKSLKLLGSPEPISKGFKNPMALKSLYKLKHLLNYLLQTEKIDEDTRVVIEIARELNDTNKRKAIERWNNDREKENEGFKKIIREINEECGTNYDENDKTLIRKIRLWKEQNGICLYTGATIKNCDLFNGSKYDIEHTIPASISFDSELKNLTLADTNFNRNVKKKMFPTQLSNYEEIKQRLKFMEEKVGNLEELFKEWKNKASYASTKDVKDACIQRYHLIKMDLDYWRAKLHTFTLEEYKTGWKNSQLRDTQIVTKYALPYLKTVFRRVSVEKGSVVNTFKEIYDVKLKNEKKDRSVHSHHAIDAAVLTLIPPHYDRDKILLKYNEEKDIKTGKIYHEKPKYWKDFSASKILKIENEIFINNLSENNTTIPTFKAVRKKGKIVWIDKTNNIKKIAQGDTIRGQLHGESLYGAIKLPKRNEHNQILFDKNKKMILEEEPILVIRKELAYKKDANSPGFKTLEEIEKVIVDKDLFQMIKKQIEEATDFKTALIDGVYMLDKKGNKVNKIRRIRCKETLKFDTAVKVHTQTFQSNKEYKRYTLAKNGENTLCLFYKNQSGKAMNILSIGQVAESKIRNDKRYFEEPFYNQTEIGKGKNKTTIPLYAVLRTGQKVLFYKDSMEELKEISREDLSKRLFKIYQFESDGRIKFRHHLVAGIDTELKKENKEYSSFNIEENSVFLRLTQTQWNFAIDGVDFEIKLDGSIEFKH

SEQ ID NO: 4626 - protein, 1369 aa, synthetic construct
  REGION 1..1369: note = Synthetic
MRILGIDAGTNSLGWSIRDTEVINNQIIDFGVLTFEKGVASEKGNEFPKVKKRTESRGKRNNYRAEKYRKWDLLYFLIENNMCPLSHEELNKWKNYKKGTKRKYPQNDLFLNWLRFDFDGDGKPDFHLIGKNKHDSLFAFRALAVDPNFHSVYKTNPYLLGRIFYQLVQRRGFKGRDEEEAKTMLQGSDKNGTKGRDDIAEFIENHKTLGAALYYYQKETGERIRQRYNLRKDYEAELKLLCQLYDINDEDYQKLWKAIIWQRPLRTQKGLVGYCIYEKNKKRVQVSHPLYEEYRTWAFINNLKIIPPIGVDKQTYIQEKIYRLFFKSSNDFELKTILNQLKKDGGKIDSKFKEKTKVISAKLLKSFQDIFGDNWKELLHWDNINERDSQPSKKQNSSFNYDEIWHVLKTFDSQENLKDFALNKLNLDDEKAEKFSKIKLNQGYATMSLSAIKKILPFLRKGIPYHYAVFLANLYKVLGMETISDKMIDYFIEEFREVEKSNEQTRLLNTVVNSLVLDELNSKYRYSIENDRDLDDSEKKNINAKLIEIFGEKTWLLLSDDEKTASYDYVAKYYKEFLRKSVLSKTNLFMENERIHDQIFNVIAEKYDIPEDKKKFLWHPSEQENYTQAEEYDYFTLNGKPVYIKQIDRENFIKNNKDAEFQGRSLKLLGSPEPVTKGLKNPMALKTMHKMKQLINFLLQEGKIDEDTRIVIEIARELNDANRRKAIEKWNNEREKENLKFSETIIEINKECNTTFNPSDKTLLRKIRLWEEQNKTCLYTGKLIKLCDVLDGNKYDLEHTIPASISFDNELRNLTLTDTEFNRNIKKKQYPSQLYNHVDILNNIQFMKEKIEHLEDLYKEWKNKASYASTKEIKDNCIQRYHFIKMDLDYWSYKYNTFILEEYKSGWKNSQLRDTQIITKYALPYLKTLFKRVSVEKASVVNVFKEVYNVKLLSDKKNRSTHSHHAGDASILTLIPSAFDRERILKLYNEEKDNHTGKIYHEQPKDWKDFSPSYIKEIENVILINNIVENRTTVPTYKVVRKKGKIVWEDKSLDKKRIAQGDTIRGQLHDESLYGAIKLPLRNEENKILFDDNGKMKLTEEPILVIRKDLVYKQNADSPGFKTLEEVEKVIVDKALFEMIKMQVEDAVGFKEALTKGVWMFDKQGNKVNKIRRIRCKGLMKYNTALKVHTHAFTSKFDYKKTTLAKSGENALCLFYKNEDGKAMEILSISDVAQLKFKNDRSYFLEPEYNTKSIGKGKKSKEIPLYAVLRSGQKVLFYKDSIEELKELDNSDLTKRLYKVYQFESDGRMKFRNHMAAGIDTDLKKENKEGASFNFENPSIFLRIRQGEWNFAIDGVDFEMKMDGSLKFK

SEQ ID NO: 4627 - protein, 1367 aa, synthetic construct
  REGION 1..1367: note = Synthetic
MVLGIDLGTNSIGFAIRNPHKKGNQIIDKGVLLFDKGVATEKGNEFPKVQKRTESRSKRRNYQAEKYRKFELLKFLISAGMCPLTMEELDDWRKYTKGEKRKYPQSEKFINWIRFDFDGDGKPDFHQLDKSKHESYYVFRAYAISEEHKDVYQNNSQLLGRVFYQLVQRRGFKGRDEEEAKTMLEGSKKNNTPGRDSIAEYIEKYRTLGAALYHFQKEKGGRIRQRYNLRKDYEYELKEICSVQGIKHSDYTKLWKAIIWQRPLRTQKGQIGLCTFEKNKRRVAISHPLYQEYKTWVFINNLKIKPPSGLDLSDYLKEKIYPLFVRKSDFEIKHILNQLIKDGASIHSKYAHPKMEKTKVVALSNFYDFEQIFGKNWKESLDFESTFDRTAQPIKKQNKGYSIEDIWHVLLTFDSKEKLHEFAITKLNLEEDKAKKFSEIRLDSGYATLSLSAVKRILPYLKRGIKYSSAVYLANLPKVIGIHEITDNDIDYFVEELEELTKSNSRKKLLNSVVNSLIKEHLEEDYRYFIEDNRNLDESENSKIREKLITEFGEKSWEKLDDENQKANFDYVAEHFHSFLKRSISDKTNLFLKLPRFHEELFNTLQLKYDLPDENIKYLWHPSEQDSYPNAETYLKYRLGSKDVFISEKSASTFEKKNSDAFNELVSIKLLGSPEPISKGFKNPMALKTLHKLKQLLNYLLQKGKIDEDTHIVVEIARELNNNNMRAAIRAYQNQRERENTEYAKRIEEINKECQTDFDPKDATLLTKIRLWEEQNRKCLYTGESIGICDVLDGNKYDLEHTIPVSLCFDSELKNLTLANSEFNRNKKRKRLPSQLENYEEIKKNIKFIEDKVDVLEEALRKNLYVTKGIADKAQRDSLIQKRHLIKFDLTYWKAKLKSFKNEEYKPQWRNSQLRDTQVVTKYALPYLKTVFKKVSVEKGVVVNDFKNIFQVQLDQRKDRNKHSHHAVDAAILTLIPDSYHREKILEAYNSAKEINKKYHAKPANWNDFKASYIINIENEILANNLVDDRTLTPTYKKARKRGVVDKTDSGKTKWNRGDTVRGQIHGESLYGAVKQPKRDENNKIAFDQDNKMILEDEIRLVKRRELKFKGPNDSDGFKNLTDLEKVIVDKALFEQIKLQVGNSPFKEAVEKGIFMLDRSGRPVNRIRRVRCFENNLKHKSAIQIHEHRSVPKADYKSHTYAKNEQNAYCLYYEGLIKKKTQKAISIISLYELSKLGLESPNQFYSIPYYSQLEIKNGALPLKAVLKSGDRFIFFKNSIDELKELDKETLLQRLYRAYQFESDGRIKFRHHLLAGDLTQAKKIHSEVSSLSFDKYEPLLRLSKAQWNFAIEGIDFEIEIDGGIVWRD

SEQ ID NO: 4628 - protein, 1360 aa, synthetic construct
  REGION 1..1360: note = Synthetic
MSKYLGLDLGSNSIGWAIRETNLDGNQFEDKGVLTFEKGVASEKGNEFPKVQKRTISRGKRRNYQAEKYRKYKLIEFLIAKGMCPLSIEELDTWRKYDKDKKRKYPQNPEFINWIRYDFDGDGKPDFQLFGADKHESLYIFREKAIDSNFKKVFDDNPMILGRIFYQLAQRRGFKGRDEEESKTIIEGKEHTAGRNRISAYIDKYKSLGAALYNFQKENGGRIRQQYTLRKDYENELKLICDVQNISKDDYKTLHKAIIWQRPLRTQKGLIGNCIYERNKKRAPISHPLYEEYRTWILINNLKIEAPKGENREEYLKNNIYPIFLKASSDFKIKSIIKQLDKDGAKMHARFNEETKVVSATLLNFFKTIFGEDWEEKLNWNNLNDRPKQPTKQTNKKYDYQDIWHVLYTFDDTEHLKDFAKNKLNLSDDLVERFAKFSLKKGYATLSISALKKILPYLRKGFIYSEAVFMANIPKVLGTNEISDGLIEYIAEEIRKILSNNYQQTQIANISNRLIEKNSAPEDFYQIENGRNLDDKEKKLAKDEIINFYGDESWHELSIEEQTEIQNEVESNFLTYLRKSNAERKRDRFIKPKRIHDSIFHFLKETYDLDDSRKKYLWHPSEQENYPAAKEYIKYSLNGETYYVPEENTDIFEKRNPRAEYENASKLLLGSPVPAKNGFKNPMALNTLHRLRKLINHLLAEDKIDSDTKIIVEIARELNTANMRKAYETWQRKREKENEGFKKIIEEINTETKSNYDINDSKLIRRIRLWEEQGRICLYTGNVIQMTEILDGSKYDFEHTIPASISFDSELSNLTLADKHFNNHIKGKKYPTQLSNYDEIKERISFMKDKIKKLKLELKDYQNKASFASSKEIKDNCIVRCHIIRFDLEYWQSKYNYFNVTEFKQSWRNSQLRDTQIITKYALPYLKTIFKKVTVEKGQVVSHFKKILGVDVSDDKKDRSLHTHHAQDAAVLTLIPFNASHRDRLLKKYFEDKKFRTKPENWKDFKAQYIIDFSNDTLINTQTENKQTLQSKKIVRKRGKIQYIDGTNKPKIAQGDTIRGQLFDETFYGAIKQPKKDENGKFLFDKNGNILLEDEIKLVVRRDLLYKKDAQSPGFKNLDEIKKVIVDEALFKMIEKQVKEGDFKTALTEGVYFLDKKGNKVNRIRRIRCFANLKTAVQVSEQDFKSNKEYKNYLLANNAENSACLFYEKDKDRAMQILRLIDLAELKPKSERDFFETPAFNEFEIKKDKKIPLKAVLHVGDRVLFYEKSPKEIYDLQDDYQEFSKRLFVIYQFKKDGRIKFRNHLLADNVTDLEKKYTIKTSFSTSEIPKLMRNTKANWTFLIENVDFKISLDGKIIFLD

SEQ ID NO: 4629 - protein, 1414 aa, synthetic construct
  REGION 1..1414: note = Synthetic
MSNLTLGIDLGTNSIGWAIRDITVKDNQIIKKGVLIFDKGVGEEKGIEFPKVKKRTESRGKRRNYQAEKYRKWALLEFLIEQQMCPLTLDELNSWRKYTKKEGRKYPQTEAFINWLRFDFNGDGKPDFHLFGGDKHESYYLFRAKAVSEEENDGKVFKNNPEILGRVFYQLVQRRGFKGRDEEEAKTMLKGSKDGTTKGRDAIADYIEQYKSLGAALYHYQKEKSSDTEKIRIRQRYNLRRDYENELKLICKTQNLNNDFYSKLHKAIIWQRPLRTQKGLVGLCTYEKNKRRAPVSHPLYEEYRTWVFINNLKIQAPEGWEQSTYLKEIIYPMFYKSGNDFSLSTILKQLNKDGAIINSGYSNRDKTKVLSAKLLKNFEDLFGDKWKNELGWDEAFVREERPKKKTTTRYSFEDVWHILSTFDSEEKLKEFALEKLKLSEEKANKFSKIKLQQGYATLSLSAIKKILPYLKKGFIYSKAVYMANIQKVLGTHEVSTGFIDHFSSEIDVIYNEVATKRKLNNVLNGLFKHELVSEGDYHLSENEDLDVSDRSLIKQKLIDELGEKTWKETNTEEQESYLDYIAKEYKSFLQKPFQAKKGAFIEQPRIHQNIFNYIQEHYEVADENIKFLWHPSEQEKYPNSSIYEKVELKSKTVYINENEVETFLKKNPSAELEGISLKLLESPEPISKGFKNPMALKTLHKLKHILNYLLQTNQIDAHTRIVVEIARELNNANYRIALERWQNQRERENNIFKKTIEEINNETGTTYNSEDKNLIRKIRLWEEQGKKCLYTGDTINKSDLLNGEHFDIEHTIPASISFDNELKNLTLANKNYNANVKGKKYPTQLDNYNTEGVFNGRTIQPIIKNIEAIFGKRTLEKKTVKKRGKTEEVTVVQWSKITDLEKQIDEYVKKTSYASTKEIKDAFIQKRHQLKFDLDYLKQKLQTFTVEEYKANWRNSQLRDTQIMTKYAVSYLKTVFNKVEVQKGNVVNIFKEVYRVKLSSDKKDRSKHSHHAIDGAILTLIPKPAYRDEIIKKYQLEKDNRTGRTYHEKPVDWADFTPSFIKNIEKEILINNLKDYRTLTPTFKKVRKRGKIDYDDNGNVKWAKGDAIRGQLHGESLYGAIKQPKRDDLGKIIFDENKKMQLEDEVRLVIRKPLLYAKDAASPGFKKLEDIEKVIVDQALFQIIKNQVSKSESFKDALEKGIYMLNKKGEKVNRIRHIRCFDRLKHATAVQPHQHTFVSDKEYKQTTYAQNGENVYCLFYKGNVKGKEERAISIIGIFDLAKLDIQNEREFFEIPHFNSVVKKKTQLPLYAVLKAGQKVIFYKESLQELTELTKEELSQRMYKMYQFESDGRIKFKHHIISGSNTDIKKDYGEKSLMHFDDFSPLLRITSSGWNFAIEDKDFEMRLDGIVKWKF

SEQ ID NO: 4630 - protein, 1087 aa, synthetic construct
  REGION 1..1087: note = Synthetic
VGNDFSLKSILNQLDKDEATITSGYAIREKTKVLSTKLLKQFEDIFGENWKENLGWNDAFVRNAQPTKKNSSYYTFEDLWHVLFTFDSEEKLKEFALEKLKLEKAKAEKFSKIRLQQGYATLSLSAIKKILPYLQKGFTYSKAVYMGNLQKVLGTHEVSDEFINHFAFEIDKIYESVSTERKLNNVLNGLFRTELVAEGDYHLGEHEDLDTSDVNLIKQHIVAVLGDKTWGEIDEDQKEEYVNFVKEKYKEFLQKPFQAKKGSFIEQPRIHDAIFKYLQEHYPEQVPKKNIQYLWHPSEQEKYPNSDTYQEINQKGKVFYIKESELNSFLHRNPHAEADGISLKLLRNPEPISKGFKNPMALKSLHKLKQLLNFLLQTQLINAHTRIVVEIARELNDANYRKALEQWQSEREKKNQKFRDTIEEINQECNTSFDPNSKALIRKIRLWEEQGKKCMYTGAMINKCDLLNGEYYDFEHTIPASISFDNELKNLTLADKNYNSNIKGKKFPTQLDNYDSEGDFNGKPLQPILKNIEALFGKRSVEKKTIKKKGIQKEITIEKWSKIAELEFQLSKLSSLRGVEPKDKRDSLIQKRHKLKFELDYLKQKLQTFTIEEYKASWRNSQLRDTQIMTKYAVPYLKTVFNRVEVQKGSVVDIFKEVYNVKLRSDKKDRSKHSHHAVDGAILTLIPKAAQRDKIIKEYQLRKDEGFGEIYHETPKEWDNFKVSYIKNIEEKTLINNLKEHRTLNSTFKKLRKRGKIDRKENGDPKWAKGDSIRGQLHDESFYGAIKQPKRNEDNTIIFNEEKSMVLEDKIRLVIRRPLAYAKDNNTPGFKKLDEIEKVIIDKALFQIIEKQVEDAGSFKDALQTGIYMLNRKGEKVNKIRHIRCEFKGLSYNAAVKPHKHVFISDKEYKHSTIAKGGNNIFCLFYKGEIKGKEERAINNIGIFDLAKLEIEDEKEFFEIPHFNFIQKKKSQLSLYAILKTGQKAIFYKESLEELMELDEKELSKRMYKMYQFERGKGGDKIKFKHHLISGPNIDIIKKLPKEYKEASPFGSFEEQPLMRLTAGNWNFAIEEKDFEINLDGSINWNI

SEQ ID NO: 4631 - protein, 1390 aa, synthetic construct
  REGION 1..1390: note = Synthetic
MNKTLGIDMGTHSVGWAIRDTSSEHNQIIDYGVLTFDKGVASEKGNEFPKVQKRTESRGKRRNYQSEKYRKWELLEFLIEKQMCPLTINELNKWRKYIKGQKREYPQSHEFINWLRFDFDGDGKPDFHLFRKDKNESYYIFRAFAIDEEFKPIYLNDLYILGRVLYQLVQLRGFRGRDEEEAKTMLQGSEKTGTAGRNEIAEYIDQYKTLGAALYYYQKDRGGRIRQRYNLRKDYEDELKEICRVYDISENDYQRLWKAIIWQRPLRTQKGLVGLCIYERNKKRSPISHPLYEEYRTWIFINNLKIEPPQGVDKGTYLKEKIYPLFHKSSNDFELISILNQLRKDGAKMTANFHEKTKVISAKLLKSFKDILGEKWKEEYKWNSIYNRDDQPKKKTDKNFSFEDIWHVLNTFDGQENLKKFALEKLKLDEEKSEKFSKIKLNRGYATLSLSAIKKILPFLQKGFLYSHAVYLANLYKILGSEKITDDLINFFAEEIDKIICKNKKEKTLNNIINDLIQVELNEENRYSIEVDRELDSDELNRINAKVVEVFGEKTWGEFEEDKKENYLNYISIHFKEFLKKSILSPKNIFVEQPRLHEQIFVFLQKIYNVSDEKKKYLWHPSEQDEYAAASTYHQYTIRNKDIYVTEYKVQSFLKRHPSAESQGRSIQLLGNPEPISRGFKNPMALKSLHKLKQLLNYLLQAGKIDKDTRIVIEIARELNDTNKRKAIERWNNEREKENESYKKIIREIKNECKIDCDENDKTLIRKIRLWIEQGRRCLYTGEVINSCDIFSGTSYDIEHTIPAKISFTSELKNLTLASTNYNRNIKKKLFPTQLPDYDTEIKPRLKFMEEKVEHLEHLYDEWKKKSLYATSKDVKDACIQRYHMIKFDLDYWKSKLHTFTLEEYKSGWKNSQLRDTQIITKYALPYLKTVFKKVSVEKAEVVHCFKEIYNIKLPYEKKDRNVHSHHAIDAAILPLIPPFYDRDKILEKYYDEKDRKTGNVYHEQPKDWNDFSASKILFIENKILINNLSENKTTLPTYKQVRKKGKIEYLKYKDENGEQHFRLDKNGNKIIKIAQGDTIRGQLHGASFYGAIKQPVRDKKNKFVFDENGKMILKEEITLVMRKDLVYKKDADSPGFKTLEEIEKIIVDTDLFQMIKEQVDSSDIKTALTNGIYMLDKKGNKVNRIRRIKCKESLKYETAMKVHTHSFKSNKKYKQQTLAKNGKNALCLFYQNEKGKVMNILSISQVAELKFRNDRQFFGEKNYNQFEIGKSKNKSNIPLYAVLRTGHKVLFYKDHITELKELLKEDHPEKHFSKRLFKIYQFESDGRMKFRHHLAAGIDTELKKDSEEFSEFKLENNPVFLRLSKKQWNFAIENVDFEMKLDGSIEFKF

SEQ ID NO: 4632 - protein, 1404 aa, synthetic construct
  REGION 1..1404: note = Synthetic
MSKVLGIDLGTNSIGWAIRNTDLAENQIEDFGVITFEKGVASEKGNEFPKVQKRTQSRGKRRNYQAEKYRKFALLDFLIEKDMCPLTREEFNNWKLYKKGKRKEYPQSEVFLNWIRFDFDGDGLPDFHLFGKNKDESYYIFRAFSVDEKYKNIFADNSHILGRVFYQLVQRRGFKGKDEEESKTILEGSKDGNTKGRDSIEEYLEKYKTLGAALYNYQKDFGGRIRQRYNLRKDFEFELQEICKVHQISPSDYKKLWKAIIWQRPLRTQKELIGNCIYEKNKKRIAVSHPLYEEYRTWTFINNLNIVVPFGEDQQDYLSEKIYPLFYKSKPDFELIDIDKQLKKDGGKRQSKHNEKTKVLSVKLLKQFQDIFGEDWKKLLKWDVIGNRDSQPIKRDNATYTFEDLWHVLFTFDGQENLKKFALEKLNLDEEKATKFSRIKLQQGYATLSLSAIKKILPYLQKGFLYNHSVYMANLHKMLNENTISESLINYFADEISRILKDDSFNRKNAAVINGLISEMLNDENRYYISDGRNLDEREKETVFKGVINHYGLETWDRFSEPMKTEIIDFISAKYLEFLKKTYTQKGNLFVQQERIHDQIFTFLQETYNVPEDKKKYLWHPSEQENYIVAEEYQEFSIGNKKYYVKEQNYENFLDKNSNAESEAKRIKLLGDPQPLSKGFKNPMALKSLYKLKSLINYLLQIGKIDEYTKVVVEIARELNDKNKRKAIQIWQKDRENQNEAYKKELEAYRQAFPNINLIDENTLIRKIRLWHEQNKICLYTGKPISFTDLIIGNKYDFEHTIPASISFDNDLKNLTISDSTYNRVYKGRKFPTQLPNYESEQKIDGKIYNSIIRNIEFIFGERTVENKEIKGKNEEIVKWKKIDELEKQYDEWKKKASYASTKEIKDNCIIKYHTIKMDLDYLKSKLASFTITEYKAGWRNNQIRDTQMITKYALPYLKTLFRKVSVEKGAVTDIFKKVYKVQSKEEKKDRSIHSHHAQDAAILTLIPNAFHRERIIKAYENEIDNRTGKTYHEIPMDWKNFSEKYIMELKDKIIINNLTDNRTITQTYKTVRKRGKIIYDIDKEGNSSKRISRGDTIRGQLHGETFYGAIKQPLRDEENKILFDEDKKMILKEEVYLVIRKPLVYKKDANSPGFKTLEEVEKLIVDRALFEMIKIQVKESDFKTALTDGVYMLDENGNKVNKIRRIRCFEKGLKYTTAIKIHKHSFTSNKKYKEATLVTNGENTYCLFYKNDQGKAMRILSIVDVANLKLKNIQTLYSEPEFLSFESGKGKKKIQIPLYSILKSGDKVLFYKDNKYELKDLEQTDLVKRMFKIYQFEKDGRIKFRHHLVAGIDTELKKSHQEYSTINFEDNPVFLRLSQAQWNFAIQDKDFEVSLDGKIHWKF

SEQ ID NO: 4633 - protein, 1079 aa, synthetic construct
  REGION 1..1079: note = Synthetic
MTPSINPNLILGLDLGANSLGWVLLDAPDGKPAGIRDAGVRVFEAGVNLLEKGEKASRSLDRRQARGRRRLLDRGARRRRKLLHALQRAGLLPAGELHGHLRPNDPANPVSLVFLDTAADPYHLRAQALDRKLELFELGRALYHLARRRGFLSNRKAPRKDEEKKGVVDKETKVLEAEMKNAQFRTIGAYLASLDPLEARRRGRYTLRKWFEDEFDAIWAAQQPHHPETLTEVLKKSLLKTIFHQRPLKSQTRLIGVCELEKRPVNVLKKLKNGQDRRMTVYAGPKRAAMASLPAQRARMLQTLNDLRVVEYGAERPLEPEERSRILDALDRADELKLTTIRGKTLLNLPRFAKFNFEAGERETIPGNDTAAQLRKAFGEKWDAMTPDQQDLIVTDLLSIQKDETFVKRAAKYSEKYSLTDEQRKALDKFTPEDGYHRLSLRALRKILPHLEQGLSYPKALEKAYPGRVSTDALDFLPAADPLRNPIVQRAVAELRRVVNAIIRKYGKPGTIRIELARELKKTQKQRDEIGKQNATNRRGRDKAREAVIRETGQPNPTSYLIEKYLLWEECGGICPYTGKSIPLSGEQGLFGGHPAFDIEHIIPFSRSLDNSFFNKTLCCVDFNRNAKRNRTPWEAVGEAMEAGDPAMKQQWSNMIDSVKRFKSDKDMRDAKLERFKFKTVPGEESFLEEFSTRQLNDTRYASRQAREYLGLLYGAEAVKRVQPLTGQVTAYLRSAWKLNRILDGDGVKNREDHRHHAVDALCAALTSTATVHQLHTAAGRGVNVFRPGTFPAMEEPWPGFLESARAAVSKILVSHRVSRKVSGPIHQETLYGEIIRPDTAATAEPQKCAVLRTPLIKLDEKNLSDIVDETVRKTVKDHLAKLAADHGIDITKAVKLLGNEENLPFLTAKDGRRIPIRKVRVFVRAKPFSIAGGDHQRLVILGNNHHLAVYEARDKKGETIWREEVVSLKTAMERARDRKPGARHGEPVVAPLDAQGNKLLFSLVIGDAVEMEIEGEKSIWIVRSISQNDFHFKDPHDARLAKDINKEGGLRIRSINRLRDAKCRKIHLSPLGEVSSAR

SEQ ID NO: 4634 - protein, 1072 aa, synthetic construct
  REGION 1..1072: note = Synthetic
MTPSINPNLILGLDLGANSLGWVLLDAPDGKPESVRDAGVRVFEAGVNLLEKGEKASRSLDRRQARGRRRLLDRGARRRRKLLHALQRAGLLPAGELHGHLRPNDPANPVSLVFLDTAADPYHLRAQALQRKLELFELGRALYHLARRRGFLSNRKVPRKEEEKEGVVDKETRALEAEMKAAGFRTIGALLASLDPHEARRRGRYTLRKWFEDEFEAIWAAQQPHHPETLTQALKKSFFKIIFHQRPLKSQTRLIGVCELEKRPVSVVKKLKNGQDRRMTVYAGPKRAPMAALPAQRARMLQTLNDLRVVEYGAERPLKPEERSRILDALDRADELKLTTLRSKTLLNLPRFAKFNFEAGERETIPGNDTAAQLRKAFGEKWDAMTPDQRNLIVSDLLSIQKDETFVKRAAIYSGKYSLTDEQRKALDKFTPEDGYHRLSLRALKKILPHLESGLSYSEARQHAYPGCAAPDALDSLPAAAPLRNPIVQRALAELRRVVNAIIRKYGKPGTIRIELARELKKTQKQRDEIGKQNAKNRKARDKAREAVVRETGQPNPTSYPIEKYLLWEECGGICPYTGKSIPLSGEQGLFGGHPAFDIEHIIPLTRSLDNSFFNKTLCCVNFNRNIKRNRTPWEAVGEAAQAGDPAMKQQWANMIDSVKRFKSDKDMRDAKLERFKFKTVPGEESFLEEFSTRQLNDTRYASRQAREYLGLLYGAEAVKRVQPLTGQVTAYLRSAWKLNGILSGDGGKSREDHRHHAVDALCAALTTRAVVHQLHTAAGRGVNVFRPGTFPAMEEPWSGFIEHARRAVTDIMVSHRVSRKVSGPIHQETLYGEITRPDTAATQKPERAAVLRTPLIKLDEKDLDDIVDETVRKTVKDHLAKLAADHGIDITKAVKLLENEDNLPFLTAKDGRRIPIRKVRVFVRAKPFSIAGGDHQRLVISGNNHHLAVYEGRNKKGETIWQEEVVSLKTAMERARKHEPVVAPKDKDGNKLLFSLVIGDAVEMEIEGEKSIWIVRSISERDFRFKPPHDARLAKDLNKEKSWRICSIGSLQSGKCRKIHLSPLGEVSSAK

SEQ ID NO: 4635 - protein, 1127 aa, synthetic construct
  REGION 1..1127: note = Synthetic
MAAQKKGRPDRSHGDRLCRALGPRVSVAQCLRIFFLLRKDADGDWLHCKHYLLFSISLSSHSKDSEMANLVLGLDLGPNSIGWALLGDGAEGDSQLVDMGVRVFPEGVDAFDTAKERSRNEDRRINRGMRRQIRRRARRKRLLQAALVESGLWPVDAAAQEEALAVDPYWLRAKGVSERLEPYEIGRVFLHLNQRRGFLSNKKKDRGDKEVQGMLAEIKHNEELVALGGFETVGQLLAEKCAALDHTARQEDDEVRNRHLSRRQLVDEFHTIWSKQATFHPQLLTDKLRDGTVGGTMEPRKAVPKHDPRRNKLSDLKAFGLFGLIFFQRRMYWPKSVVGLCELESKEKRCPKGDRRAERFRVLQEVNNLRYIDTAEGDEQPLSEEQRRLLIDYLSDREKATFDQIRKKLGFLESVKFNFERGKRTALKGFLIDWMIAKETDKSWYDRPEAQRDEIVRILLDNERDDERILTTLIDKYGFSTVAAETLLEIDFPPGYGSLSLKAIDKLLPSLERGLVYQSISDPEESALHAAGYLRRDELQRRLFDKLPNLARTRPADCKLGDIPNPVVKRALVELRKVVNSIVVKYGKPSAVHVEMAREVQMGAERRKEITARMRAREAEREKAAEAIRKMGYAARRDSVTKYMLWQEQGHECVYCGKPISQTQLFGGEIDVDHVLPYSRTLDNSQGNKVVGHVKCNHLKGNRTPYEWLAAGDAVRYAEVCQRAAALLQKGMMPYGKYRKFLQKQLDLDKFIARQLTDTGYITRATVEYLRLLFEKDHEVLGLKGQLTAELRWQWGLDKILEELPDSPAWIEKNDLRPGEKNRADHRHHAIDAIVVALTNRKRLHKLSELVRRGGAKKHGEILEEPWPDFRDTVVERVKGLKVSHRVERKVRGALHEETLYGPTPTEGEWVVRKPVENLSPAEVERIRDAGIRTIVLESLRKRGIDFGRGKKPDAKKMKEALSNLRMPSGVPIKKVRILKQEQTIQPLRDAPEHQAYVKPGSTHHLCIFEFEEKGKKKRKAIFVTMLDAAKRQKRGEPIISRTHPERPDAKFIMSLSSREMVLANWNGEQKLLVYKTAASTQGQIYFAEHTDARRSSDQAKFVASANSLDARKVTVDPLGRIRWAND

SEQ ID NO: 4636 - protein, 1087 aa, synthetic construct
  REGION 1..1087: note = Synthetic
MSKVVLGLDVGPRSIGWALINDDPKTPNDSKIIDLGVRVFPEGVDAFDTFKEVSRSEQRRIARRRRRQQRRRANRRRMLKGTLLELDCWPTDESEQESLYQLDPYVLRSKALDEQLTLHEIGRVLLHLNQRRGFKSNKKEQAKAEAKAKRKQPENTNVPDADKKPEDLLLEMQELEQAIKDSTARTLGEYLCKKQLAFDHAVRIEDDHIRGRHTLRKMLMDEFDQIWNKQAQYYPLFTEQLRDGKVGRQRDIHKPLPKDRVFLDKQGTVKNPRFEMSDLEAFGLFGLIFFHRTLKPVPKEIVGLCELEPKQRRCARADRRAQYFRLLQEVNNLRYIDPDLNQEGKLSDSQRKLLLKYLETREKATFDEIRKTLGLMESITFNLERGNKSHLKGMTTDWLIAKSYGKDWHELPGEIKSGVVEILINSVDEEATHQILTNRFSFTAHQADAIQAVDLPEGYSKLSVMAIEKLRPFLEQGMVYMAEDVKNSALQAAGYFRRDQLQRRLFDKLPDPRRTASSPIGDIPNPVVKRTLTEIRKVVNAIIRVYGKPDVVHLEMARSLKMSAEKRKEYNKRIRDRENARNTVAETLRENGARPSHESILRYLLWEAQNQECVYSGKPISLNQLLGDGGGVEIDHLLPYQRTLDDSQANKVVCFRTSHADKGNRSPYEWLAGSDKDKYRAICQRAKQLVYPKYRRFLQKELQLDHFIARQLTDTSYITKATAEYLQCLFEKEHAVLGLKGQLTSELRWQWGLETVIEELPDSPAWHESANLRPGEKNRADHRHHAIDAVVLALTTRSRLQKLSQLVKSGGAKKHGETLADPWENFRDDVLQHIKQVNVSHRVDRKVRGALHEETLYGRTQTRGEWVVRKPLENLSANEIEKIRDETIRNLVMVQLKEHGVEFGRGKKPDRKKLKAALANMTMPSGVPIKKVRILRSEQTIRPLRGGESVAYVKPGSMHHLCLFEWEEKGKKKREAVFVSMLEAIDRLKSKQQIIQRTPSVNHETIPAEARFIMSLASREMVVVNENDEQRLLTFQTAASTIGQMRFIAHNDARKSKNLSLINFSASTLSGRKVTVDPLGRIRWAND

SEQ ID NO: 4637 - protein, 1077 aa, synthetic construct
  REGION 1..1077: note = Synthetic
MPRTLGLAIGPRSIGWALVDDDRDASAPRGLIDMGVRVFPAGLYAFDTFNEKSLAEARRAARLLRRTGRRRAQRARRLRRALVGCGLWPGDPERQAAETAKDPYLLRARALREPLEPFEVGRVLLHLNQRRGFCSNRRRERGDAEVKGLLAEIRQNELEREAGGHATVGAMLAAKRAVQDPRRREAGDHVRKRRFSREQLEAEFEAVWRAQAPHHPGLLTEALRVGALGGQRRPRRPVPRRHPDRAGLGDLEAFGVHGLIFFQRKYYWPRSAVGRCALEPKRRRCPRADRQAELLRVLCELNSLRYTVPASGEEFALDQPQRTGLLGLLSRKPRVTFDEARKHLGLPASARFNLERGKRASLAGRSTEAALAKATGAGWRRRPEDEKDAIVRLLLDDDLEDEALVGRLVSGFGMTPEQAAKAAAVELPSGHGPLSRQAIDNLLPHLQRGLPYQSPSEPEHSALHAAGYLKGGASGRPALDALPPLERTPPADPVGGDPASPVLRRVLVELRKLVNAILREHGKPEVVRLALARSVKLGKQKRGELARRGREALAQHKAAAQAIGALGAPAGPEAVRRYLLWREQAGGCLYCGEPIGSEQLLGEGVVVNPILPLTRTLDDSRSNQLVCHRACVQTKAEQTPHEWLAAARPEAYAGLCERAGLLMRRGVLPYAKQRRIVREGLELERHLVRQLYDTWHTTRATVAYLRLLYQKEGAVLGYQRKFIPELRRRWGLESVLRELPDSPGWPNAAGLSDGGLNNGGLDNGGQSDGGQSDRDNDRADHRSQAIDALVIALTSRARLRRLAASVGQGGTLAPPWEGMREQVAQRLRTMHVSHRVERKARGALHEETQYGPTPNPAEWVRRKPVEDLTANEVALIRDPGIRRIVQEALRKAGLESGRGKKQDVRRMRQALGGLRMPSGVPIKRVRLLRPDASVRPLRDPASPGQAFVRPGSVHHLCLFEFDQDGKPKREVLVVSLLEAITRLRRGERMIQREHPSRPDARFVMSLASREAVLADWKGTQLLLVFKTATTVHGQIYFALANDARRSNDQTNYTARASTLVAKKVTVDPLGRIRRAND

SEQ ID NO: 4638 - protein, 1071 aa, synthetic construct
  REGION 1..1071: note = Synthetic
MSNLVLGLDLGPNSIGWALVRDDDAGEIVATGVRVFPEGVDAFDTSKEKSRNEDRRIARGMRRQIRRRVARRRKLVDALIKSGLWPAGSAPQEALYRTDPWELRVRGLTEALTPHEFGRVILHLNQRRGFWSNRKRDREDKEAEGMKAEINANRTKQREAGLDSIGAYLAPKLRKTKEDHCAPRGETDERKVRGLHLGREDIYGEFDALWKKQAECHPGLLTDTLRWGTLGPINTEKTAIAAHKPIPKHDERRKGKSDLEAFGIHGLVFFQRPIFWPKSVVGLCELEPKQRRCPRADRHAEQFRLLQEVNNLRYADPDSNEEQPLLTDHRAVLLDYLATMEKATFDQIRKKLGFLDSVKFNLEHGKRAAIKGMTLDWLFAKQLGKDWHKRTDDEKDAIVTLLRENESDDDLVIERLINEFGFDAKQAEAALDINLPVGYVNLSRMAIDKLLPHLERGLVYQSLSDPEVSALHAAGYLRRDELQRRLFDKLPDLRRVNPADCKLGDLPNPVVRRALVEVRQLVNAIIREYGKPDQVHVEMARGLAMGPKARSEYNSRVRKNEAAREEAAKAIRNVGERPSRDAVMKYRLWQEQAHECIYCGKTISQEQLFGGATDIDHVLPYSRCLDDSQGNKVVCHRECNHEKGQQTPYEWVADRDRPRYDAICQRAGSLLRKGLLPYPKYRRFLQKELKLDGFIARQLTDTGYICRATVEYLQLLFDKPSCVLGLKGQLTAELRWQWGLDTILSELPDSPAWQASKKLRDGEKNRADHRHHAIDAIVVALTNRSRLQKLSELVKRGGGRSHGEILFEPWNGLRDEVAKKIAAINVSHRVERKVRGALHEETLYGPTEHQDEWVVRKPVDTLSITEIARIRDLGIRNIVIEKLGEAGMEVTSGKKLDPKKIKQALANLRMPSGVPIKRVRILKHDQTIAPLREDGSPYQSYVKTGSTHHLCIFEHDVNGKKVREPIFVSMLEATARLKRGQPIIQRTHPRRANAHFVMTLATRECVLANVNGTQRLLVFVTSKSTTGELRFVDANDARRRKDQRLIYCTPNTLNARKVTVDSLGRIRWAND

SEQ ID NO: 4639 - protein, 1032 aa, synthetic construct
  REGION 1..1032: note = Synthetic
MPDLTLGLDLGANSIGWALIDETGQRLVATGVRVFPEGVDNYDTGKEAPKMQERRIKRAMRRLIMRRAARRRALRRLLADAGLCQADDPRLWTEDPYELRRRGLDEPLTGVQFARVLIHLAQRRGFKSNRKTDRAREADDKGVLGEINWVQQQIAVSGSRTLGEMLAKVRAGEWHSPDAVKLHTRVRAIHTRREMFLHEFDMLWERQKSFNSPLSALLTDELKLRLNNPAKDDKWMHKGILFGQRKLYWPKEVVGRCELEPRLARCPRADRLAQRFRLLQEVNNLRYYDPDAREERTLTQEQRALLLDKLSRTATMDFDAIRKALGFIDSIRFNLERGQRPALKGLPVDAALACKEIFGRRWHEFSEQQKDQIVRTLIDESDEDLRRIAVEQWGLSPQAAEKLLTVELPDGYAALSRQALEKLLPHMERGLLYMTADGTPCALSEAGYLRPDQRPRKTLPFLPAPPEVANPVVRQALHEVRKLVNAIIRQYGKPARIRVELAREAALSADQRRKASKRRQENEDERNRAADTIRQAGGTVSRDAIERVLLWQEQDGACIYSGRPISLAQLLGGEVDIDHILPRSRCLDNSRQNKVVAFRDMNREKGNRTPREWLEADPARYDQVLQRASRLSYAKRRRFIQKELDLDQFVQRQLNDTRHLSRVVRQYLDCLVEQPHHILCPKGSHTAELRRHWGLDTILQSLPDSPAWQAADDLQPGEKNRADHRHHAIDAVVLALTDHKRLQQLARIQRQGGTRATGQVLPEPWPGFRDAVLQAVQSINVSHRVQRRVAGALHEETIYGPVFQRRLGLGIVQKPGEFVFRKPLESLSAPEIEHIRDKTIRQIVIDRLKERNVAFGRGAKKKTIPSSVWNPPLAMPSGVPIRKVRLLKYDQTIQPIRNGTAYVKTGSIHHLCIFQFTENGKRKREAVFVSMLEAAQRIRLRQPIIQRTHPTRPNATFVMSLSRGEMVLGTFKGKLRLVKLKTAVSTEQKIQFVEHTDARRGNLAQIISVTPNTLKGEKVTVDLLGRIRRAHD

SEQ ID NO: 4640 - protein, 1104 aa, synthetic construct
  REGION 1..1104: note = Synthetic
MATTLGLDLGPNSIGWALLDETHILGTGVRIFPEGMDKFDTGRDESRNEQRQIARGMRRQTKRRNQRKRLLREALIQAKLWPTDPKTQNELYELDPYELRSKAASEKVSAFELGRICLHLGQRRGFLSNRKKDREDSEVKGMLAEINKLEADIEKASCKTLGQLLYLKCINFDHAKRVEEDHIRNRHTQRSMLATEFEVIWEEQAKHHPALLTKTLRYGVSGEPAKYPIKPRHKAKGQTLLEAFGVHGMIFFQRPMYWPASMVGLCELEPKQKRCPRSHRMAQRFRLLTEINNLQLTDNTQSPPTPRRLTDSERAYVLDQLQTKKDATFIQIANWIAKLPDSPPAESIQFNLQKGKRAGMKGMVTDAMLASKKVLGESWHKRDEEQKTAIVELLLSIEHDEEQTVTILVEQYDFTTEQANAAVSVNFPDGYLHLSKLALSILLPHMEKGLVYQALDESNSALNAAGYLRRDQLKKRLFDKLPRQDAFNCPLGDIPNPVVKRTLTELRRVVNCIIKEYNMPDDIHLEMARSVSMGTQARKEFSKVRSEREKMRNDAANEIRKLGFKVSREAINRYLIWDQQNHECMYTGNKISQTQLFNGEVDVDHILPRSRSLDDSQSNKVVCFRSANADKGQRTVYEWLAASDPKRFDEISTRALAFVKNHGFPYGKFKKLIQKNVDVDSFIARQLTDTGYIAKATRQYLACLFEDDKHILGLKGQHTATLRHQWGLNNILRHDDINQKSRDDHRHHAIDAILVAVTNRSRLQQLSKGYQEVEQIDYTTGEVQYRQAHKGPALDEPWENFRSDVESAVNEINVSHRVNRKISGQLHKDNPFAPVKDREGKTIANTYVKRKLVETLTTTEIEAIRDETIRTIVKNALKVSGLDIDSPKKPDKKKMQEVLSQVTMPSGVPIKKVRVLTKDQTIQPIRTKRSEKANDPTQIAYVKPGSTHHLCIFEWEEKGKTKRDAIFTSRIQAMDILKQQQQFVTEKVSQLDQKPKSASAKKVIHSQFYKQASEKFPLIERQHPTRKHAKFVMSLSNGEAVLANWKGQQKLLVLRTSISTNKNVIFIEHTDARREYSKHKTSTNLLSARKVTVDPLGRIRWAND

SEQ ID NO: 4641 - protein, 1063 aa, synthetic construct
  REGION 1..1063: note = Synthetic
MSGLVLGLDLGPNSLGWALVDESEGGKGLIDCGVRVFPEGVDNFDTKKETPRNEARRIARGMRRQIARRARRKRRLREALIASGLYPAGPGEQKKLEGLDPYELRARALDEPLKPYEIGRILLHFGQRRGFLSNRKRERTNNEVKGMLAEMSALQADIEATGARTLGEYLHRKSREMNHCKRVDNDHVRRRHTRRDMLSYEFDRIWKEQSKHHAGLLTDKLRYGASGAAQKFPSLPRRRKKGQSFLDAFGVEGLIFFQRPIYWPRSVVGKCELEPKQKRCARADRRAQRFRLLQEVNNLRYIDPDTNQERSLSPEHRDTLLKKLSRSKEMDFDKIRKALGLHESVQFNLESGKRKKLWGMVTDSLLAAKGAYGPKWHELAEQTKNRVVELLVLSTDDDETAERLIEECGLTRSQAESVLGVDLPQGYIHLSVMALNKLIPPLERGLKLMGNDETDSAMHAAGYMRRDQLQRRVFDHLPDPTRARDARIGDIPSPVVKRAIVELRKVVNAIIREYGKPAAVHVELTRQVRQGPEARREYTSRIREIEEERAAAADEIRKLKIGGASVAVNRDSILRWLLWKQQNHDCIYCGNKISQAQLFGGEIDVDHILPYSRSLDDSQMNKVVCHRNCNSDKGNQAPYEWLCDKNPKKYAEVLQHALSLVRRGTLPYKKYRRISQKDLILDDFIARQLTATGYITSATVEYLKCLFENEHAVLGLKGELTAELRHQWGLDDVLSSLPDSPAWQEQADLRSGEKNRADHRHHAIDAIVVALTNRSRLQQLSRIRKRGGGDRADEALPAPWASFRDDVVAKIRDINVSRRAKRKVAGALHDDNPFGKTQRPGYFVKRKPLIELSPSEIDKIRDAAIKDIVKGELSRAGIIAGRGKGVDGGAMKKVLAELTMPSGVPIKRARLLVPSETIRPIREKTPHEVQVNPMSTHHLALFEWDEGGKTKRKAVFVTMIDAIKRLKCHEPIIQRNPPNNNAGIPQNARFVFSLSGGELVLVDVGGNKKLLVFDTAAQTSQQMWFYEHTDARKHKRLYSFMPNTLKARKVTVDPLGRIRWAND

SEQ ID NO: 4642 - protein, 1085 aa, synthetic construct
  REGION 1..1085: note = Synthetic
MGKKSTPSNWGNAHFFRRGGSVMPNLTLGLDLGPNSIGWALVDEERQTIVGLGVRVFPEGVDKFDTAKEVSRNEDRRTARGMRRQVQRRARRKRILAEQLTRTGLLPEQPNELESLMGQDPYELRARALSEKLTPHELGRVFLHLAQRRGFLSNRKRDRGDSEVKGMLAEIEALSEAMATGNEPQMLGQLLAAKLRNLDHANRTDDDHVRHRHTERRMYEEEFERIWERQRGFGHEALLTDPLKYGRAGRQKFPGKPRPRPRGTSPLEAYGIHGLIFFQRPMYWPKSAVGLCELEPKQPRCPRAHRHAQWFRLLQEVNNLRYVDLGDGRRAEQPLSAEQRTLLLAKLAEKDRMTFDEIRKALGFLETVRFNLERGKRPSLAGMTVDVRMAKAVGKQWHEREEDEKDAVVRLLLDNEADDDETLGRLRERHGMTAEEADAALGADLPAGYVMLSLKAIDKLLPHLRKGMVYQSASNPEQSALHAAGYMDPKSLRRRIFDVLPDPVRMRDCPIGDIPNPVVRRTLVELRKLVNAILRQYGKPAAVHVEMGRDVKTRPQQGTEAHRRYQDQLARMRDNEQRHAQAAEKLRERGMKPNRDARIRYLLWEDQNHTCAYSGEPISLDQLYGGQVDVDHVLPYSRCLDDSQGNKVVCFRRENDAKGSRTPYEWLAAAQPDRYEQICQRASRWMKDGRISYPKYRRFLQKELKLDDFIDRQLNDTRYIARATGEYLRCLFEAGHAVLGLKGQLTAELRWQWGLDTVLAELPDSPAWQQQSKLAPGEKNRADHRHHAIDAVVIALTNRRRLQQLARIRQRSGDGRPDEILIDPWQSLRADVKKAVAGLLVSHRAQRKVRGKLHEDTFYGPTEKEHVWVMRKPVTDLSPDEIERIRDVGIRRLVAERLKREGIEFGRGRKIDAKRFKQLMADLKMPSGVPVRKVRVEKPEKTIRPIRTGGPDEAYVKPGSTHHLCIFEFDERGKTKREAVFVTMLEAVHRLKRQQPVIQRTHPTRPNARFVMSLSAGEMVLAEWNGEQKLLVFRTAPATAQQLRFSEHTDARASSDRQLFRARPNTLDARKVTVDLLGRLRWAND

SEQ ID NO: 4643 - protein, 1061 aa, synthetic construct
  REGION 1..1061: note = Synthetic
MAGFTLGLDLGPNSIGWALIDEENQKIINTGVRVFPEGVDQFDTAKEVSRTEDRRIARGMRRQIKRRQRRKTQMRQTLVEAGLLPADPAALEAVLAGDPYELRDRALREKLSPHELGRVFYHLAQRRGFKSNRKKDRADKEVAGMLAEISQLEASIRQSGCQTLGQWLCNKMREMDHRRRRDDDHVRGRHTRRDMYETEFDAIWQAQCELGNAGLLTDALKCGQRGKQTYPARPVPCKKGRSLLAEFGLDGLIFFQRRMYWPRSVVGACELEPKQKRCPRADRRAQRFRLLQEVNNLRYVDTESRDEEQRLTAEQRTLLLDKLEKTEKMTFDQIRKALGFLDSIKFNLERGKRSQIQGMVVDARLAKATGKSWHRRSEEQKNEIVRLLVDNEQNEAALEKRLVDEFGMSPEEAEAAVTADLPAGYIALSVKALEKLLPHMEKGLVYQAASDREQSALHAAGYLRRDELRRRLFDKLPNPQRTANCPIGDLPNPVVKRTLVELRKVVNAIIREYGRPAAVHVEMGRDVKTRPKQGTEAYRKYQDRIAEMREREKRREDAAQKLRDNRITVSRDNITRYLLWEDQKETCIYSGKPISFGQLFGGEVDVDHILPYSRCLDSSQNNLVVCFRKANADKGNKTPYEWLADRRPEQYEAVCVRANGLLRDGRIPYPKYRRFLQKELKLDDFISRQLNDTRYIARLAAEYLRCLFEADHHVLGLKGQLTAELRHQWGLDTVLAELPDSPAWHEQSKLRDGEKNRADHRHHAIDAIVIALTNRKRLQELSSIRQRGGTEATGELVVDPWLSLRDDVKQIIRDVNVSHRAERKASGKLHEETLYGKTETEGVWVARKPVESLSPNEIENIRDKAIREIIIAKLRQHGIEFGRGKKIDNAKWKQAMTDLRMPSGVPIKRVRVTKRELTIRPIRPGSPGEAYVKPGSNHHLCIFEFNENGKTKREPVFVSMLEAVGRIKRKEPIIQRTHPERPDARFIMSLSRGEMVLANWKGEQKLLVFKTASSTQGQIWFAEHTDARRSADYRQYVANANTLDARKVTIDPLGRIRWASD

SEQ ID NO: 4644 - protein, 1066 aa, synthetic construct
  REGION 1..1066: note = Synthetic
MASRGVLGLDLGPNSIGWALIDEEEEAIVDIGVRVFPEGVDNFDTAKEVSKNEDRRISRGMRRQAERRCRRRRQIRDALVEAGLFPAEPERQEALLASDPYELRSRALDKKLSPHELGRVFCHLGQRRGFLSNRKKDRGDKEVKGMLAEISELEGEMKEAGAETLGRLLYRKAQSLDHASRRENDHLRNRHTRRKMYEDEFEAIWQSQCRLGNDGLLTDDLKYGKFKPKRGHEQLYPRKPARRPAGLSPLEAFGIHGLIFFQRKMYWPRSAVGTCELEPKQPRCARADRRAQRFRLLQEVNNLRYSDLETSEEERLSGEQRTLLLDKLSQSAKVTFDQIRKTLGFMESVKFNLEKGKRPGLQGMIVDALMAKAVGEAWHARDERQKDDIVRLLINNEREDDELAERLVDRFGMTAAEAEAALDVDFPSGHVHLSLKAIDKLLPHLERGLILQSESDPEKSALHAAGYLRRDELKRRLFDRLPDPQRARDCPIGDTPNPVVKRTLVELRKVVNAIVREHGTPAAIHVEMGRDVRTRPKRGTDAYRKYQDRIDEMRTREKRRADAAEKLRESSIRVNRDNINRYLLWEDQNRTCIYSGKPIGFGQLFGGEIQVDHVLPYSRCLDDSQNNKVVCFGKTNADKGNRTPYEWLADAQSDHYEQVCQLAGKLMHDGRIPYAKYRRFVQKELKLDDFIERQLNDTRYIARLAGEYLRCLFEADHHVLGVKGQLTATLRHDWGIENLLEELPDSPAWQDSSKLRPGQKNRADHRHHAIDAAVVALTNRRRLAELASIRMAGGTEATGELAVDPWLSFRSDLLDAVREVKVSHRADRKVSGRLHEEMFYGKTERPDVWVLRKKVEELSPSEVPNIRDREIREIIIARLRTYGIQVGRKQGKDEKKWKQAMAGLTMPSGVPIKKVRVCKKDGTILSIREGTDNAAFVKPGKTHHLCIFEFSEKGKTKREPVFVTMLEAIGRVKRGETVIQRNHPQRPEAEFVMSLSRGEIVLAEMNGEEKLLVYRTGASTSGQIRFAEHTDARKGSDYKILRATANSLKARKVTVDPLGRIRWAND

SEQ ID NO: 4645 - protein, 1122 aa, synthetic construct
  REGION 1..1122: note = Synthetic
MSKLILGLDLGPNSIGWALIRDDSDDPSQSELVDLGSRVFPEGVDAFDTSKEKSRNEDRRIARAMRRQVRRRVVRRKNLIKALIESGLWPGGSASQEALYGLDPYVLRAKGLTERLEPHEFGRVLLHLNQRRGFLSNRKKDRGDSEVTGMLAEINENEAKREAGGFATIGEYLASKAKKEGDKQAHRNPVEDDHVRNRHLARSQFYHEFDVLWREQAKHHPELLTDALRWGKLGSEEDPKKAVAFRKPISKSDERRKEKGKKLSDLKSFGLHGMIFFQRPMYWPKSVVGLCELEPKQKRCPRADRHAEQIRVLQEINNLKYADTETHEEHPLNEEQRTLLLDHLATREKSTFDQIRKKLGFLESVKFNLERGKRSFLKGMTLDWLLAKATDKKWHDRTEEDKDAIVTLLRDNEREDDLVVAQLIDKYGFSAEHAEALLDVDLPPGYGSLSRMAIDKLLPHLAKGMIYQSQSDPERSALHAAGYLRRDELQRRLFDQLPDLSRTNPRDCKLGDLPNPVVKRALVEIRKVVNAIIKAYGKPDAVHVEMARSLRMGPKARSEYNTRTRQREKERDEAAKAIRNTGVAVRREGIIRFLAWKEQSCECVYCGKAISQEQLFGGGVDVDHILPYSRCLDDSQMNKVVCHRECNHDKGQKTPYEWLADSDPKRYEAIGQRVGSLMRKGAFPYPKYRRFLQKELKLDDFIARQLADTGYITRATVEYLQLLFDKPSDVLGLKGQLTAELRWQWGLSTILSELPDSPAWQEEANVPTGEKNRADHRHHAIDAVVLALTNRKRLRVLSDLVHRGGERKHGEIVFEPWDNFRSDVAKRIAAVNVSHRVERKVRGALHEETLYGPTKNPEEWVVRKAVVDLSAAEVDRVRDPAIKKIIRRALANAGLIAGRGKKPDAKKMKMTLSNLAMPSGVPIKRVRLIKPEKTIAPLREEGAKDQAYVKPGSTHHLCIFEFEVKGKKKRDAVFVTMLEATQRIKRQKQALAKSLNELKGQGLSAKELQKHRKEAMRQAATEHPLIQRDATQLSSEDRKKIPADAEFVMSLSSRELVLANYKSEKLLLQFRTAASTSGQIWFTLATDSRPTKTRKVYSFRAATLDAQKVTTDPLGQIRWAND

SEQ ID NO: 4646 - protein, 1165 aa, synthetic construct
  REGION 1..1165: note = Synthetic
MAQKKGGRPFRGGRSDRGPWPANVSSCYEKVRGPGLDRRPYGIIPHRGFKSSGGIFMPTTLGLDLGPNSIGWALIDESGPATGRIIDLGVRIFPEGVDNFDTSKEQSRNEARRVARSMRRQTRRRAARRRALRDALVTCGLWPADAAEADRLLALDPYELRARAVDPQAEPLTPHELGRVLLHLNQRRGFLSIRKRDRKDRELKGMLAEISELEREIQDANPPTLGRLLHGKLQALDPCQRREGDHVRRRHTHRHMIEDEFNRIWQTQQRHHPHLLTDRLRYGTVGRRRYPARPIRRPRGQTLLEAFGIHGIMFNHRQIFWPRSVVGSCELEPKQPRCPRADRRAQRFRMLQEVNNLRYIDPTQRSERRLDDQQRALLIDRLSHRREMTFDQVRRELGFLDNIRFNLEKGERSKLKGLVTEYELAKATGKSWWNRPEAQRNQIVDLLLDSNTDDDDKQARLVDDFGLTSAQAHAALLADLPSGHVRFSVRAIENLLPHLERGLVLMDDDAGNSALHAAGYLRPDELQRRVFDRLPDPQRSRDCPIGDIPNPVVKRALVELRKVVNAIIREYGKPDEVHIEMGRQVKQGEEARRKYNKTIRQREAERNEAADLLREHGIRVSRDAINRILLWKEQGEICTYTGRPISFRQLFGGEVDIDHILPYSRCLDDSLMNKVVVFRDANAQKRDQSPWEWLGERDPDRFNEITHRARRLPYPKYRRFLLKELQLDSFIARQLVDTSYIARATVAYLQCLFESDQRHSVWGMKGQLTAELRHQWGLNRILGGEDGGMKLRDDHRHHAIDAVVCALTSRSRMHGLTRIRKAGGVLQTGEALDPPWEGFRDELARRIARVNVSHRAERKIAGALHKEKPYGPLRVPGGERKEGLFVIRTSLDELSANEVEMIRDPVVRRVITQRLAEHGIETGRAKGEATRKMKAVLCDPDNPVRMPTRNPDKLGPPIRRVRVIRRDLTIRALGRNDDAGGSTFDPAEDRTKFVKPGATHHLSLFEWAVNGKTRRDAVFTSMLDAADRLKLRQQYVKERVTALEKQRVSRISRKGPECGDLMREAERRYPTITRVHPEHSEAKFLFSLRRGEYVLADVDGKQVLLVFNTAASTEKQLRFFHHADARPSNKSQKSGQRRLYRFQPSTLNARKVTVDTLGRIRWAND

SEQ ID NO: 4647 - protein, 1050 aa, synthetic construct
  REGION 1..1050: note = Synthetic
LRCNRQYPYQLVGDSFLKILGEEQIMSNVRDYPIDEDLAIGLDIGIGSVGSAVASRDAVLFAGSRCFDVPEEPKTRELKNKTRREKRGQRRVTRRRRQRLAAIRDLLLRNGLLESIDVAKEGQRDRATPDPWQARAAGLDRSLTTEELAATLIHIAKHRGFLSNRKDSGNQEAPDDDKKMLAAINTNKELSGRYRTVGEMVAKDARFAISKRNRGGDYAHTLARNDLKAEVATLFAAQRRHANTEASETLECAYLDIAFYQRPLQDSEDMVGDCPFEPSEKRSARHAPSFEKFRLLSKLNTVKIIEADNSLRRLKVAELAAALDDFGAQKSITWKTLETKLGFRDGCRFEGIDETKAKKDVCAAAGASRGTATIREVVGAAGWNTLRHQEATLDDIVRVLSFRDDIASIQQGLGEIELEPLVLEALMKGVGDGKFSKFRGAGHVSAKVARTLLPPLLDGKVYSEACASVGYDHAQARKVTIEDIRNPVVQRCLREACKQFEVLVREFGVRPGRVVVELARPVGKSAEDRNEMTKGIEKRTAEKERHRADMQELLGLDSEPDAEDLLRYELWKEQGYRCIYTDREIAPEDIRADRNQVQVDHVLPRSRSQDNSYTNKVLCLTQANQDKGQHTPWEWKVENEGDDEWWREFEARVRALQIKRFKQNTLLMRNFRDRENVFSERNLNETKYAARATLAALREYYSDEPDPNAEGYLSRKRRLFARPGTVTAQLRRAWGLEGIKNRAEDRHHALDALICAVGSEATLQRLTREYQALEREGRARWTPNVRPPWPDFRNNAIAAIESVFVSRSEKRRGRGAGHDATIYAVGVDEDGGEITYERKAVAKLEKRDLERVKDPERNRALITSLEAWIEAGKPRDVPPLSPKGDPIRKVALRRGPKAGMKLNEGHVDNANMVRVDVFAKEGRFYLVPIYTHQVMNKAKWPTPPNRAIKPKAPESEWPIIDERFEFCFSLYPDCYIEIVKGNGELIEGYYRSTDRANGAFTVSTHNLRLPLIRGIGARTLHSFRKFQIDRLGRRHEIVRETRTWHGVACT

SEQ ID NO: 4648 - protein, 1177 aa, synthetic construct
  REGION 1..1177: note = Synthetic
MAKILGLDLGTNSIGWALIEDGKTILGIGVRIFPEGINRDSKGKEVSKNESRREKRQLRRQAYRRKMRKMILVKELMKHGMFPEIENIKDVIQDVYLPENLKHYFSTNPYELRAKAYNGEQLSLLDLGRVFYQFAQRRGYKEDLLSDSDEKESKNPDYKLKKTIYEETKDIIDETTLGNYLNSLDSHKERLRNRYTVRSMYQKEFDIIWDNQKKYYPEILTDDLKQKIGDATDGILFFKRDLRSQKDMLGKCTFEPTKTRCALSSIIYEQYRMYQFINSIKIGEKSLSKIQKEVVIELFNSKDKFDFEEIKKKLKLSQENFNYENKQKVLGNRTISGFRKIFGKNVWDDLSFDEQEKIWHIKYTAKDREWIEKYAKDNWGFDDKQIKAFCILRLAKDYSNLSTKAISNILPFLKKGKMYHEAVLLGGVKNAFGNEWNNLNDDKRDLIETTIEEISINMEGKSKDNISEWLKEEFHFTDKQLKKLYHHSNIKETKEQMEFLPEPENIRNPIVQQALYELKKLVNVIIEEHGKPDEIRVELARDLKSSKNERDKIGLKNWENETENDKIKERLDEYNKPHTRHFIQKLKLFQEIEKVKGVACCPYTGETINISSLFNDGYVQIEHIIPLSVSLDDSFANKTLCLAEENNKKGDLTPYQFYGMDEKHWEVVKENAKKLLPYHKYKRFVSEKPPVLDDFISRQLNDTRYISKSAKEYLKYVCKNVTVAQGQVTSMLRHWWGLDNILNKTYNMQSLANGEYLAAIDKDNNIIEIIKWTKEHKKDEERLVKLGKVISGNVNKGVLFPYKTRDDHRHHAIDALTVACSKTSYLQKISQLSGRGYDDEMIKKLSNFEAPWNSFYTDANNAINNILISYKNNVKILGITKKKIRKIVINKEGKKEIKKYIGQGISARGQLHDASVYGKYKNKKGEEFYHKREKLEAITKKAQVDKIADSTISELIKAAIKKTNPLIDFEAKSYDVPANAFFRTDEMGIKQPLVFLPNKNGEPIPIKKVRLKYVSSNAVELKSVREINQWVEPGSNHHIIVYENNEGIIKGKVIPFWDAVERKKQKLPIFQLPENGKEIIATLQINDMFLLCMKEEDIDWNNPDLKTLSENLYRVQKLTAEAYTLRKADATSIENKTEYIQFKYSTWKKYNPIKVKISPTGKIKKSLIIAQTIPIFR

SEQ ID NO: 4649 - protein, 1189 aa, synthetic construct
  REGION 1..1189: note = Synthetic
MGLFMSKILGLDLGTNSIGWSLVDDEKQKIIDSGVRIFPEGVNIEKGKEFSKNATRREKRQGRKQLFRRKLRKLKLSKELIKHNMFPMVTNVKDELNQLKLNGELKFFFSIDPYKCRAESFNGNKLTLLEIGRIFYHFAQRRGYKESLKNYDEEKGKIYEGKPKELKIGIKETQERIKNFGTLGNYLYNENPHKTRLRNRYTTRKMYIDEFNIIWENQRKYYPDILTENLKSKIGDSQKGILFFQRPLRSQKHLIGKCTFEPKKSKCSTSTIEFEKFRMYQFINGIECNGKKLNTEQRKLITEIFNSKSKFKFREIKKKLKFTEGRFNYNDDDNIIGNNTISNFSKIFGKEKWNKLNSQEQFDIWFIKNNAEDKEWLTNYAKTKWDLAEDKIEKLLKINLSKNYSNLSLKAINNILPYLEKGFIYSDAVLLGGLKSAFGSDRWNSFSSEDKKNIEYKVFKVGEEREDKVPIIEKVKELLKSQFNLDEKQLDKLYHHSFLSKINGLKEKLPEPENIRNPIVQQALYELRKLVNAIIDVHGKTDKIKVELARDLKSSKDKRYEVRQENRKNENRNDEIKKRLDEFSIEHSRTNIQKVILWDESQNYCPYTGQKIGFEELFNDGYVQIEHIIPYSISLNDSMQNKTLCLADENKRKGNKTPYQFYGHDENKWSEVKNMVYELIVKKGNSQLYKKNYRKYQRFISKQLPDADEFIQRQLNDTRYISKSAKEYLKNICDDVDVTQGTVTSLLRHHWGLDNILNDVYITNGLTDGDYYAAVNDEDIIEILKWNAENKEKDLDHLKKLGKVVQGKIKDGKLYPYKNRDDHRHHAVDAVTVALTKKSYLQQISRMSARNSNYENIKTKIRIDKPWEGFWQDADNSIKSILVSHKINNKVLTPVNKRLYDAKGKVRKINGKVIYGKGDAVRGALHKETVYGKHVDANGEEFYHVRKPLESITTKTLIDKIVDENVRKIMLQKLKNDGVDVNKNKFNIPNNSFFKYDDKNNKTPLIFLPNKKGEHVPIRKVRIKEKIGNAEKLKEINQYVNPRNNHHIIIYKDSKGNYKEKVVTLWEAVERIRQGLTLINKNPEPDCEFITSLTQNEMFLLGLTEEEIKDNKNNVTFLSQYLHKVQKIAGGDYFFEICFKKHLDSRMDKEAKVDYKYVKGFGDGKTGWVKLNPVKVKVNISGKFIFNND

SEQ ID NO: 4650 - protein, 1133 aa, synthetic construct
  REGION 1..1133: note = Synthetic
MLATLIAPSGTRFSGCPIFLAIQEELYVPTHSLKRYRVGFDVGSRSLGIAAIEIDENGMPANILNAMSFLHDAGLDPDSNKTALTRKNVSGVARRTRRMYRARKKRLEALDRFLSSHDYPLEDLANTEDMECWQARASLTSAKLTDETEFKRAFSLALRHIARHRGWRNPYSTTRSMHSQQLEPSPSLLKIREEFALLCSTPLKADATLAEMVCQLPDARVKLRGEGGLFSERLHQKDLALELHKVARGQGLEPAFICKAIDKVFDAKSPKGSASDRVGKDDLDRSQPRAWRAAREFQEYRIIALLANVRVREKEDGSKGILRPLTLAERQKVFEFLNTFTEKIPPTWGEVASLLNIDRGDLKGTATSTDDGERVSSAPPVNDTERTMANSKIKEIRNYWKDANQASKDALIREFSNVELPEDDSPEAIAASTLLRNLPEGSLENLESIRLSDGRSAYSLKTLRKLTDYMLNNEADLTDARMAIFNVDKDWKPAAAPIGEPTGNPAVDRVLKQVNRWLNMAESRWGLPESINIETLRDGFKSERLAREIERDQNQRAKKNLTVVDAMRTKLNIEGRPRRSEALRFQSIQRQNGQCAYCGSPIDFKTAELDHIVPRAGVGSTNARYNLLATCGRCNRAKGKLPFAVWAKKTEILNVSLEGALQRVQQWTTDPGLNASNMKRFQQEVIFRLKRVSEDEEIDARSKEAVSWMAVELQHRLLGYYGRSKERGSSPVKIHVFRGEVTASARRAAGIEKSFRMIGGKAGKNRLDRRHHAIDAAVIAMMQGTVAQVLTERNSLRSQQHYSGKPDAEFGAWSEYTGRRVQDQVVYRSWVQKMKALVPLLQQAIDSDHIPVVENIRLKLGNGLAHEETVHPLTRVKLGDPIAPDAVDRASTPALWTALTREPDFDWKEGLQENPNRKIQVNGTQYTATDEIELFGVKAGAIKVRNGYSELGSAFHHARLYKIRGSKKVSYAMMRVYTVDLLRYRHQDLFTCELDPNTMSARQAEPKLRAAFRAGTAEYVTWFVVGDELKLNTPNIATGQVSTFLEEFGEVTHWRIRGLYSNSKLRLKPSQLASEGISETTSADSRKVIDSPGWLPAVNKVFGEGNPILIRRDAHGRPRLESESGLPISIVIG

SEQ ID NO: 4651 - protein, 1112 aa, synthetic construct
  REGION 1..1112: note = Synthetic
LLLRALRGPNFLEFYMRYVVGIDVGLFSVGFAALEIDDAGNPIRILNSMSHIHDSGLDPNNQKTAQTRKAVSGVARRTRRLYATRKKRLATLDSFLTNNGFPIVNLENEADKIAWEARTKLANQKIDDEGEKYKLFSIAIRHIARHRGWRNPYVPAERLNALRSPSDGFRALESKAREIAKGPIPSNPTLAQLVTALPNGATQLRGEGGFLSERLNQQDFANEILKIGSTQEFTSEFMAKVVSQVFYAKSPKGSAEKFVGKDELDPSQPRAWRATLAFNEYRTISLLANVRIADSASPTKAQRALTVEERKKVFGFLNTWNKRTSPTWTDVAEVLGIDRGCLKGTATSNDDGERVSAAPPINHTHQIMWNCQVKSLREFWRKGSDAMRSKLIHELSNVETTSEESPEAIAAATAIRSLSPEEMEKLESIKLPHGRSAYSVRTLEKLSHYLLNNEADLHAARQALFDISDSWHPAAPPVAEPTGNPSVDRTLSAINRWLLLAEKRWGIPVSINIETARHGFKSENVAREIDRGIERRAKRNRAVQENIAKVLGIEGKVRRGDQLRYQAIQRQNGQCAYCGAPITFKNAEMDHVVPRAGAGSTNSRNNLLAACHKCNLSKGKLPFAVWASKELSGPNVSLQGAIDRVNQWPTDSGLTTREMKDFQGSVIKNLKRTSEDEKIDARSIESVAWMAVELRHRLIGYFEQMDFAPKIRVFSGAVTASARKASGIEKRIKMLGGSHGKNRLDRRHHALDATVISLMSYTVAQTLLERHNLRWEESITRTPDSDYGTWKEYKGRNQQNRYLFEQWTHRMRLTVPLLQDALDDNRISVTENLRLRLGNSQAHEAGIGKLISARVGDSLSTELIDRASTPALWCALTRSEDFDWKDGLPENPTREIRVNGKHLTAEDEITFFGVKAGAIAIRGGYAELGASFHHARLYRITNGKQQAYCMQRVYTVDLARHQGEDLFSVELPPQSISVRQCEPKLRKALREGTAEYITWFVVGDELHVNSSKVATGQAATFLAEYGDIRSWRIRGFDSNAKLKLKPTLFSAEGLPPNISADCKKVIDRPGWRPAVNKLFGLGSVTIVRRDAHGRPRFESTGHLPTCVQVESL

SEQ ID NO: 4652 - protein, 1111 aa, synthetic construct
  REGION 1..1111: note = Synthetic
MLSTLPSPSHKRYRVGIDVGLHSIGFAAIEIDEHDMPISILNAMSLIHDAGLDPDSQKTAQTRRMVSGVARRTRRLYRQRKRRLKELDEFLLQNGYPVPDLDSSPEKIGWKARAALAEAKITDTDELKLALSHAARHIARHRGWRNPYTSVKSMMSETSSHSDGYAAIEKKFREIVGLKENQETPETLALMVMGLPQGTIKLRGEDGLFSERLQQKDFVQELLLIGRTQELEKTFLNDLIEKVFYAKSPKGSAEGRVGKDELDPSQYKAWRATRAFQEYRIISLLANIRIQERNGTSLGEKRPLSVAERQKAFHFLNTWTKQNFPTWADVSELLGIDRGDLRGTASSNDDGERVTSAPPINNVEQTMSNTSIKEFKTFWKSANNASKDALIRELSNVEAPSEDSPEAIAASSLIRSMPPESLEKLESLHLPDGRSAYSEKTLQRLSTYMLNNVADLHAARRAEFGVDDDWAPAAAPIGQPTGNPAVDRVLKATNRWLMMAEHRWGTPVSINVESMRDGFKSEKSAREISRGQENRAKRNKDVIQSMMTTLNIEGRPDRHTVMKYQAIQRQNGQCAYCGSTITMQNAELDHIVPRAGVGSTNSRINLLAACANCNRSKGKLPFAVWAKKTDKTGVSVESAIDRVKQWPTDAGLNTREMNDFKQQVIFRLKRVSEDEEIDARSKESVSWMANELRHRVSHHFGSEVTVRVFRGSVTAAARRASGVEDKIRLIGGRSGKNRLDRRHHAIDAAVIALMQATVAQILTERDSLRSEQKLTKRPDTTYGDWREYTGKTIADKTVFKTWLKRMNVLVPQLQIALDEDRIPVSENLRLRLGNGQAHKETIQPLNTVTLGSAISMDQIDRAFSPALWTALTRCPDFDWKEGLPENLERQIQVNGTHYSAQDEIKLFSKKAGALALNGGFVELGSSFHHARLYRITGGKKDVYAMLRVYTVDLARYKNQDLFQVELPPQTISVRQAEPKLRKALREGKAEYLTWFVVDDELMLDTAKIATEKVITLLDKFGDIRRWRIRGFESATQLCLRPAQLSAEGLSKDALPDLKEIIGSPDGGKTHGWRSAINKIFGEADPVIIRRDVHGRVRVSSSRGLPVTYRMK

SEQ ID NO: 4653 - protein, 1104 aa, synthetic construct
  REGION 1..1104: note = Synthetic
VNAVQSTKPKNYRVGIDVGLRSIGFAAIEVDEQGSPLQILNAMSLIHDAGLDPDSQKTAQTRLMVSGVARRTRRLYRQRKRRLKELDEFLAKNGYPLPDLTTSEEKIGWKSRADLATAKIEDPEELKLALSHAARHIARHRGWRNPYTTVKSMMNKAGEHSDGFLAVEETFRELIGEQKHAGQSLTLAQMVMALPNGTTKMRGTGGLLSERLQQKDFVKEMLLIGEVQGLDEEFLEKLIERIFYAKSPKGSAAGRVGKDLLDPQEFRAWRATRAFQEYRIISLLANVRIQERVGTSLGEIRPLSVEERQRVFTLLNTWTDSPLPTWANVAEELGVDRGDLRGTASSNDDGERVSANPPVNQVEVVMCSTVIKEFKKFWETANNPSKDALIRELSNVEAPSEDSPEAIAASSLVRSLPPKSLEKLESLKLPDGRAAYSVKTLEKLRDYMLNNVADLYTARQSLFDLPNDWAPPAEPIGAPTGNPAVDRVLKATNRWLLLAEKRWGAPLSINIESLRDGFKSESAAREIQREQETRAKNNQAIVQTMMQKLGVDGRPSRNDVLRYQSIQRQNGQCAYCGTTITMKTSEMDHIVPRAGVGSTNSRYNLLAVCANCNRSKGKLPFAVWAKKSNNPQVSLEAAIERVRHWPTDAGMRQKQMNDFKQQVIFRLKRVSEDEEIDARSKESVSWMANELRHRVSHHYQEAVKVRVFRGSVTAGARRASGIEDRLKLIGGRSGKNRLDRRHHAVDAAVIALMQATVAQVLAERDSLRSEYRTTRQVDTTYGHWRDYTGKTIADQRTFKVWTQRMLTLVDLLQTAIDEDRIPVTENIRLKLGNGLAHEETIKPLKKVLLKSELSMEDIDRAATPALWAALTRLPDFDWKKGLPENPDREISVNGTHIGPNDHIELFGVKAAALALNGGYVELGASFHHARLYRIKGAKQDSYAMMRVYTNDLLRYRHEDLFSVELPPHTMSMRQAEPKLRTALRAGKAEYVTWFVVGDELIFDTEKLATGQISRYLKEFGPTKHWRIRGLNTDIQLRLRPAQLSAEGLTSETSSDSKKIIDNPGWRPTVNKIFSAGNVTLIRRDIHGRVRITDHNGLPTSVKIS

SEQ ID NO: 4654 - protein, 1100 aa, synthetic construct
  REGION 1..1100: note = Synthetic
MTTRYVVGIDVGLFSVGFSAIEVDEKGMPVRLLNSMSLIHDSGLDPNSQKEAKTRKAVSGVARRTRRLYAARRKRLAALDTFLTQHDFPLIDLEKEADKIAWSARATLATEKVEDHEQMKKLLSIAVRHIARHRGWRNPYIPAERLCTQRKASDKFTILEQKAREAARKPIPSTPTLAQLVGALPHGATQLRGENGFLSETLNQQDFANELLKIASVQDLEPQFVHELLLKVFYAKSPKGSAEKFVGKDELDPSQPRAWRATLAFNEYRIISLLANVRIADPSSPTFAQRRLTVNERQKAFNFLNNWTQKTSPTWTDIAELFGIDRGLLKGTASANDDGERMSATPPINQTHQIMWNCQVKSLREFWRKGSTAMRSALISELSNVEAPEEGSPESIAAATAIRSLPPEEMEKLETVKLPHGRAAYSVKTLDKIAKYILNNEADLHEARQEIFGVDAHWKPAAAPIAEPTGNPAVDRTLSAINRWILLAEKRWGTPLSVNIETARDGFKSASVAREIERGNSKRATRNLETRQAIAEKLGIEGRVRSSDMLRYQAIQRQNGQCAYCGTTITFKSAEMDHIVPRAGAGSTNRRNNLLAACHRCNLSKGKLPFAVWANSEKSGPSVSLEGAIDRVNQWPTDSGLSTREMRDFQQSVIKNLKRTSSDDKIDARSIESVAWMAIELRHRMISHFAKQGRSTPKIRVFSGTVTASARKAAGIEKQITMLGGGHGKNRLDRRHHAIDAAVVALMNYTTAQTILERENLRRAENIIQKPDTDFGTWKEYKGRNQQDRYLFEQWNLRMKSAVPMLQEALDQHRIAVTQNLRLRLGNGQAHEAGIGKLDSAKVGDALPVALIDRAASPALWCALTRLPDFDWKDGLPENPTRSIVVNGTHLNSEDKIEFFGVKAGAIAVRGGYAELGASFHHARLYRVPVGKRHAYCMMRVYTVDLVRHQHEDLFTVDLPPQTISVRQCEAKLRKALREGTAEYITWFVVGDELHFDASKVATGQAETFLAEFGDIRSWTVKGFYSDARLRLKPAVLSAEGITDEMDTDCKKVIDSPGWLPAVNKIFGLGGVTIVRRDAHGRPRLSARGNLPVSIQIDSL

SEQ ID NO: 4655 - protein, 1099 aa, synthetic construct
  REGION 1..1099: note = Synthetic
MELRYVVGIDVGLFSVGFSAIEVDEVGMPIRLLNSMSLIHDSGLDPNNQKEAKTRKAVSGVARRTRRLYATRKKRLAALDSFLTKYNYPLVNLEKEADKIAWSARSTLATEKVETPEEMRKLLSIAIRHIARHRGWRNPYIPAERLCTQRQPSDKFKILERKAHEAAKKSIPSDPTLAQLVDALPNGATQLRGKNGFLSEALNQQDFANEILKIASMQELDPQFVHELLLKVFYAKSPKGLAEKFVGKDELDPSQPRAWRATIAFNEYRIISLLANVRIADPGSPTSAQRRLTVQERQKVFNLLNSWTKKNSPTWTDIAELLGIDRGALKGTASANDDGERMSAVPPINQTHQIMWNCQVKPLREFWRKGSAAMRSALISELSNVEAPEEESPEAISAASVIRALPPEEMEKLETIRLPHGRAAYSVKTLERIAGHILNNEADLHEARQAIFGVDNHWKPAAAPIAEPTGNPAVDRTLSAINRWLLLAEKRWGVPFSINIETARDGFKSASVARVIERGNNKRATRNLETRQEIAEKLGVEGRVRSSDMLRYQAIQRQNGQCAYCGTTITFKSAEMDHVVPRAGAGSTNRRNNLLAACHKCNLSKGKLPFAVWAASEKSGPNVSLQGAIDRVNQWPTDSGLTTREMKDFQQSVIKNLKRTSGDDKIDARSIESVAWMAIELRHRMIGHFEKQGKLTPKVRVFSGAVTASARKAAGIEKQITMLGGGHGKNRLDRRHHALDAAVIALMTYTTAQTLLERESLRRAENTVQKPDADFGTWKEYRGRNQQNKYLFEQWNNRMRAAVPMLQEALDQNRIAVTQNLRLRLGNGQAHEAGIGKLVSAQVGDALPVDLIDRAASPALWCALTRLPDFDWKDGLPADSTRNIIVNGTHFGPNDRIEFFGVKAGAIAVRGGFAELGASFHHARLYRVPVGKRHAYCMMRVYTVDLVRHQHEDLFTVELLPQSISVRQCEAKLRKALREGTAEYITWFVVGDELHFDASKVATGQAETFLQEFGDIRSWTVKGFYSDSKLRLKPTVLSAEGITDDVDGDSIKIIDSPGWRPSINKVFGLGHVTIVRRDAHGRPRLSTRSNLPVSVQIDS

SEQ ID NO: 4656 - protein, 1587 aa, synthetic construct
  REGION 1..1587: note = Synthetic
MENFQKTRKILGLDLGSASIGYAMIEMQGTELLGLVQKHNQDAIGVRVLPTSGDVLKDFNNGKSVSDCAERTKARGTRRMVQRFRARRERLLLLLKGLGWIHPSFPCMVGREHEKQKQEYKVQESSKLSFVADKLQEIALHNGWAAQQLGDSFVKSFLSPQQVRARQRQFAEEFAEYLPQGFEFNLDLLVYYLRHIGISQKLDKAELALVLYHLNQRRGFKSSRKEAANLQQSKNNDNNEDAEDETEEELAQEGKDYYVKAIAQTGNAKNYQVTLEDAESGESFENVLVSEALKRQLQDHQESKHKIALVLSFKKNKYQCSLPKAKSETVTIEYVQVKFVKELEKEIIKNKTQNPLWITLESDRREGKTYAKLEAGKFYHLQITETITAKGEKTISFKRVSANDWSKNKDKVKRSLEELEQEGKFVAWWHLSNILGNLKDGQKYITYSTNDQVILRKFYENELLKIWETQTSLHGEPLATRQQIEHVLSLLYTNDEQNTVFSQKNKWGKSFTITKNGKTYKDNVRRVMDKGEDALLYLLRKHIIYYQRSLKSQVSQISTCRYETQIGTDGSTPVPVRCAPQSAPYAVEYRLWNEINNLKYTEKGSKEQPFSNEQRATLFGLLCKNNEVKVRDIARKVLQKDPRNVEFNKSQDAKIKGHGTRKALEKALSKAEKEDKNKLEVVLNDTAKLEKLWHMLYSIEADIESEPIENPIVKALRKHFGFSEQAAVELSKVAFKSEHSALSKRAIMKLLPLMRCGKYYQADLLPKQALERLKKIEDNEEETSLDPKTLKRFKENLKLEGLMQFEAASLVYGSHSRESIPERLEKPEDLMVLKQHTLRNPLVEKIVNETLLLVKELWQRFGRPDEIRIELAREMRMTAKERADTTKRISDNQKANDEVKKKIASEIANPSKNDLLRYMLWQESNETCLYSGQKIKVEHIFNLNQTQVDHIIPRSRFSDDSRTNKVLVLSEENKAKSDQTAYDYMQSKGTEALEQYKKRVDDLYKGKKQKRKYLMMTAADIPQDFASRQLNETRYITKKCKELLRAVSEVWVTSGGITDYLRHIWGVDTLMKELIRPRYEANEELLKLIVPPQKDDREEQLLGFSKRLDHRHHALDALIVACTMQGHVQLINQQNVVYTQLSALNKNSSLDSQIVTNQLSKIPEANFKGHADEIKQLVLDWTRRYNNSSDEDSKKEKRRKRLTNFSPPKPNFRQFTKNAMEQLVVSVKSKKETRGELHEETTFGEVWVQEEYQLAEVLAILDKARKAGSKEQEFVRIPQPLDWLKKELNNRLEAHKTLKKAQESLKTAPIKNSKGQELKVVTLLESILVVRRKLGDGLTAPQIKGIVDKSVQEEIIQHLLGGSIPDGAKALKEKLSQENIVLFNDKRKEQGKPPILKVRTRVAYLQADILDTNVNSGHKKYHSKGNNYCFVVGRVPDKEGFKRVYGSVPLFDAVQLRSQGLKPEEPFLTEEKAKLLFTLVQNDTVICLEEGERLEEVNWNNRQELSKKLFRVKKFSKKQLYLSPLNMSQAIAYKPQDTKEGKNSEEKSLFEPTAEKYPFKPLMYKLKISRLGHVEGYWNEEGEYKTV

SEQ ID NO: 4657 - protein, 1066 aa, synthetic construct
  REGION 1..1066: note = Synthetic
MQQVPYILGLDLGAASIGWALLAAGNDGEPVGVLRSGVRLFEMGCAGDMDKFQRGKEESPNAARRAARQMRRQHRRKARRRQRILVLMQKYGLLPPGNVRDTNARNAFFNTLDAALLDQWLNRHAASCSPAEAERLSCDPDFLHVFPYRLRADGLTRPLSAHEFGRAVYQLAQRRGFLSNRRTEAEEDEELGKVKTSINGLQAEMDAAGAETLGQYLAGLAPSVSRIRGRYTSRDMLTQEFDLLWERQRALHPAPYPAHLREAARNALCDAIFYQRPLKVQANLVGFCELEPGERRAPKYADEAQEFRLLQRLNDLVWYDKQLVPHRLADNPEQYARLRDAMLRADSMTFPAMRKLLGLPQDSRFNLEEGGEKKLFGHRVNARMHAVFGDAWDDFAPEKRAAILHDIISMDDARALCGRGRRAWGLSEEKAVQFARPLPEKGYASHSLKALRTLLPAMRAGESYGTVRPCLYPPRYGDAPQDTLPPALEAMSTLRNPVVLRCLTELRKVVNAIVREHGKPVVIRVELARDMKRSRKERTDYSARNRKQESQREKMAERLMSPEAGNARIATPRRNDVEKLLLAEECGWQCPYTGRMIGWNDLFGPHPQFDVEHILPYSRCFDDSFLNKTLCHAPENRAHKRGRTPHEAYAADPERMDAILRRVEAFQGDAATCRAKLARFRAPTMQEWKDFADRQLNDTRHASVLACKYLGLLYGPQSNRYVQASRGGITAMLRGLWGLNRLLGDGGKNRGDHRHHAVDAIAVAATSRGMVQALQRAAAQAESGRVNRLVPRDMVPLPFEGFMEQADNVVLSILPSHRVSRRVRGALHNETIYARRELPDGAVGYAVRKRLDDVGKGKPVGQDAANTFTAKLLDPGLAPSVALLLTGSVPRRDDDGSPPPVRSVRVLQTGTPVSVGKDGRLCQTASNHHAPVYAVPGKKGEEWVCPGVVSLLEAMQRKEAWKKSEGGPVVDRQGPEGARFLFTLSSGECIRVRVDGRDEYLRVRSVYMEQGVLKVEAVRLQDARPKKEIGKKREGGFFKLSLKQLQQGDCEKVVITPLGTVVPCRD

SEQ ID NO: 4658 - protein, 1062 aa, synthetic construct
  REGION 1..1062: note = Synthetic
MKKAKLSEYTIGLDMGTNSIGWSVVEEKNGKPKGLVSCGSRIFIRSVEDKTPTPKNQNRREKRLLRRVIERRHRRKMRLRNYLISKEFLPNSLKDEPNPETELNKLGNPYDLRAKALDEELTPHKFGRAILHLGTRRGFLSNRKTGFGNLRDDPEVREILEIEDKSAKTDNDENKFKKDIQELRDDIKEAGKRTLGEHLSTLNRKRNRGEYHDRRTDRKMYQEEFEQIFRKQFALNPKIYTENVKNAIEKIIFNQRSIIWNKNTVGNCSLEPKKKRVKMERLEFQQFRYWQDINNLSWDDTETGERDVKPSPEQKQLIAETLEKNKNLTWAKIKTLFSLNKRTKFNLEKVEGKSRKGIKGNTTACGIREIIGDDWDDSLDDSKQKQLVEDLISYESKIKLKKRLQDHWKFDLEKAVKLAVLELEEGHGNLSLKAINKILPHLKEGRVYSRESDKEDETGAVQVAGYKDITKPKTGDKETLGELPFIPNPIVTKALYEVRRVVNAIIKEYGKPTAIRIEMSRDLEMNTEKYKRAEQIHKKNRKANEEAEEKYNSIRDREPDLRLKKYISHQDKLKYRLWKESECKCSYSGKSISLTDLWSSDVEIDHILPYSRSLDNSYMNKVICFAKENREKHNKTPWEAFGETEQWKTIESMAKRNNYPEAKCGRILAKKMEGIEDFVNSQLTDARYIAKETGKYMRTLGCDVTFTKGGITSWLRHQWGLNKILSETGEKNRADHRHHAIDATVIALTNRSLYQKIVKVASEASGDSIDPEHGLEPPRILDNLRNRLQEAVDGMIVSHATNRKITGAFHEDTIYGVREENGKKGIVVRKNLTDISDAVLKNKEIVSPTVREAFERYVLEQGNDLSKAKKALKEQPLKHPETGDAVRRVKVWMSKTFNESFYYTKKNKAGKISKVLQYGNNHHVEIIKNGETGKYESIVVTTMKAAERTRIRKEPIVKTEHGENREFVMSLCINDTVSVQKNGEKIFYRVRKIDRGQKNQCIKLILRKHTDGTSDQDFKKLSSDEKKKLELAMAPSTLMAEYKVKQESINALGLAKNNTKTQ

SEQ ID NO: 4659 - protein, 1036 aa, synthetic construct
  REGION 1..1036: note = Synthetic
MSTEESKLPGYAIGLDVGTNSIGWSVIREKDGEPVEFIDCGSRIFIRSVENKSPTPKNRKRRESRLQRRQVQRRSRRKSRLRNYLILKGFLPEVLKNNPTPEEELNSLGNPYIIRAKALDEELTPHEFGRAILHLGTRRGFLSNRKTSFGDLDDDTNAREILEKEDDDEGKDREEGKLKEEIKKLRENINKGGARTLGEYLAGLSRKRNRGDFHDRHTDRKMYKEEFSEIWKKQSSYNPKLYNEGTRNELEKIIFSQRPLKLKPNRMGRCSLEPNLPRTRQGRLEFQRFRYWQDINHLSYQDPETGETEIQLSKEQKKKLAEALETKRELTWARIRTLLGLKKKTSFNLQKVEGKKKGLKGNRTVHDITEIIGGKWNSLNESEQCLLVEDIISYTSKKGLKKRLANHWNFSEEEATRLAVVELEEDHANLSLKAIKEILLHLKEGQIYSEAIKAAGYEITQPKSDNLDSLSSPPWVPNPIVQKALHEIRRVVNAIIKKYGKPSAIRIEMARDLEMNTKRYKQFLARQSENTKANKRAEEHYCIIREEYPHLKLRKNISYQDKLKYRLWEESGKRCAYSGKSIGMTELFTHATEIDHILPYKRTLDNSYMNKVICLSQENREKRNRTPWEAFGGTPRWDQILMISKGFPTPKRKRILTEKLDGIDDFINNQLNDTRYISREAGKYLKSLGCDISFTKGGATSWLRHQWGLNSLLGGSQEKNRDDHRHHAIDATVIAFTNRSLYQKIIHLVPDSENSSISPEHGMEVPPQIPELRNDLSECLDNLIVSHSTNRKLIGAFHEETAYGIRKGANGKPGVVVRKMLVDMTDRDKEKIVCPVIKRAVELYVWERGGKIKEAMKQLQENPLLHPKTGDKIRRARVWASETLNRDSYWKHVAPWDKNKTLRILPYGNNHHVEIIRNRKNEKYESRFVTTMEAAKRARKLKQPIIQTEHGEDWEYVTYLCINDTVSIEENGKRNFYRVQKFQPNEKILVLRLHNAATLEDNNKRRLRTVAVLMRDLKMKKESIDVLGHLSLPNKS

SEQ ID NO: 4660 - protein, 1121 aa, synthetic construct
  REGION 1..1121: note = Synthetic
MQEEILNASEVSKNLEVSFDVGHSSIGWAVLKSLDKNVQNNPEFPQIELLGCGVVTFESDTCLAKKRRDYRRQRRHIRSTKMRIKRMKQFLEHLKVLTASELEKPGSPYPWKLAASVLQGKRLLNWNEIWDILRWYAHNRGYDENRHWSEVAEKDKDDTESVKKSIELMKEHQTKTMAETICKELGTDPSESDKRASHKSYKEIGAAFPRSVVVNEVREILEKHIGKLPGLSQELVETLVGESKDAWKTLPCPSINLPSHYWGSLLCGQLLPRFNNRNIKKCPFSGDTLPLKECVEFYRYRWGKILTNIRVSADGLFGQKRPLNPDERKYVDSKMQELGSMTKTELRKAVEEAVLMTLNKEGVPQPVKINTNLETMFLTSEMEGGLVLDPVKKLINSDTVQSFWGVLPPQLQKRLAGKWRRGKQITIGEIQKELEKIAPEKVEEFNLAIKSNIKRKKKTENRLNDKIPESPLKMLKGRAPYGRKLLQQTYEEVLAGRDPHEKDGCLYRAENILKEEIREAIDKQTNNHLIRHRLLILERLFDDIVREYADNDKNKIKLITIEVNRDLREFSGMTAKEIESELNARSADFKKAKEQLEDMLQEAGLSNTRITATLIKKARIAQDLDFTCPYTGAKYELIDLINKQVDLEHIIPKSKRPSDSMESLVITFKEVNRWKGNRTALRFIKEEQNKPVPGKENLMILTERRFQELVNGLNTKGHPKDTERKKKRKELLLMEDYVEEEFLPRDLTQTSQLVRLAVQVLMKKYIDEKEKPVFVSMPGSITGKFRAGWNLLGCLLKAVPWAADGDNQVKPKDELRNITHLHHAIDACVLALAAHFIPTYKNGKVWELMIKGTVKPSEKSYIEDVPMLQLDSENRLHIKDLPDSIKEQITERLCERRVVQHIPKDMSGVKCDETVYRVVDPNDNHPYAKKLIRWAKENNIQIPSTNDDTVLIVAKKRRGADGATGSKILHKGDKYVWLYDIVKKDKLLGIDPKKGNGKLKRLKAAKLISENYGIALDPKPQMIRHFKVHQTIQDKKLKRILRKGSIINVPKGTYKGVWKIFSIKDNKNGLAIDIGLPDVIRPANKTNYSYSKINASLKTIINGGVQIINMPYTGVNVALYN

SEQ ID NO: 4661 - protein, 1166 aa, synthetic construct
  REGION 1..1166: note = Synthetic
MKYRLGLDLGVGSIGSAVIQLDEQNNTVDIVDAGVRIFEVSEGAEERRLKRTARKNLIRTKKRLNLLAQKLFENGLWVNVTPEGTDKLRAKSPYKIRHDALFEQLASPYYIGRAILHIAKHRGAGFVSAAEELEEEILEEGEKSKKKLSSYDRMVKYLKDTNSLTIGDYFYKRLQEGFAKDDNGNKISPEKRIIRQKQYALEKNLVDYAIPRYLVKDEFHKIWDTQAQYFPQMNKDGLKQEIYDILFYEKSPAPYAVGKCIYFRNEDRLLKAHPLSEMRRIYEEVNNIRIETDMGRRRLTLEERDKIINELLFKGENAGKKSIKKLLNFSGQIKISLIDDKVIKAYLYSRPEFTNVEYIRNLSDEKLAEFVDFLAEPKDENDINGRLLNEDKLILQLKELLNIEDEKEIGNLLTKLPKGRGMLGKSATEILLTELKKEVLSPREITDRLAKEDKRFMAEEEIARAMQGKCCSLPYYGEILQTDTQPLPPLVIQNNTNLNPDEIRWGKIANPAVHMILNQIRLVVNDIIRIYGKPYDINLELGRDVGISTKKKKQEEIKQKQNEKLNEEAKKYLNERKLFVNRNNILKYKLAKEQGWVDAYDPRVEIPQNFSGFEIEHIIPQAKGGTDTYSNLCLVNRKDNLNKGDRFAYEYFEQTKEPEVTRVILEVARKRMPQKVWRFEADAREKFEDNGDADETNRYLTDTRYVSKMAQRYLRAIIDSDDRDEVIHTRILAVRGTQTSELRKHWYLSGLEYDLDGLDILPYIQCAPYWQNQDTGEVIEGEKKPDIDGNWIFRNKIKNKEWMRKPRIDHRHHAMDAITVACANRSLIQKMAKETDLHKIEYPLPLLSIHSVGDFRRRVIDVLKNINVSHKPNHSKAGQFHEESGRTVLCVNPEDSSAIITSRSRKILQVVKSLKDLNKLLVGSTIKDEWHPQIAENRIKQTKLKEYFELYANTAEQILIAENEQAVLEGKKEIKITEGRILTKAFRIIQDKGLWKGGSFSDYESSSSLINIPKHGVAYLSGNNHCVDFFEKDGKVGWEVIKRFDANQADFEPQWKKDGGKIIWSIQQGDLLELNTPEEWKGYTDKDRCLAKVKKFSAGQMTIDYITDARATTKAKDDPEYMLVGSLVNRGLSYFTKNDARKVELTPFGKIKKKHKVLWNGTKTKS

SEQ ID NO: 4662 - protein, 1156 aa, synthetic construct
  REGION 1..1156: note = Synthetic
MKYRLNLDLGESSIGSGLIELDQNNLAKDIIDGGVRIFEISEGAEERRLKKTARKNLVRTRKRLELLAKKLFENNLWVNETPEGTDRLKAKSPYKIRHDALYGKLENQNYIGRAILHMAKHRGAGFVSAAEELSEEVLEEGEKSKIKKSSYDRMVQYLKDTGSKTIGAFFYQRLQEKENPQNRIIRQRKYALEKNIVDYAIPRYLVKDEFNQIWDRQAQYFKQMQKDGLKKEIYDILFYERPPMPYATGKCIYFREEERLLKAHPLAEMRRIYEEVNNVRVISDTDKRRLSLEERDKIVNELLLKGINAGKQSIKKTLGLSAQQKISLLDDRVIKAYLYARPEFADIEYLKNLSEKELATFVDFLAEPKNPDDKNGRLYSEDALIEHLKPIFKIDDEKEIGALLTKLPKGRGMLGQTASKLILEQMKQNVLSHREVTDALAKTDPRFLAEEEVVRAKQGKYLQLPYYGEILQNDTQPLPPLLIKNNPGLDKDEVKWGKIANPAVHMILNQIRLVVNDIIRIYGRPYDINIELGRDIGLSAKKKTELEQRQRLNEKLNDEARMYLQQHKLYVNNKNILKYKLAKEQGRKDAYNPTLSIDHRFIGVEIEHIIPQAKGGSDTYNNLCLVNRSDNLNKGDRFAYDYFAETKTPEMMREILKNARERMPAKAWRFEPGARENFEETGDIDETNRYLTDTRYVAKMALRYLRVIIDCEDSDEVAKNRILAVKGKQTAQLRRNWNLEGVEYELMGLNVPRYLPCSPYWSEINTGEIRSGVEKPDVDGDWKFFNQEKNEQWLSKPRIDHRHHALDAITIGCINRSLLQKLTNPNDLPHFKLPLPLSSVESLADFRRKVVEILKKVNVSHKPEHSKAGQFHKETGRTVLCSNPDDPDALVTVYKRKILQVVKSKKDLTKLLIPETIKNEWHDKIEENKIKQEKLVRDFELYMNAAEQVLIAENEQAVAEGKKEIKITESRIIVKAFQIIQEKGLWKGDQFKYYENSRSLVCIPKHGVAYEAQNNHRIDFYRKDQKIGWEVIRCFDVNQPNFVPQWKKDGGKIVWSIQQRDLLELDTPEEWKSYTNDERCLAKVKKFSAGRIALDFISDARMTSPQDKTKDYLLVDTLERGLKYLKDHHARKIELTPFGKIKKKHKVLKDGEKAAT

SEQ ID NO: 4663 - protein, 1156 aa, synthetic construct
  REGION 1..1156: note = Synthetic
MKYRLGLDLGVGSIGSAVIELDNENNAKDIIDAGVRIFEISEGAEERRLKRTARKNLVRTKKRLELLAKKLFENGLWPNENPEGTDKLKSKSPYKIRTDALNEKLASPYYVGRAILHIAKHRGAGFVSASEETEEEILEEGEKSKAKKSSYDMMLHHLKETNSRTIGEFFYNKIISGKGNDKTVRQKKYAIEKNIVDYAIPRYLVKDEFNKIWDKQTEFYPQMKKENLKKEIYDILFYERPAAPYATGKCIYFREEDRLLKAHPLSEMRRIYEEVNNIRILNDMNKRKLTLEERDSIVNKLLLKGQNAGKQAIKKLLNLSAQHKISLVDDRVIKAYLYSRPEFANNEHLRNMNENELSSFIEFLAEPKMSKDKNARLYNEDALIEYLKPILKIDDEKEIGNLLTKLPKGRGMLGISATKIILEKLKEDVVTHREITDKLAETDKRFMAEEEIARQNQGKCFQLPYYGEILQTDTAPLPPLMINNNKSLNPDEVKWGKIANPAVHMILNQIRLVVNEIIKIYGKPYDINIELGRDVGMSTKKKKEFENRQKQNEKLNEEAKNYLKEHKIAINNKNILKYKLAKEQGWKDAYNPTQNISSVFTGMEIEHIIPQAKGGTDTYNNLCLVNCNDNLNKSDRYAYEYFEETKTQEEIREILKNARSRTPEKSWRFEADAREKYEESGDKEESTRYLTDTRYVAKMAQRYLRAIVDCSDCDEVMQTRILAVKGGQTAKLRQHWNLYGLEYDLMGLDIPRYVNCPPYWLELDTGEIIEGINKPDIDGKWKFFDKAKNKEWQPKPRIDHRHHAMDAITVACANRGLIQKMAEENDINKIHYPLPLTSVKSVADFRRKVISCLKDVKVSHKPNHSKAGQFHKETGRTVLCQNPDDPNSLITVYSRKILQVVKSAKDLTKLLIPETIKNEWHEDIAEHKAKQAKLVQDFELYMNTAEQILIAENEQGVADGKKEIKITEGRILLKAFRIIQDKGLWKGDKFRCYSNSSSMINIPKHGVAYEAQNNHCVDFYQKNGKIGWEVIKRFDVNQTDFEPQWKKESGKIIWSVQQGDILELDTPDEWKQYTDKERCLAKVKKFSDGKIAIDLITDARMTSPKNKELKYMFVNTISDKGLTYLINHKTRKVELTPFGKIKKKHKVLWNGTKTAA

SEQ ID NO: 4664 - protein, 1155 aa, synthetic construct
  REGION 1..1155: note = Synthetic
MKYCLGLDLGVGSIGSVVVELDKNNNPENIADAGVRIFEVSEGAEERRTKRTARKNLIRTRKRLELLAQKLYENNLWVSANPEGTNNLKSKSPYKIRYDALNGKLENQNYIGRAILHLAKHRGAGFVSAAEEMEEEVLEEGEKSKAKKSSYDMMLYHLKETNSRTVGEFFYNKIISGKGNDKTVRQKKYAIEKNIIDYAIPRYLVKDEFNQIWNKQAEFYPQMKKENLKKEIYDILFYERPAAPYATGKCIYFRDEDRLLKAHPLSEMRRIYEEVNNIRILNDMSKRKLTLEERDSIINELLLKGQNAGKQAIKKLLNLSAQHKISLVDDRVIKAYLYSRPEFANNEYLQKMNEDELSSFIEFLSEPKISQDKNGRLYNEDSLIEYLKPILKIDDEKEIGNLLTKLPKGRGMLGISATKIILEKLKEDVLTHREITDKLAETDKRFMAEEEIARQNQGKCFQLPYYGEILQTDTAPLPPLMINNNKSLNHDEIKWGKIANPAVHMILNQIRLVVNEIIKIYGKPYNINIELGRDVGMSTKKKKEFENRQKQNEKLNEEAKKYLKEHKIVINSKNILKYKLAKEQGWKDAYNPTQNISSVFTGMEVEHIIPQAKGGTDTYNNLCLVNSNDNLNKGDRYAYEYFAETKTPEEIREILKNARSRTPDKSWRFEADAREKYEESGDKEESTRYLTDTRYVAKMAARYLRAIVDCPDCDEVMDNRILAVKGGQTAELRKRWDLQGLEYDLMGLNIPRYIDCAPYWRELDTGEIIDGEQKPDIDGNWKFYNCVKNPEWSPKPRIDHRHHAMDAITVACANRGLIQKMAEENDINKIHYPLPLTSVESVADFRRKVISCLKDIKISHKPDHSKAGQLHKETGRTVLCQNPDDPNCLITVYSRKILQVVKSAKDLTKLLIPETIKNEWHEDIAEYKAKQAKLVQDFELYMNTAEQILIAENEQGVAEGKKEIKITEGRILLKAFRIIQDKGLWKGDKFRCYENNSSLVYIKKHGVAYEGRNNHCVDFYVKDGKVGWEVIKRFDANQPDFVPQWKKDGGKLIWSVQQRDMLELDTPDEWKSYTDKERCLAKVKKFSDGEFNIDYMADARMTSPKDKNLKYMFVNTLRKGLAFLLQHKARKIELTPFGKVKKKHKVLWNGTKTAA

SEQ ID NO: 4665 - protein, 1090 aa, synthetic construct
  REGION 1..1090: note = Synthetic
LCENNLWISTNPEGSDNLKSKSPYKIRCEALDDKLDNQNYVGRAFLHLAKHRGAGFVSAAQEMEEEVLDAGEKSKKKQTAYELMAQHLKDTSSRTIGEFFYKRILESYDKDENGEHNKVNLRTVRQKPNMVDYALPRYLVKDEFNQIWDKQAEYFPQMQKAGLKQEIYDILFYERPAAPYATGKCIYFRNEDRLLKAHPLSELRRIYEEVNNIRILSDTNKRPLTLEERDKIINELLLQGENAGSKSIKKLLKLSAQQKISIDGDKDKPIKAYLYSRPEFAEIEYIKNLSEAEFAEFIEFLANPVNPNDKNGRLYNEDELIAQLKVILKIDDEKNISDLLIKLPKGRGMLGVSATKIILEKLKENVVSHREITDKLAKEGPRFMAEEEIARQNQGKFFELPYYGEILQTDTQPLPPLVIKNNKSLNSEEVKWGKIANPAVHMILNQLRLVVNEIVKIYGRPYDINIELGRDVGLSTKKKNDLDIKQKANEKLNVEAKKYLQDHKIYVNGKNILKYKLAEEQGWVDAYDPTKKIDRKFAGFEIEHIIPQSRGGTDTYNNLCLVSRADNEAKGNDFAYDYFVKSKSPELLREILKNARNKFKDKAWRFEADAREKFEDEGDKEETTRYLTDTRYVSKLAARYLRAIIDCPTDEKVSENRILAVKGGQTAELRRRWNLLGLEYDLMGLNIPRYNNCEPYWINLATGEVVDGEQKPDIDGNWKFYNCVKNPEWSPKPRIDHRHHAMDAITVACITRSLVQRLSNEETIRHQSTPLPMTSVQSVGEFRRKVIEVLKNVKVSHKQDHNKLGQLHEETGKVKLCENPDNPNNLITVYSRKIFKVVKTYNDLDKLLIPDSVKDSWYEGIAENRAKQAKLAADFKQYWNVAEQILQEENEKDVAEGKKERKITDGLIVAKTFHLLLEKKLWKGNKFKCYENVSSYVENHNLVYKSGNNHCVDFFVKDGKVGWEVIKRFDVNQPDFIPQWKKNGGKLIWSVQQRDMLELDTPAEWASYTDKPRCLAKVKKFSDGEFNIDYMTDARMTSPKDKNLKYMFVNTLRKGLSFLIQHKARKIELTPFGKVKKKHKVLWNGTKTAA

SEQ ID NO: 4666 - protein, 1157 aa, synthetic construct
  REGION 1..1157: note = Synthetic
MKYRLGLDLGSTSIGSAVMALDEQNNVLDIIDAGVRIFDVSEGAEDRRLKRTMRKNLVRTRKRLALLAQKLFENGLWVNAQPEGTARLAAKSPYKIRYDAVTGRLENPNYVGRALLHLAKHRGAGFVSAAEESEEEVLEEGEKSKGRSSPYDLMLKHLKDSNSETVGAFFYKRIQDREKPQNRVVRQRAYALKEKIVDYAIPRYLVKDEFHKIWDTQAQYFSQMRREGLKQEVYDILFYERPAAPYAVGKCIYFRDEDRLLKAHPLAELRRVYEEVNNIRIVHDTGKRRLTLEERDNIINELLLQGKNAGKQAIKKLLNLSGQQKISLQDDRVIKAYLYSRPEFAEVAYLQKLSTEELAAFIEFLAEPKNPDDRNGRLYSEDALIQKLKLILDIDDEEEIGNLLAKLPRGRGMLGKSATELLLEKMKQEVLSHREATDALLAVDKRFMAAEEIAREKQGKNFALPYYGEILQSDTQPLPQLVIDNNKTQNKDEAQWGKIANPAVHMMLNQLRLVVNDIIRIYGRPYDINIELGRDVGLSTKKKNELEQRQKSNEKQNEAAKEYLRQHKLCINGKNILKYKLAMEQGWYDAYNPDKRIPRDFSGMEIEHIIPQAKGGTDTYNNLCLVNRNDNLNKGDRFAYDYFAEAKEPEVLREILKNARRNMPGKAWRFEAEARERFEDAGDEDETNRYLADTRYMSKMAARYLRAIVDCDDSEDVIRNRILAVKGGQTAQLRKNWNLQGLEYELMGLDVPRYVSCTPFWLEVNSGEVRAGADKPDVDGSWRFVDKAKNKEWLSKPRIDHRHHAMDAIVVACVNRAMIKKLADSTALRHFQCPLPLAAVDSPGAFRRRVLEVLKEINVSHKPNHSTAGELHEATGKKVLCLNPDVPGALLTVYGRKILQVVKTARDLNKLLIPETIKDEWYEDIAQDKEKQAKLVRDFGLYINTAEQILAEENERAVAEGKKEIKISEGRIIAKAFHIIQEKGLWRGDKFKCYENSSSLIYIKKHGVAYKSGNNHCVDFYVKDGKVGWEVIRRFDVNQAGFVPEWKKSGGKIIWSVQQGDLLELDTPDEWKGYTDKDRCLARVKKFSDGRVTIDFVTDARMTSPKDKSLKYMLVDSLEDRGLSYFLKNKARKVELTPFGKVKKKHKVLWNGTKAAA

SEQ ID NO: 4667 - protein, 1146 aa, synthetic construct
  REGION 1..1146: note = Synthetic
MKYRLGLDLGVGSIGSAVIELDNENNAKDIIDAGVRIFEVSEGAEERRLKRTARKNLVRTKKRLELLAKKLFENGLWPNENPEGTDKLKSKSPYKIRTDALNEKLASPYYVGRAILHIAKHRGAGFVSASEETEEEILEEGEKSKAKKSSYDMMLHHLKETNSKTIGEFFYNKIISGKGNDKTVRQKKYAIEKNIVDYAIPRYLVKDEFNKIWDKQAEFYPQMKKENLKKEIYDILFYERPAAPYATGKCIYFREEDRLLKAHPLSEMRRIYEEVNNIRILNDMNKRKLTLEERDSIVNKLLLKGQNAGKQAIKKLLNLSAQHKISLVDDRVIKAYLYSRPEFANNEHLHNMNENELSSFIEFLAEPKMSKDKNARLYNEDALIEYLKPILKIDDEKEIGNLLTKLPKGRGMLGISATKIILERLKEDVLTHREITDKLAETDKRFMAEEEIARQNQGKCFQLPYYGEILQTDTAPLPPLMINNNKSLNPDEIRWGKIANPAVHMILNQIRLVVNEIIKIYGKPYDINIELGRDVGMSTKKKKEFENQQKQNEKLNEEAKNYLKEHKIAINNKNILKYKLAKEQGWKDAYNPTQNISSIFTGMEIEHIIPQAKGGTDTYNNLCLVNSNDNLNKGDRYAYEYFEETKTQEEIREILKNARSHTPQKSWRFEADAREKYEESGDKEESTRYLTDTRYVAKMAQRYLRAIVDCSDCDKVMQTRILAVKGGQTAKLRQHWNLYGLEYDLMGLDIPRYVNCPPYWLELDTGEIIEGINKPDIDGKWKFFDKAKNKEWQPKPRIDHRHHAMDAITVACANRGLIQKMAEENDINKIHYPLPLTSVESLADFRRKVISCLKDIKVSHKPNHSKAGQFHKETARTVVWANPKDPSKVIAFYKKRILDTVKSINDIDKLLLSEKIKDEYHPQISKDRQTHKSLVDNFILHLDDARQKLLEENEKKLLDGKKETKITDTMILSKALGIIRKAKLWNSDKYHCYENNSSLVYISKHKITYENGNNHCVDFYVKDGKVGWEVIKRFDANQADFEPQWKKEGGKIIYSIYKGDILELDTPEKWKQYTDKKRCLAKVRKFSSGITIELVNDARDDKNIDKLPDRGLSFYLEHKARKVELTPFGKIKKKHKVLWNGSKTAA

SEQ ID NO: 4668 - protein, 1163 aa, synthetic construct
  REGION 1..1163: note = Synthetic
MKYRLGLDLGVSSIGSAVILLGNDNQAIDIKDAGVRIFKVSEGAETRRLKRTARKNFIRTKKRLELLARKLFENNLWVNETPQGTDKLKAKSPYKIRHDGLHEMLSNPNYIGRAILHMAKHRGAGYIAVKNELQDEILDEGDKMSNKTDSYDLMYQNLQKSGCQTLGEFFYKKILESYEAEKGSQERKNLRIIRRKEYAIKKHIVDYAIPRYLVKDEFNRFWNKQALYFSQMNKEGLKQEIYNILFYERPAAPYATGKCIYVREEDRLLKAHPLNELRRIYEETNNIRILSDLKSRKLTLEERDKIINELLLKGKNAGKQSIKKVLNLNPQQKLSLYEDKNIAAYLYAKSEFADLRALQALSDNEFEDVIEFMANPVNPADTQGRLFNEDQLIEQLKIKLKINDEKQISALLHKLPKYRCNLGKTATKKILEILKTDVISHREATDKLALNDIRFKAAEEIARENQGKHNQLPYYGEILQTETQPLPPLMVENNKSLNIEEIKYGKIANPGVHMMLNQLRQVVNDIIRIYGKPYEINIELGRDVGMSVKKKKELEVNQRQNEKLNDEAKKYLTKHQLYINNKNILKYKLAKNQGWMDAYNPTQKIDRKFQGFEIDHIIPKSKGGTDTFNNLALVNELDNKAKKDSFAYDYFVERKTPEELREILKHARNRLKKEAWRFEAGAKEQFEESGDDNETNRYLTDTRYMSKLAARYLRAIVDCCIDEDSLIRILPVKGAQTAKLRQKWYLDGLEYELLGLDIPKFIETTPYFVEQKTGEIIEGIQKPDIDGNWRFFDKKKNPLWHKKPRIDHRHHALDAITVGCVNRSLIQKMAHETDMMKIEYPLPLQNIQSVGDFRRKVLTVLKNINVSHKPEHNKNGQFHKETGRVILCTNSEDNAYQITVYVRNILQTIKSIDELNKLLVSDKIKPEWHPQILEDKIKQEKLVQDMKVYLKPAEEELIKENEQFLAEGKKELRLTETRILAKALRMLQEDKVWKGDKFKCYENNSSLINIPKHGVAYESGNNHRVDFYIKDGKTGWEVIRRFDVNQKDFAPHWKQNGGKIIWSVQQGDLFELDTPNEWKSYTDKDRCIARVKKFSDGRLTIDYAADARMTSPTDKNLKYMFVNSLDKGLSFYTKNKTRKIELTPFGKIKKKHKVLSSGTKTTP

SEQ ID NO: 4669 - protein, 979 aa, synthetic construct
  REGION 1..979: note = Synthetic
MKYRLGLDLGVGSIGSAVVALDEQNNVTDIIDAGVRIFEVSEGAEERRAKRSARKNNVRTRKRLHLLAQKLYENKLWVNDKPEGTPHLAAKSPYRIRCDALDKKLDNPNYIGRALLHLAKHRGAGFVSAAEDWEEEILDEGEKSKKKPTSYEKMADYLKETDSRTIGEYFYKRLNKALHADSDEDKQKRHIRQGAYAVSKNIVDYAIPRWLVKDEFHKIWNAQAPYFSQMQKAGLKQEVYNILFYERPAAPYAIGKCIYYREEDRLAKAHPTSELRRIYEEANNIRLSINDMPQRRLTLEERDRIITELLLQGKNAGKQAIKKLLGLSNQAKISLTDDKTINAYLYSKPEFMEIPYFQNLSDEKLAELIEFISNPVNPNDKNGRLYNEDELIQKLKAIIGIDDENQIGKLLTKLPKNRTMLGLTATKAILYELKKEVLSHREITDKLKKSDSHFEAAEEAARAMQGKCSELPYYGAVLPTDTQPLPLLTIKHNPTLNPDEIKYGKIANPAVHMILNQIRLVVNDIIRIYGKPYDINLELGRDVGVSAQKKNEAEQRQRQNEKLNEEAKQYIKEHKLYINGKNILKYKLAKEQGWIDAYNPTIKIPQNFSGMEIEHIIPQAKGGTDTYNNMCLVSRNDNLNKSDDFAYDYFEKKYPNQPEIIREILKNAHSRMPDKVWRFEADAREKFEDFGDKDETNRYLTDTRYVSKMAARYLRIIIDNADDTEDDIVHTRILPVKGGQTSELRKRWNLLGLEYDLMGLTTSVPRYLPCNPYWVEQNSGEVIDGEKKPDIDGNWVYCNKIKNKDWLKKPRIDHRHHAMDAITVACANRSLIQRMANELDIRHVETALPLTSVASVGEFRRRVIEVLKNINVSHKPNHSKSGQLHKETGRTVLCQNPEDKDALITVYKRKILGVVKSMKDLNKLLIPDTIKNEWHESIAENKQKQAKLVQNLELYANTAEQILIAENEQAVIDGKKKSP

SEQ ID NO: 4670 - protein, 930 aa, synthetic construct
  REGION 1..930: note = Synthetic
MKKENLKKEIYDILFYERPAAPYATGKCIYFREEDRLLKAHPLSEMRRIYEEVNNIRILNDVGKRKLTLEERDSIVNELLLKGQNAGKLTIKKLLNLSTQHKISLIDDRVIKAYLYSRPEFANNEHFQNMNEDELSSFIEFLADPKMSTDKNARLYNEDALIKHLKPILKIDDEKEIGNLLTKLPKGRGMLGISATKIILEKLKEDVVTHREITDKLAETDKRFMAEEEIARQNQGKCFQLPYYGEILQTDTAPLPPLICQYKEKLASQLTGKERESLLNEVKWGKIANPAVHMILNQIRLVVNEIIKIYGKPYDINIELGRDVGMSTKKKKEFENRQKQNEKLNEEAKKYLKEHKIAINSKNILKYKLAKEQGWKDAYNPTQNISSVFTSMEVEHIIPQAKGGTDTYNNLCLVNSNDNLNKGDRYAYEYFEEVKTPEEIREILKNARSRTPDKSWRFEADAREKYEESGDKEESTRYLTDTRYVAKMAQRYLRAVVDCSDCTEVMQTRILAVKGGQTAKLRQHWNLLGLEYDLMGLDIPRYFKLSEERVNPYTGEVFDKVKNKEWQPKPRIDHRHHAMDAITVACASRGLIQKMAEENDINKIHYPLPLTSVESVADFRRKVISCLKEVKVSHKPNHNKAGQFHKETGRTVLCQNPDDPNSLITVYSRKILQVVKSAKDLTKLLIPETIKNEWHEDIAEHKAKQAKLVQDFELYMNTAEQILIAENEQGMAEGKKEIKITEGRILLKAFRIIQDKGLWKGDKFRCYSNSSSMINIPKHGVAYEAQNNHCVDFYQKNGKIGWEVIKRFDANQADFEPQWKKEGGKSIWSVQQGDILELDTPDEWKQYTDKERCLAKVKKFSNGAVTIDFVSDARMTSPKDKNLQYMFVDSLVNRGLSYFINNKARKVELTPFGKIKKKHKVLWNGTKTAA

SEQ ID NO: 4671 - protein, 841 aa, synthetic construct
  REGION 1..841: note = Synthetic
MKYRLGLDLGVGSIGSAVIQLDEQNNAVDIVDAGVRIFEVSEGAEERRLKRTARKNLIRTKKRLNLLAQKLFENGLWVNDTPEGTDKLRAKSPYKIRHNALFEQLASPYYVGRAILHIAKHRGAGFVSAAEELEEEILEEGEKSKKKLSSYDKMVKYLKDTNSLTVGDYFYKRLCEGFAKDVDGNKISPEKRIIRQKQYALEKNLVDYAIPRYLVKDEFHKIWDTQAQYFPQMNKEGLKQEIYDILFYEKSPAPYAVGKCIYFRDEDRLLKAHPLSEMRRIYEEVNNIRIRINKGRERLSIEQRDKIINELLLKGENAGKKSIKKLLNFSGQVEITLVDDKVIKAYLYSRPEFTGIEYIKNLSDEKLAEFVEFLAEPKDENDINGRLLNEDKLILQLKELLNIEDEKEIGNLLTKLPKGRGMLGKTATKILLAEMKKEVLSPREITDRLVKEDKRFMAEEEIARAMQGKCASLPYYGKVLQIDTQPLPPLVIQNNTNLNPDEIHWGKIANPAVHMILNQLRLVINDIIRIYGKPYEICLEVGKDVGMSTKKKAKEESKKKKNEKLNEEAKKYLNERKLFVNRNNILKYKLAKEQGWVDAYDPRVKIPQDFTGFEIEHIIPQAKGGTDTYSNLCLVNRKDNLNKGDRFAYEYFEHTKEPEVIRVILENAHKCFPKEKCWRFEPDAREIYEDNGDKDETNRYLADTRYVSKMTQRYLRAIIDCDDDTAVENRIFSVRGTQTSRLRKHWYLSGLEYNLMGLEIYKYKTPPFWSNQETGEICEGRRKPQSDGNWILYEDKNPDWKAKPRIDHRHHAMDAITVACVEWWMIKNMSNTEKLYERYCN

SEQ ID NO: 4672 - protein, 1158 aa, synthetic construct
  REGION 1..1158: note = Synthetic
MKYRLGLDLGVGSIGSAVIELDNEGKAKDIIDAGVRIFEVSESAEERRLKRTARKNLVRTKKRLELLAKKLFENGLWPNEKPEGTDKLKSKSPYKIRTDALNERLASPYYVGRAVLHIAKHRGAGFVSASEETEEEILEEGEKSKAKKSSYDMMLHHLKETNSRTIGEFFYNKIISGKGNDKTVRQKKYAIEKNIVDYAIPRYLVKDEFNQIWDKQAEFYPQMKKENLKKEIYDILFYERPTAPYATGKCIYFREEDRLLKAHPLSEMRRIYEEVNNIRILNNMGKRKLTLEERDSIVNELLLKGQNAGKQSIKKLLNLSAQHKISLVDDRVIKAYLYSRPEFANNEHLQNLNEDELSSFIEFLAEPKMSKDKNARLYNEDALIEHLKPILKIDDEKEIGNLLTKLPKGRGMLGISATKIILEKLKEDVLTHREITDKLAETDKRFMAEEEIARQNQGKCFQLPYYGEILQTDTAPLPPLMINNNKSLNPDEVKWGKIANPAVHMILNQIRLVVNEIIKIYGKPYDINIELGRDVGMSTKKKNEFEKQQKQNEKLNEEAKNYLKEHKIAINNKNILKYKLAKEQGWKDAYDPTAGIPQNFSGFDIEHMCPRADKASDTYNNLCLVDEIRNKGKGDRYPYEWFEIKYKDEPEKIREILKNARERLKNKSWRFEPDAREVFEENGDKDETNRYMADTRYVSKMAQRYLRAIVDCSDCDEVMQNRILAVKGGQTAKLRQRWNLLGLEYDLMGLDIPRYVDCSPYWLEQDSGEIIDGINKPDIDGKWKFFDKIKNKEWQPKPRIDHRHHAMDAITVACANRGLIQKMAEENDINKIDYPLPLTSVQSVADFRRKVISCLKDIKVSHKPNHSKAGQFHKETGRTVLCQNPDDPNSLITVYSRKILQVVKSAKDLTKLLIPETIKNEWHEDIAEHKAKQAKLVQDFELYMNTAEQILIAENEQGVAECKKEIKITEGRILTKAFRIIQDKGLWKGDKFRCYENNSSLVYIKKHGVAYEGRNNHCVDFYVKDGKVGWEVIKRFDANQADFEPQWKKEGGKIIWSVQQGDILELDTPDEWKQYTDKERCLAKVKKFSDGDLSIDYITDARMTSPKDKNLQYMFVDSKRLRSINAICKANIRKVELTPFGKIKKKHKVLWNGTKTAA

SEQ ID NO: 4673 - protein, 1136 aa, synthetic construct
  REGION 1..1136: note = Synthetic
MTNIRYRLGLDIGIASVGWAVLRHDKDGNPDKIINRGVRVFEACEKPKDGKSLAAARREFRGLRRRLRRKKHRLDRIKELICSEFNISLEYLNSLFESNTPRKDVYVIRFEALDKKIEKEEWARLLVHFAQKRGFKSNRKSEKITNERKNEKTTEKADKLKDETGKLKAAIKTNEQLMESKGCRTIGELLYKNYKRTKQKEDGSFIDYFETRNKAGKYDLTFSREQVDDEVEYVFNSQKRLGNKFASDDIKEKYKEILLSQRNFDEGPGQGSRWRGKGNMIEKMVGTCTFEKGEPRAPKNSYTFERFMLIQKVNNVRLLGSPQKELTVEEKAKIINEAYSKSKLTFKQIRKLLGIGDYTESGKPQYVFNASIYSKKAKGKDADGKTVWNYMTYEKCEESTTFIRLKGYHDIKEAVKIDTLTPQDLDEIAYCLTVYKNDDRLKEALSQRNFKEELIKDIIEKAPNFDKFGHLSIKAMNKILPHLEKGLTYDKACLAAGYDFRNQNNDEKLTKLCFNDIANEIYTPVAKRAVSQTVKVINAIIREYGPPDCIHIELAREMAKNFEERKKLQEKNEDNQARNEKMMNEIREYESAPIKPGGQDLEKYKLWIEQKNYCAYSGERITIQDLFTNAAEIDHIIPYSKSFDNSYNNKVVVKTKYNQEKSNHLPMEYIKTKGDKEVKRFKDWVDDVIKNRTKKNNLLATEIDEQGLTQRNLQDTQYATRTIADFVRNKLQFTENDKFVNKVVCLNGGVTSYIRRRLGLGKDRSTDNHHAEDAIIIASCSQGMQKKISDYEKIRRACNFKDDDVWIDRETGEVIKMAREFPQPWPNFRKEVILWFEENPQSEINLKMRRELLPAYEEDEIIKPLFVSRMSNHKITGAAHKQTMLRTEEKDREEHIIKRVPLIELKLVKGKNNENEIEKYYNKECDKLLYDALLKRLIEFDGDAKEAFKEPFYKPKSNGQNGNIVSHVKIDSGKISNSVDLKKIGAKAANGDMVRIDVFYKLNEKTDKKQFYFVPVYVADFKEKELPNISTKGDEMKEEDGYKFEFSLYAKDLMRIKKKDKAPEMLYYTNAGIATGSINAIPHNNTQNKIESIGVQKLEIFEKWEIDFLGNYCKAPHLPRNIKTLHGRRKKDYLLK

SEQ ID NO: 4674 - protein, 1067 aa, synthetic construct
  REGION 1..1067: note = Synthetic
MTIIWGFDLGVASVGFAVIRQDTAPESGEILRLGVRIFPESREAKADGRPGEPLNATRRLARLKRRQVRRKRWRRIHLRTLMAEAGLLPDQRAEPPRASADPVALRLRGLHDPLTPEQLGWALFHLLKRRGYDEATAPEAVETTGREKTAREKDEQKKQAEFKDSLGVFRGFVGTRTLAEALTDPALPSLPKRRKNPIERPMVTRELDTLWAAQARHHPTILTDDLRRRLESVALSRRPTFFRAASIGRCSLLPDQQRTLKAEWIAQQVELLQFVNALRLTGGNARPLDPEERARALAHLATRATTTWAQLRSAIGLPRSTAFTHEEHGKQAKVRGNATEAAIRAALAPALWDSLAPAVQDAIRQDLPRRLHAISYAEKPGRFEIRPGSGRAAATDEAAAAMARDWGLPAEAARKLAEATLPPAWSRHSRAALEQLLPHLEAGLAYATARERAFPEHRAHGDPLPRFPEPQPQANPDPAIANAVEGALGGIRNPTVMRTLGELQKVANTLLRAHGRPDAIRIELARDLKRNLHERAETLKVNKEREKQRREAADEITGQGKPATAEALDRVQLLHEQGCRCPYTGETISLSQALDGNATQIDHIVPRSRGGERGLVNCVLCAAGSNAAKGDRTPQEWLASDPARRDRLATVWASMLAANKAWAGKHRRLLRTDAPDIEGFTSRQLNDTAYAAVAARAFLGLLWGGGQAGMDHVSTVSGRATALVREGWKLGLRGLLGLPETERAKLREDHRHHAVDALAVALTSPAAMRALSIYWQRRERGEQPRFAPPWPHLQEEARAALHGLVVSHRVDAKLTGQMHKETYLGRTGQTDADGTPLFAKRKAITALSASEIIGERDSRIADAGVQKAIIAALATAGLDLRAADGKARTLGTAEEKLRKAALARPIHLPKADGSPGPVIRRVRIHIRRDPEALLRAHPTKNIHLELGGGTNHHVALYRDGTTIRFLPVTRREAFERQRRGKPAVLPRHPEGGTLLFALCSRDVLMRETPEGREFVLVRKFNAAGQIFYQSLTAAGKPELESKKPWPLLHADWRKVSVDPIGRVRPAR

SEQ ID NO: 4675 - protein, 1116 aa, synthetic construct
  REGION 1..1116: note = Synthetic
MPGRTAERRRLRRSHHQPGGGRSGGSLQHAHPRGLSIKIRNRTPGSGYRGLRRGGLSLPITTQKHCHAASACHIHGMSDGAGAGPMTWAFDLGLGSIGEAVQQKGEFKHAASWLVPSEFASTKAARTRRRMWRTRQAHKARESWLNQCLRSAGMEVLVGRRVERGPQGWTTLPGDPRLEREFPSAGDTTCYNSALLRIRLLRGETLAPWQVYKALHAAIQRRGYDPNIPWKSGASRSTEEKEEGETRARAAEYQSLLEDMAPGRTEFHYPCYLQAWKMRLWNPGQPEVLQERVSHDAESIHGMVAPRTLVEKEVRDLVAAAARYHPQLAGQADFILWGPACKPYASHNGTLRKQHGLRQGSEEDWEGVMGQKIPRFDNRIIEKCALIPRFNVCKMAPEGRAAAQPDAALPREVAFLMKLKNLRFSRGGGIAHLEAAEIATLFEKRREALSLTQKQWETACEKLGGRPLPPDLEVKAPRLGGRSAFCRPALKHVKELILSGKSPRDFHAEALARLHGNTNPQKGLVPADLDFLLRMGDSWEGLYLPNKRLEAISSRARTPDEAIREVIGSVNDPIVRHRLQLFVERLDELETRFGPPDQVALEFVREDFMGEKAKIEYRKFLNRREKERKEAREQAGQLGATSGSSGLKMELFKAQRGQCLYSGQRLHETKIEDYVIEHIVPRAKRGPDAVINYVLTTEELNNDKSDHIPFEWPYLKKQWDAYTQRVESCAGALGVKRVRLLVSPDAVELAQKYTALAETAWISKLAQTILNLKFGWTNGNTPDGRKAVVVVPGGLTARIRRKYSLNSLLAGDGVDEEEAEKKNRKDHRHHALDAMVISFLPGWVANPDKEHFFRFPEPVRANPRGFFQTAIHNVVPRQLCFEKGKLEETIYARRTIAGNSVAAVRQEFRALAFKSVGINKTEFNLDYLYKQTDKILEPRIRQLVQDFASTEPNEAAWERFCDEVRLPRKDGHPGPHVRRVRMRVGPMDEFKNLSKDRAASGAYRKGSTHHGQWVYRDATGRSLVRPVYAFESAGQVRRELIAMHGLDALVGYFQSGCLVELVRPVAHKKTPLAPGQFSLNTLRKDGFAVVTDARGRKSEPISLKTLLESGFHRVTS

SEQ ID NO: 4676 - protein, 1071 aa, synthetic construct
  REGION 1..1071: note = Synthetic
MNNSNEAPANRYVWSFDIGIGSLGEAVREESTSEFKHVESLLLPAEFAGTKAAAIARRMLRSRNAHKKREEWLEKVWRESGHEPPATRTTWRNPQTGRYELKSPGDPRLEREFPAKGESTCYTSCLLRIKLLLGEALEPWQIYKALRSAIQRRGYDPDIPWKAKALRHASADELKEHEEDNSRLLRFEAELREMTTEEAFWLPCYFDAWKMGLWNPKRPDKLSLRIDCHARSPRNHVIPRALVEKELHLLVAAAAKLIPGLRGKEACLLHGPAGRPYASWYPELRKAHGLRLGSHTDTQGVLSQRIPRFDNRIICKCALIPRLNVCKISAETATNPSPQSRVVFDSVFLLKLKNMRAAQPDGMQRALRPEEIRAIFDDPKRKTWSFTAKQWVRAMARFGLVPLTGHEEVKPPRTGGRSRFCRPALEILKRLILSGQAPSRFHADELARLGGNADPLKGLVPSDLEFLHKMGDSWETLHVPDQQLDAVLQMASSPGMAVREIIGRQNNPIVRHRLQLFFERLQQLRVQFGEPQTVALEFVRWDFMGEKARREYSKFTSGQAKLREQSRKDAEAAGLSGKGAALKLSLFKEQGGICLYTGEPLDVAKIDSYEIDHIVPHSRMGPDAPYNRVLTTRHTNKDSKQAMTPFEWLSPSPGWEAYLQRVKGRSSQLRSRKVRLLTSQDAEELVEKYTTLAETAWISRLARAVLDATFGWRNGVDREGRKRVVFVQGGLTARIRRKYRLNSLLAPPPADADPMEWESKAEKNRSDKRHHALDAMVINFIPQWVRNEAKERFFRFPKALGSNPRAALGAVIDRVAPRQVAFEKAALADTIFGARRRGPERTIVQRCALLSLAMRPSAPGKSVFDVGYLKKQIKAVRDPKIQSILAAVANEDLTEEGWRTFCEGLHVPRRDGTPGPRVIRVNMNVGEPDEYADLSKDGTGAYRRGKDGHRGQILYSDASGRPCIAPIYAHASVVGQTRLLRETPGTVIHGFVQTGCLVSLTREVPASGYRRIELNEAKKARRVLPDRSLPAGIYIWRTVQTANGQVVLEEPNGKRVALHLRALLVAGLSRV

SEQ ID NO: 4677 - protein, 1035 aa, synthetic construct
  REGION 1..1035: note = Synthetic
MATVWSFDLGIGSIGEAVRDSATHEFLHVASLLIPQEFASTKEAGKRRRMYRTRLAHQARESWLDHVWLMAGQIPLQKRSVWKNPTTSKWELKHPADPRLEREFAKQGDNTCYTSCLLRIKLLRGEVLEPWQIYKALHSAIQRRGYDPDIPWKTKESGRRKEADADKEEGTTRERMNLFTRELEAMFPDHEECRLQCYFDAVKMGLMDPSKPATLKERIDHTADTTRNQIVPRWMVEKEVRLLCEQAALQVPSLQGKADFLLWGPAEQPYASYDVQTRKEFGLREGGETDWQGVVGQKIPRFDNRIIEKCSLIPRLNVCKIKSTGKEPLPESRVVFEATFLMKLRNMRVQAESAQQRGLTMSEVCEIFSQAEKIGYKVTAAQWKKWCIKFNARPLPGHEEVEAPRSGGRSRFCRPALEILKRLILSGEPPKRQRLVELEGIRGNTNPLKGLIEGDLIFLDRMGDTWEGIYIPDQKLDALIQSSESEEVAVRRIIGSQNDPIVRHRLGQFFERIKTLHAAHGVPETVAIEFIRTDFMGPKALIEYRKFVKERETLRKKSRDEATMLGASAKSGGLKMELFRIQGGVCLYTGDPLKETDLDLYQIDHIVPRERGGPDSMLNYLLTTQKANAEKGVRTPFEWLSRGTAWDAYVNRVNGSASALRNKKVKLLLNEDAVELAERYTSLAETAWITKLSRAILDAYFGWRNGVDKQGVKRVAVINGGLTARVRRKYKLNSILHPDTADESEAEKKNRNDGRHHALDAMVINFIPGWMRDAAKEHFFRFPDGVHKEFFQRYLESLMPRKLCFEKPTLAATVYGGRLSGQETIIVQRTSFLDMGYKPVAPGKTAYDLGYLTKQVGSIRDKKIRSLAQDFVSQEPEEVEWKAFCETLTLRRQDGSPGSRVKIVSVNVGGAEEYRDFSKDGCGAYRKASGSHKGQVVYRDPAGKYRVRPVYVFESVAAVREEVRGKDGVFVEFFQSGCAVSLDTLVEHSQMPLAAGVYELSTIKSNGQVKLKTATGQISFAIVLERFMKAGLKRI

SEQ ID NO: 4678 - protein, 1099 aa, synthetic construct
  REGION 1..1099: note = Synthetic
LGRRIFLAVVATDNLCSVFLYAECTVPNAFIASKTMSTIWSFDIGKAAVGEAVRCIGDDPSDPQPDEFLHKAVLRIPAEFASTRDARDRRRLSSTRAAHKGREEWLDAVWRSAAVAEMPLPLRKRIVERNEVTKKWELKHPADYRLEREFAPRAGASARDGAPSDEAGSRICYTSCLLRIKLLRGEKLEPWQIYKALHSAMQRRGYDFEVPWRSEDRRRRERPAEDEEEAGIRRRMARFVAELQLLFPTREDCQLPCYFDAVKMGLCDPANPDVLRERIDCRAESTRHQIIPRWLVEKEIRLLAEAAGRQIAGFVGQADFLLWGPARRPYASSHPAVRKVFGLREGGANDWQSVVGQKAPRFDNRMIDKCTLIPRLHVCKIKVTGREPAPESRLVFETTFLMRLKNMRVQRATGGQTGLTTAEIKAIFEDPEVKGCKITPTQWGRICQKFGATPLPTYNEVKPLRAGGRGRFCRPALEILKRAILSDQSFSDFYEEELTRLRGNTDPKRGLVEDDLKFLRHLGPTRESIRLSDQKLATILERHHDDADQAVWEIIGSQKDPIVRHRLQLFHQRLVALQAAYGTPQRVALKFAREDFMSKSTLAAFRTFRKKRDMERTRARADAAQAGATESGAGLKLELLRAQGGVCLYTGASLPESGLAEYLITPIVPPSRGGPHAFINYTVARPATHEEKGERTPFEWLSPTAHWATYVKRVRTHAPTLRGKKVKLLLAEDAAELASRAITPVETAWISNLTRAIVEAHFGWKKNGDPGGGQRIVVVNSGLAARIRRHYRLNGILHPTAADEEEAERKSDSDARRRALDAMVINFVSEWIGSPAREEFFRLPTGVGRETFARHLAEVIPRNLCLEKPALAVTIYGARRGAEGPVIVQRATIQDLAYSSSNPAKPVYDLSHAPRQIKTIRDPHIRRLLEKFVSSRPSEKEWKAFCASFALRRKDGSPASRVIQVLTKVGAPKEYKDLSKDQTGAWRKAKNGHRGQFVFTDALGKCRVRPVYAFESVSAVRQELVAMGAALTAFFRSGCAVNLTADVPHARTPLTAGPYILTTFFADGRARLTNASGQQSLPIHVSKLFTAGLKRVSVK

SEQ ID NO: 4679 - protein, 1103 aa, synthetic construct
  REGION 1..1103: note = Synthetic
MNADNKTIWSFDIGKASIGEAVRQGMKFSHVESLILPEEFAETKTAAGRRRFFRTRQAHRAREAWLRKVFKELGLEVLSGRVAKPHPSQKKQWIEQPADSRLEQEFPGKEEGEICYTSCLLRIKLLRGDKLEPWQLYKAFHSAIQRRGYDPDIAWKTKEQKRSLANAKPDDDEGVTLNRMNDFTRELEAMAPGNPEFQLPCYFDAREMGLWSPENPHHLILRIDHSAKTTRNQIVPRSLIEKEIRLMVEKAALQYPVLKGKADYLLYGPSGQAYASYYPELRKKHNLHEGSVSDWQGVLTQKIPRFDNRIIAKCALIPRLNVCKIRPPGENQNEDEKRTGFHRSAIIVAEVTYLMKLKNLRFWRGEKEEKATSQATLPGMFQSSRGRPIEDKLTPAELKALFEDTTFTGYKITATQWKKYCTKILGGFPTTGAEEVAPPRSSGRSSYCRPALEMIKRLLLSGLTPSQAHAAELARLNGNTKPHQGLIPQDLHFLTCMGDSWEKLYLPNQKLEAIANLSTDRVTAIRSLIGSQNDPIVRHRLNLFYSRILHLEEKFGEPDHVVIEFIREDFMGDKAKFELRKFQRERAKERIKAREDAKNAGHESRGAGLRLELLQQQGGICVYTGEALVVTKLDEYEIEHIVPREMGGPDSALNYVLTTHKTNQAKGKQTPYQWLSGTTGWDSYCTRVEKCFGIRSKKKAKLLTAPDAHELAEKYTSLAETAWITKLSQTLLSIHFDWKNGIADGERKVTVVNGSLTARIRRINKLNSILHPDAANEEEAEKKNRDDDRHHALDAMCINFVPDWTKNPGQRDYGFFRFPDEIYGTGGPLKYFKDYIDKVTPEKVCVEKPSLGESIYGLRRAEPIAPTKAKGKKAKTPDDPADLESRGIMVKRFPLKDLAYKTVMMKKVFNPEFARKGIENLRDSRIQSLVREFLETNPLEPAWNDFCREFSLTKPGKKQHRVQRVSLNQGSADEFRDLAKSGTKGGQFKKGAKDHKGQILYRDSQGNPKVRPIYVFESNQKVINELKASSASVEIIDIFRSGDRIQITKDAGMPQKPIPKGVYTLKTIIYTGQTQLRSLTHRKLPALSVGKLLEAGFCKYTGS

SEQ ID NO: 4680 - protein, 1105 aa, synthetic construct
  REGION 1..1105: note = Synthetic
VFYPPFKSSLSPPEKSLPGFPSCHPPPFLRNMPAMSTIWAFDLGKGSIGEAVWNTQTKQFDHVASLLIPPDFASTKEAATRRRMWRTRQAHKAREAWLDEVWKAAGLTPLVGRRVGKVDADGNWIEPKDWNKKGPDGKKRKLTWKLRHEGDPRLEREFPAKGDTTCYTSCLLRIKLLRGEKLEDWQIYKALHSAIQKRGYDPDIAWKSRENRRTRNKKSEDEDKGTAERMAAFENELLAMSPENEDHRMPCYFDAWMMGLWNPAQPDELKDRIDHRSGSTRNRILPRHLVEREIRLLVEAAGRQLPALAGKAWYVIYGPAGRAYASYYKVERDQFKLREGGESDWRGVLGQKIPRFDNRIVEKCVLMPRFNVCKVRSDEQKAHGERGTLPQEVTFLLKLKNMRVQRSPTLQNGLTSVELAQVFNTYCDKGWKLTETQWRKFCASIFTVPVPPSLEVEPPKLAGRSRFCRPALEILKRLILSGQSPKTFHASEVGRLNGNADPRKGLVEADLKFLLDMGDTWEGIHVPNQKLDALAQRTQDSDAAILELIGSQNDPIVRHRLGAFWKRLQWMEEQFGDPQEIAIEFVREDFMGEKALMDYRKFIKDREKERKQARSDAEAAGSMERSAGLKMELLRLQGGICLYKGTPLAETALDEYEIDHIVPRSQGGPDSAVNYILTTKVANDEKGNRTPFEWLSATSGWDTYVSRVKGRQTALRNKKVRLLLLPDAAELADKYTALAETAWIAKLAQTLAGLHFGWKNGNDEQGRKRVTVISGGLTARIRRKYKLNSLLADEDASEEDAEKNRKDDRHHALDAMVLAFIPGWARNESKQKWFRFPEGVTRENTFKHWLSRTLPRNEYLEKPKLAETIYGTRRDGLETVVVQRAELVKLTYRQINPSKTVYDLKYAKEQFKSVRDPVIKRLLLDWCDRGESEEAWKKFAAEFRVPMKNGGNGPLVRRVIMNVGKVDEYVNMSKDRSGAWRKAKKSHRGQVVYLLRTQTKAGKVNESAKVCPVYVFESAQEVMRRLKKEHGANMTVHGFFQSGCMVQIDEDVPHEKMPLPAGSYLLNSIRTDGVVKLTRQDGKTYPDIPRYSVAALIKAGLSRED

SEQ ID NO: 4681 - protein, 1042 aa, synthetic construct
  REGION 1..1042: note = Synthetic
MAGISRNTVWSFDLGKASIGEAIRDLETNSFLHIASLLIPSEFASTKDARNRRRMHRTRMAHKAREAWLDEVWRATGQEPLKKRTVWQNPETKKWELKHPADERLEREFPTKDDTTCYTSCLLRIKLLSGERLEPWQIYKALYSSIQRRGYDPDIPWKARESRRREQGKENEEETGTRERMEAYVDELNAMSPLQLEFQLPSYFDAWKMGLWNPKNPTELKDRIDCHAQSTRNKIVPRWLVEKEIRLLAENAGKQIPELAGKSDYLLWGPTRRPYASYDCSVRKEFGLREGSVTDWQGVVGQKTPRFDNRIIEKCTLIPRLNVCKIKSDGKNPLPESRIVFETTFLMKLKNMRVQQGPTEQRGLSAAEINAIFKDEKFRSFKITEAQWNKLCISMGVRPQPGYETVDPPRSGGRSRFCRTSLEILKRLILSGKNPPEFLEEELRRLNGNTDPKRGLIADDLKFIEKMGSTWEEIHIPNQRLEAILQLAGGADAAVRQIIGSQTDPIVRHRLDIFYQRLQSLREAYGTPKSVVIEFVREDFMGKKAVIEYRAFLKKREAERKRAREDAAKTGSTERSAALKLELLREQGGICLYTGSALKETALEQYEIDHIVPRSKGGPDAVINYVLTLRSANDEKGDRTPFEWLSRTNQWDAYVQRVDSRGTVLRNKKTKLLLNENASELAERYTALAETAWIAKLSQAILDAFFGWKNGVDDEGRKRVISVNGGLTARIRRKYQLNSILNPSLNEEEAEKKNRSDKRHHALDAMVINFIPSWTRDTAKEHFFRFPSGIHRETFVQQIANVTPRNLCLEKPTLTETIYGARRGDQGLVIVQRAKIVDLAYRSITPSKSVYDLTYAAKQFKAIRDAHIRRLLEDFLKRNPTEQDWQEFCASFALPRRDGTLGSRVAQVTMNIGSASEYKDLSKDESGSWRRGKRHRGQIVYLTDGKPKVKPIYAFESEQEALKELLLSGAKIVGIFRSTCAVRLTEAVTHPKTPLVAGLYVLNTIREDAFAVLTDRSGARSQPISLNKLLAAGFQRVESLEI

SEQ ID NO: 4682 - protein, 1067 aa, synthetic construct
  REGION 1..1067: note = Synthetic
MSAKDYVLGGTAPTESAPTPNHVWAFDLGKGSIGEAVRQGTVFRHKASFLIPGDFAETRTARDRRRMWRTRQAHHAREQWLREVFQSAGLPVLYGRNYDAKSGEWKPGEPGDPRLEREFPPAGDDTCYTSCLLRIKLMRGEKLEPWQVFKAFHSAIQRRGYDPNIPWKTREARRSKAGEEAGEEAGTEQRMRDFEKVLHEMAPGQTDYHFPAYFDAWKMGLWNPTQPADLKLRGDCHAQTTRNQIVPRKLVEAEIRRLVEGAAKHYPSLTDKADYLLFGPSKQPYASYNTNPNKEPFLREGAATDWQGVVGQKIPRFDNRIIAKCALIPRLNVCKLREGEKGQPHPQSLVAVEVAFLMKLKNLRFQRAQQQSLSAVEIRVILDDPRRKNWAITRAAWKKYCVGIGAVPLPGHEEVESPRFSGRSRFCRPALEILKRLILSGQKASEFLRDELARLNGNQDPHKGLVESDFKFLREMAERNDTWDGLYIPNQQLDALAQSSADPDEAIQRLIGQQNDPVVRHRLDTFAKRLRALGKHGKPDHVVLEFVREDFMGKKAKIELSKFMKQRAEERKQAREEAAKAGATEKSAGLKLELLRAQGGRCLYTDAGLEPSRLDEYEIEHIVPRSRGGPDAVFNYVLTTHAANDEKDDGTPYEWLSSTGGWDAYVNRVRSRSLALRNKKVQLLISPNAEELAERYTALAETAWIAKLAQTIVGLHFGWRNGADKQGNKRVTVISGGLTGRIRRKYGLNRILNPDAQDEEEAEKKNRNDDRHHALDAMVISFIPGWARDAKKEGFFRFPEGVNREFFTKEIADVMPQNLCYEKPALAETIYGARGVKAERVIVQRVELFKLAMKGIAPGKTKFDLDYMAAQIKAVRDGHIQRKLAEFHATSPDEAKWKAFCDNFHLAGKNGSLGSLVRRVLMDVGEPTEYKDLSKDGTGAFRKALKGHRGQIVYVETSTDKKGKSKETAQVRPIYAFDSPALVLRKLREELGERCRIIGFFQSGCLIEVTKPVPHTKLALPPGRYLLNTIRTGSKDVKVTTSEGKTHPDIPRYNLAEMVAAGMRRAD

SEQ ID NO: 4683 - protein, 1058 aa, synthetic construct
  REGION 1..1058: note = Synthetic
MELNRQETVWAFDLGKGSIGEAVRQGTRFLHKESLLIPAEFAETRSAATRRRMWRTRQAHKAREGWLDLVWAAAGLEPLRKREVWESPVTGKWELKQPADYRLEREFAPNVGEKTRDGAPSDEAGANVCYASCLLRIKLLRGEKLEPWQMYKALYSAIQRRGYDPDIPWKTRQQRRSEKPEDDEGTTLNRMRDFEKDLAAMAPDKPLYQKPCYFDAWKMGLWDPARPEELKQRQDCHAQTTRKQIVPRTMVEAEVRALVEAAAEQIPALKGKADYLLFGRPGKAYASFYADERKRHGLREGGANDWQGVVGQKIPRFDNRIIGKCVLIPRLNVCKIRTGGDGELHPRSRVAAEVVFLMKLKNMRFQHGGGVRGLTAKEIGEIFHDPKRNKLGLTPTQWKKCCLRFGGLPLPGQYEEVEEPRFSGRSRFCRPALEILQRLILSGEAPPQAHANELARLSGNTDPLKGLVQADLKFLLQMGPTWEGIYVPNQKLEALARSTDSPHEAIRQLISSQNDPIVRHRLTLFAERLDYLAVTKKFGTPDYVVLEFVREDFMGKKAKFEYFKFQRDRAHDRAKAREEAAKAGATESAAGLKMELYKAQCGICLYTGEGLAVTSLDEYVIDHIVPRAKGGPDAAVNYVLTTRRTNDDKLDLTPYEWLSNKPGWDAYVERVKKRVGTLRNKKVQLLTSPDAHTLVDKYTALAETAWISKLAQTIVALRFGWPGGIANGQRKVIVVSGGLTGRIRRKYKLNRLLNPDAQSEEEAETKNRNDKRHHALDAMVISFIPNWARNAKFTGFFRFPDAVHPELFAKEIAEVVPQNVCFEKPALAETIYGARTDYGQRVIVQRTELLSLAMKPTAPGKSVFDLKYATKQAQSVRDAVIQERLLEFLATKPDEATWRRFCGEFHLKRKGGSDGPRVEYVTVSVGEPTEYKDLSKDGSGAYRKALKGHKGQIVYLEENRKPRVRPVYAHESIRAVRAQLLMESAAITIKGFFQSGCLVELTGNVAHPKTPLPAGKYSLNTIRRDGFVVLTNSSGQVSQPIGLTKLLPAGFRRIEETA

SEQ ID NO: 4684 - protein, 1083 aa, synthetic construct
  REGION 1..1083: note = Synthetic
MAEFVLKPESYSLGLDIGTTSIGWSCVRLRSGKPSGIIASGVRLFDAGMSGSSVDFDRGKEFSHAVKRRQARLARRQIRRRSSRRWKVFRILQEAGLLPSEPIKRGADVSAFVEKLDTSLRLKFLKPRDHVSAQLLVYRIRSAATRETVEAFALGRAIMHLAKRRGFNSNLRGVPKDDEESGKVKPAIRSLGEDLKKTDSTLGAHLSTLNPFEKRIRQRWTGREMYLREFDVIWKRQSPHHPQMTEDLYKILQKAIFFQRPIRSAKGLVGKCSIEKKRRKLAAAHPLAQEVRMLQFLNNVRVSSRGEVDRVLSDQERQRAIEALSKVSRLSMTGFRSALGLNSKSEKLNYGGDEDSLARGLGTVSDFREILGEQWDKLSPQDQERLVYEVLSFTKRDALIRRAQKYWGFTQSQAELISELTLEPGYSSHCRAVLENLREKLSSFDEKLQRYPTYSEAKLAAYPNIDHGIPIYDQLPPVVKALPDLTNPAVIRALTEVRKVVNELIQRFGKPFRVHIELARDLKKSKKERKNLDELNREQASKRRIALQKIREEFTNYPEKKGYDRGVEMWLLAEECGWVCPYTAEPIRNVRDLLGDNSRFDIEHIFPRRYLDNSFANKTICLHEENRNVKRDRLPSLAYEGAPEKFDAIIKRVKGFKGHFASKKLARFLAREVPEGFVERQLNETRHTTVAAADYLGLIFGGRIDAEGRQRVFTLTGGLTAILRGQWKLNQILGLGDEKNRADHRHHAIDAIVAACTDMFTVSKLQKAAELGWQQSNTRSFPEIDPPWSSLLDDARRSVLSIVVSHRQHRRLNGPLHADTNYSPAAVLNGREMHKVRKPLASLSVTEIAGDAIVDPVIRRLVQEKYNELKTTLNAKEPKQAFAAIENHPAIPPKFSHTSLPTPIHSVRVWVKKKPTEVRKGDPTRLVDATQGSNFCADIVIIRDKHGKEIAWSDRVVSRLDALKTKNHSSDTGEIKFTLFSNDYVIYAGLDGKWQIYRVLSLAEKDIELRLHNDGRKSSLVEGGERVRLRGGALKSMCFRRVEVSPTGVAIEPSSGEIIDDRYLELLSAPNQTEKTSRKRKDT

SEQ ID NO: 4685 - protein, 1121 aa, synthetic construct
  REGION 1..1121: note = Synthetic
MTQVRGQNKQQTPLSENSGPYILGLDIGTTSVGWAVIDSRNNKPVGLRQAGVRIFEAGVEGDIESGRDASRAAGRRNARLQRRQTWRRADRLRRTFVELQRHGLLPDGAFDSAARHELLLKLDAELKVKHVPKDDERAAQLLPYLLRSKGVIEPLTLLEFGRALFHLAQRRGYRSNRKTDQKPDTDSDDELDATGEPPKKRAKRKSKATAEQTSARTLNADQSANDSTASGKEDALKVKESISRLQQEMGTLTLGQFFATLDPLKHRIRQRWTGREMYLAEFERLWTEQSKHHPELTAEVKRAIHRAIFHQRKLKSQKGLVGKCELEPKRRRCAQALPIAQEFRIRQQVNHLKLREANGYERFLEADERNALIERLKNQQSLSFAKAREGLGKGAKFTVELDENGEDKLVGDRTTNRLRPIFGVAWDEFSEAQREQIVYDVLHFQDAEALARRAKRAWNLAPDAAKKLANTQLEPGYARHSKRALTKLAEQLRQPSAKDPQAGKSYMEAREAAGYGTSKTTAVHDLLPPVLKSMSQLRNPAVCRALTEVRKVVNALIRKFGKPDVIRVELARDLKRSRKNRQEVSKANDMQRKSRERAKQRILSEVGIAEPRRSDIEKVLLAEECGWQCPFTGDSISMQSLLGPQPQFDVAHIFPRRYLDDSFVNKTLCRADVNRHRMHDLLPTQAFGQDAEKWDDILNRVRQFMKRTGRVGFQKLERFQMTEVPDDFVSRQLNDTRFTTSFAADYLACLYGGRWDESGRLRIQASTGGITAHLRNEWRLNSILGGGEKTRDDHRHHAVDAVAIALTSPGTQTMLQAAASRAASRFDRRPFAEVEEPWSDFLPQVREIILAIDGVRQAVSHRVNHKLEGTLHADTLYSPLKTHADGSTAHHVRKMLHKLSLTEVTGDKIVDPIIRELVQQQFERLKGTGLKDPAKAFADPGNHPYLTSKKGGLIPIHKVRLAVDVKPKTVGKGHRERFVAPTGGSNHHTVIIAELDEAAHEKRWHDFPTTRLDAYARWSENLKAKTDGDVIRRDWGPGHRFKFVLFIDDCIAMKDDSGVERIYRVANLSKGDIQLQDANDARDAKTLKAEKARIRVSAKQLKDREARKVCVTPLGEIVPDE

SEQ ID NO: 4686 - protein, 1117 aa, synthetic construct
  REGION 1..1117: note = Synthetic
MSKARAVAAQRETISDERFPYILGLDIGTTSIGWALIETRNGRPVRLRLAGVRCFEAGVEGDIERGKDASRAAGRRMARLQRRQLCRRANRLRRVFVELQRYGLLPECDWSSPARHERLKQLDAELEAKHVPENDVRAAQLLPYLLRAKGVTEPLTLHEFGRALFHLGQRRGYRSNRKTDQQSESATDDEQPKKPSKKKASAKELAAAQQLAAGAQPNDAASGKEDVLKVKESINRLQHEMAGRTLGQYFATLDPLEHRIRQRWTGREMYLDEFERLWAEQSKHHPELTTDAKRAIHRAMFFQRKLKSQKGLVGKCELEPKRRRCAQALPIAQEFRIRQQVNHLKLREANGYERFLEADERNALIEKLRNQQSLSFAKAREGLGKGAKFTQELDEKGEDKLVGDRTTNRLRPIFGAAWDEFTEAEREEIVYDVLHFQDAKALARRAMRAWKLAPDAAEKLANTQLEPGYARHSKRALMKLVEQLLQPSSKDPQAGKSYMEAREAAGYGTHKTTAVQDLVPPVLKSVSELRNPAVCRALTEVRKVVNELIRKFGKPDVIRVELARDLKRSRKNRQEISKSNDMQRKARERAKQRILDELRMAEPKRSDIEKVLLADECGWRCPFTDDGISMQQLLGPQPQFDVAHIFPRRYLDDSFANKTLCRADVNRHRMHDLLPIEAFGQDAEKWEEILNRVRQFMKRTGRVGWQKLERFQATEVPDDFVSRQLNDTRFTTSFAADYLACLYGGRWDESGRLRIQASTGGITAHLRNEWRLNSILGGGEKTRDDHRHHAVDAVAIALTSPGTQTMLQDAASRAAVRHDRRPFAEVEEPWKDFLPQVREVILAIDGVRQAVSHRVNHKLAGPLHAALFSSPPITHADGSVRHHQRKQLHKLSLSEVTGDKIVDPIVRALVQQQFERLKATGLKDPAKAFAEPGNHPYLTSKKGGLIPIHKVRLAVDVKPRTVGKGHRERFVAPTGGSNHHTVIVAKLDAAGNEVKWEQKLVTRLEAYLRLRDRKQSGSGGDDIIQRDLGKDYRFKFFLMPNDCVEMDDASGQRQVYRVCSISQSATENEIQFLEQNDARKIGDARSPWNRIRSMESMRKRRARKVRVTPLGEIIPDE

SEQ ID NO: 4687 - protein, 842 aa, synthetic construct
  REGION 552..579: note = misc_feature - Xaa can be any naturally occurring amino acid
  REGION 1..842: note = Synthetic
MPISRRMTRPRQARKTRSKSKSRSAGCSRRWERSRSANSSRRLIRWSTASVSAIFHQRKLKSQKGLVGKCELEPKRRRCAQALPIAQEFRIRQQINHLKLREANGYERFLEADERNALIERLKNQQSLSFAKAREGLGKGAKFTVELDEKGEDKLVGDRTTNRLRLIFGAAWDEFSEAQREQIVYDVLHFQDAKALARRAMRAWKLAPDAAEKLANTQLEPGYARHSKRALTKLVEQLRQPSSKDPQAGKSYMESREAAGYGTAKTTAVHDLLPPVLKSMSQLRNPAVCRALTEVRKVVNAVVRKFGKPDVIRVELARDLKRSRKNRQEVSKANDMQRKSRERAKQRILSEVGITEPRRSDIEKVLLAEECGWQCPFTGDSISMQSLLGPSPQFDVAHIFPRRYLDDSFVNKTLCRADVNRHRMHDLLPIQAFGQDTEKWDDILNRVRQFMKRTGRVGFQKLERFQMTEVPDDFVSRQLNDTRFTTSFAADYLAYLYGGRWDESGLRIQASTGGITAHLRNEWRLNSILGGGEKTRDDHRHHAVDAVAIALXXXXXXXXXXXXXXXXXXXXXXXXXXXXVNHKLEGTLHADTLYSPLKTHADGSTAHHVRKMLHKLSLTEVTGDKIVDPIIRELVQQQFERLKGTGLKDPAKAFADPGNHPYLTTKKGGLIPIHKVRLAVDVKPKTVGKGHRERFVAPTGGSNHHTAIIAKLDAAGNEVKWEQKLVPRLEAYQRLRDRKQSGKGESDIIQRDWGKDFRFKFFLMPNDCVEMDDASGQRQVYRVCSISQTPSWNEIQFIEQNDARKIGEARSSWNRVNSIDSLRKRKALKVRVTPLGEIVPDE

SEQ ID NO: 4688 - protein, 1560 aa, synthetic construct
  REGION 1..1560: note = Synthetic
MKRILGLDLGTASIGWAVINANDDLDPLSIEKAGSRIIPMTADEISDFNNGTLQSNASTRTRFRSIRRMIERSHNRRYRLLRCLRLIGFLPKHYDDCIDRYGKFIGDSEPKIAWKPNEVTKKFEFLFQSSFNEMIDEFKQRHPELDSNKKIPYDWTIYYLRKKALSQPILKEELAWILLQFNKKRGYYQQRLLDDLPNENKLEEYVEAIVIRCEEDNESKKNKKGESWFNIYLDNGMTIRRSYKEMPKLEGELLKLIVTKTIKDGEFEKDKDGNIKQSFRSVKDEDWAVLKKFSEDRINQSKKTVGEFIFDNILDNPDQRVVGGIIRTIERDYYLSELTKILEVQSQFHKEFSNAELYRSCLEELYPTNKTHQEEISKKDLKFLLVNDILMYQRPLKSQKKLIRKCPFETFTSKDGSILSCRCVSKSNPFFQEFRIWQFISSLQIYQRKEEIDGNIHLDVNKTSQFLKTDSDYVKLFKTLYDKRSISQNVLLKYFKLDKENYRWNFVEDKEYPCNETRNAIINAIKHCKLNKTVYLVPTYEEDQIIQTDNRIQLKESEIWYYLYSISDKKKLRKTFSKYVERNNLPIELAEALTNIKPYAKTYASYSLKAIKKLLTLMRRGELWHAEAIDNATTTRINKIIDGEADETISERTREKVSGRNDISQFSGLPLWTACYVVYNRHSEAADTTKWDSPNDIRAWIQNFRHNSLRNPVVEKVILETMQLVADIWDRFGKIDEIHLELGREMKNNNENRKFITNQNLNNEKENRRIYNMLCEFYEHLNITDLNPNSPSQQEKFKIVENAAFLSFEDSIDTTSNFKESKEYIEYKECEAIRKKFADKNKRPTKAEVTKYYLWLEQRYLSPYTGNPIQLSKLFSADYQIEHIIPKSVFFNDSFSNKVVCEAVVNSDKGRSLAFPYIKANAGRTFSMPSGNTVTILSVDNYKNHVTTIYKHNQKKLKNLLLEDISDSFIDRQLKDTQYISKYIKHLLSNIVRENNEQESMSKNIIVCNGTITSILKHDWGINDKWNEIILPRFLRLNQITSSANFTYINKTGHLVPCVPNFAFSFMVKSKTNQFNPQDATSRLKRIDHRHHAMDAIVIACATRSHINLLNNEYAKSDNRHLRDALSRKLRVLEPKQDRNGKQILVPTTFSLPWKLFPIDVYKALCDIIVTYKYKTKIIKNNKNKNCKNIVDGVNLNQNITVRKPLHAMTYYGLVDICKKDSVALKDALNPIYTIIDTELRQVIQKMTAEGHNLKTITKFFDNNKDKYPQYNKKAIEVMYFTNDTNDVGQMQVASRYNLVSLFNDIKNPPNNSEKKSDNNEFNKKLDSNFKTVKDILEKIADKDVRNIVLNHYLEYQNNPEFAFSDEGIRKMNENIIRLNNGKNHKPIYSIRKLEPLGAKFKVGNKKCKKAQYVIAEKDTNLFFGVYLDKDGNRVFSTISLRDSINALKAGKNPVPAVLNNNTLLFSLSPNDLVYLPTDEEIQSGKINQKIDINRIYKVVSFTSDRIYFVQQFVAYPIVSKLEFEKKNKIERAVTGEIIKRYCIPIKTNRLGEIIQIGNV

SEQ ID NO: 4689 - protein, 1446 aa, synthetic construct
  REGION 1..1446: note = Synthetic
LYLCGKYRKYFLKYQTKTLPMKVAGFDLGTNSIGIAVRDTEKSDELTEQLDYFSVVTFPCGVGTGKTGEFSYAAERTQKRSQRKLYKVRRYRKWSTLALLIQYDFCPLSLEELDRWRVYDKERGLKRQYPVESETFARWIRLDFDGDGMPDCTPYQLRKSLVETKLDLSLPSDRYKVGRALYHIAQRRGFKSSRGETAKEQESAEQADDSNEAVSLQKSEEKKSKLLTDFMKAHDCPTVGYALALLIEQGIRVRGSEYQAVRSQYMEEVETIFRFQGMYERFPEFCQGILSRKKGEGTIFYKRPLRSQRGLVGKCTLEPNKPRCPIAHPDFEEFRALVFLNNIKYRQSAEDPWLTLDSDMKEELMASKFYRCQTTFPFKEIREWLEKKTGWSLSKKGKTVNYSDRDSVSASPVTARLRHLLGDDWKNWTFVSEFEKCGHDKVARKAVYTAYDIWHVCYDCDDEDFLCDFAANKLSFDNQQTKKLVRLYEEMRQGYAMLSLKAIRNILPFLRKGYIYSTAVMLAKIPDIVGREKWNEYEKDFVAQVHLLQQRVSDERLVLNIVNTLIANYKSNDYEERWAEHNYDYVLDDSDRADVLKAAVGCIGQKTWESKPKAERDELLKKVEERYQAFFADHKRKYYEMPKMKDVLKAELVGVFSDIEAKAFDRLYHPSDLEIYPHSATGLLGSPVTGALKNPMAMRVLYSLRREVNALLKKGIIDADTRIVIETARELNDANMRAAVADYQKKREKENQKIREILVELLGKRDYSDTEVDKTRFLLEQHDILDVAAMPQAEKKTKKNTEKQKAEKFDRDTTKYRLWLEQGCRCIYTGKVINITSLFDDNLYEIEHTIPRSLSFDNSQANLTVCDAHFNRHVKKNRIPTQLDNYDEIYMRITPWVEKVEQLADRVKAWTDAAKRAQDKDRKDYCIRQRHQWQMELDYWRDKVNRFTMTEVTDGFRNSQLVDTRIITKYAYHFLKTVFERVDVQKGAVTADFRKMLGVQSLEEKKNRDRHSHHAIDATVLTLVPAANVRDRLLQLFYEKEEAERFSGDAGLKERAFLSELKRLNFKGVSRLPGFVDEKILINHTVRDRALVPASRKLRRRGKEVLFDGKNRRMTGDCIRGQLHGDTFYGAIRQYCFDDDHRVIRDADGKLCETDVMYVVRKEFRAKGNSGDAGGFASWADVEKSIVDKALYRMMRSQFADDVSFKDAYAQGIYMLDRAGRRVNKIRHIRCWASRVNNPLVVRKHTHLSDREYKQNYYAVNGENTYLAIYWDGVSNNNDFDCKSLMDLARMKPTDRNPLHFFPPQKKVGKGKKAVFMPLYAVLKPGTRVLVFNPDEFGNKQRLTIDGYKHIIQHLDRSQLMRRLYHMVGFYATDGRIQFKYHLEARNDKQLMEAFPENKYGKVGKNGYSYVDVELEQPKLLLSRANYYFLIEGKDFEIDGDSIVFK

SEQ ID NO: 4690 - protein, 1129 aa, synthetic construct
  REGION 1..1129: note = Synthetic
MMIGVINMGYRIGLDVGIASTGYSVLKTDKEGNPYKILTLNSVIYPRAEDPQTGASLAEPRRLKRGLRRRTRRTKFRKQRTQQLFIHSGLLSKAEIEQILTKPQTDYSVYELRVAGLDRRLTNSELFRVLYFFVGHRGFKSNRKSELNPDNDADKKQMGQLLNSIEEIKKDISEKGYRTVGELYMKDPKYTAHKRNKGYNDGYLSTPNRQMLVDEIKQILDKQRELGNEKLTDEFYASYLLGNEDHAGIFLAQRDFDEGPGAGPYAGDQIKKMVGKDIFEPNEDRAAKATYTFQYFNLLQKMTSLNYQNTTGDTWHSLNGLERQAIIDAVFAKAEKPTKTYRPTDFGELRKLLKLTDDARFNLVNYGSFRTQKEIETVEKKTRFVDFKAYHDLVNVLPEEMWSSRQLLDHIGTALTLYSSDKRRRRYFAEELNLPKDLIEKLLPLNFAKFGHLSIKSMQNIIPYLEMGQVYSEATTNAGYDFRKKKISKDTIQEEITNPVVRRAVTKTIKVVEQIMRRYGNHPDGINIELARELGRNFDDRRKIQKNQDQNRQNNDKIVAELTELGIPVNGQNIIRYKLHKEQNGIDPYTGDQIPFGSAFSVNYEVDHIIPYSISWDDSYTNKVLTSAKCNREKGNRIPMTYLANDEKRTDALTNMADNVIRNSRKRQKLLKQKLSDEEKKDWKQRNINDTRFITRVLYNYFRQAIDFNPELEKKQHVLPLNGEVTSKIRSRWGFLKVREDGDLHHAVDATVIAAITPAFIQQVTKYSQHQEVKNNRALWHDAEIKDAEYAAEAQRMDADLFNKIFNGFPLPWPEFRDELLDRISDNPAEMMKNRSWNTYTPVEIAKLKPVFVVRLANHKISGPAHLDTIRSAKLFDEKGIVLSRISIAKLKLNKKGQVATGDGVYDPENSNNGDKVVYSAIRKALEAHGGSGEVAFPEGYLEYLDHGTKKLVRKVRVAKKASLPVLLKNKAAADNGSMVRIDVFNTGKKFVFVPIYIKDTVERVLPSKAVLQGKSAKNWYQITDADKFCFSLYPGDMVHIKSRTGIKPKYANTTVEHSIKLVKDFYGYFNGANIANGNISIRAHDSSYKSESVGISGLLEFEKYQVDYFGRYHKVHEKKRQLFVKRDE

SEQ ID NO: 4691 - protein, 1121 aa, synthetic construct
  REGION 1..1121: note = Synthetic
MGYRIGLDVGITSTGYAVLKTDKLGTPYKILTLDSVIYPRAEDPKTGASLAEPRRVKRGLRRRTRRTKFRKQRTQQLFIHSGLLSKSEIEQILATSQTDQSVYELRVAGLDRRLTNSELFRVLYFFIGHRGFKSNRKAELNPENEADKKQMGQLLNSIEEIRKDIAEKGYRTVGELYLKDPKYNDHKRNKGYTDGYLSTPNRQMLVDEIKQILDKQRELGNEKLTDKFYAAYLLGDENRAGIFQAQRDFDEGPGAGPYAGDQIKKMVGKDIFEPTEDRAAKATYTFQYFNLLQKMTSLNYQNTTGDAWHTLNGLDRQAIIGAVFAKAEKPTKTYKPTDFGELRKLLKLPDDARFNLVNYGSLQTQKEIETVEKKTRFVDFKAYHDLVKVLPEEMWQSRQLLDHIGTALTLYSSDKRRRRYFAEELNLPAELIEKLLPLNFSKFGHLSIKSMQNIIPYLEMGQVYSEATTNAGYDFRKKQISKDTIREEITNPVVRRAVTKTIKIVEQIIRRYGKPDGINIELARELGRNFKERGDIQKRQDKNRQTNDKIAAELTELDIPVNGQNIIRYKLYKEQNGIDPYTGDQIPFERAFSEGYEVDHIIPYSISWDDSYTNKVLTSAKCNREKGNRIPMAYLANNEQRLNALTNIADNIIRNFRKRQKLLKQKLSDEELKDWKQRNINDTRFITRVLYNYFRQAIEFNPELEKKQRVLPLNGEVTSKIRGRWGFLKVREDGDLHHAIDATVIAAITPKFIQQVTKYSQHQEVKNNQALWHDAEIKDAEYAAEAQRMDADLFNKIFNGFPLPWPEFRDELLARISDNPAEMMKNRSWNTYTPVEIAKLKPVFVVRLANHKISGPAHLDTIRSAKLFDEKGIVLSRVSITKLKINKKGQVATGDGIYDSENSNNGDKVVYSVIRQALEAHNGSGELAFPDDYLEYMDHGTKKLVRKVRVAKKVSLPVRLKNKAAADNGSMVRIDVFNTGKKFLFVPIYIKDTVERVLPDKAALQHKSVKDWYQITESDQFCFSLYPGDMVHIESKTGIKPKYVNKEAGTDIRPVKDFYGYFDGANIATASIQVRAHDSSYTAGSIGVAGLLKFEKYQVDYFGRYHKVHEKKRQLFVKRDE

SEQ ID NO: 4692 - protein, 1121 aa, synthetic construct
  REGION 1..1121: note = Synthetic
MGYRIGLDVGITSTGYAVLKTDKAGNPYKILTLDSVIYPRAENPKTGASLAEPRRIKRGLRRRTRRTKFRKQRTQQLFVHSGLLSKAEIEQILENPQTHHSVYELRVAGLDRRLTNNELFRVLYFFIGHRGFKSNRKSELNPENEADKKQMGQLLNSIEAIKKDMAEKGYRTVGELYVKDSKYTDHKRNKGYNDGYLSTPNRQMLVDEIKQILDKQRELGNEKLTDEFYATYLLGNEDHAGIFQAQRDFDEGPGSGPYAGDQIKKMVGKDIFEPTEDRAAKATYTFQYFNLLQKMTSLNYQNTTGDNWHPLNGLERQAIIDTVFAKAEKPTKTYKPTDFGELRKLLKLPDDARFNLVNYGSLQTQKEIETVEKKTRFVDFKAYHDLVGALPEEMWQNRQLLDHIGTALTLYSSDKRRQRYFAEELNLPKELIDVLLPLNFAKFGHLSIKSMQNIIPYLEMGQVYSEATTNAGYDFRKKEISKDTIREEIANPVVRRAVTKTIKVVEQIIRRYGKPDGINIELARELGRNFKERGDIQKRQDKNRQTNDKIAAELTELGMPVNGQNIIRYKLHKEQNGIDPYTGDQIPFASAFSASYEVDHIIPYSISWDDSYTNKVLTSEKCNREKGNRIPMAYLANNEKRTNALINVADNVIRNSRKRQKLLKQELSAEEQKDWKQRNINDTRFITKVLYNYFRQAVEFNPELDKKQRVLPLNGEVTSKIRSRWGFLKVREDGDLHHAVDAAVIAAITPTFIQQVTKYSQRQEVKNNRALWHETEIDKSEYRAEENRMNAKLFDKIFNGFPLPWPEFRDELLARISDNPAEMMKSRSWNTYTPVEIAKLKPVFVVRLANHKISGPAHLDTIRSAKLFAEKGIILSRVSIAKLKLNNKGQIATGDGVYDPENSNNGDKVVYSAIKTALEAHNGSGESAFPEGYLEYMDHGTKKLVRKVRVAKKSSLPVLLKNKAAADNGSMVRIDVFNTGKKFVFVPIYVKDTVDRVLPSRAVVANKPHSYWYQVTEDDQFCFSLYPGDMVHIESKKGFKPKLSNKESDSDIMPIKNFYGYFDSADIATASIKVRSHDSSYTAKSIGIAGLLAFEKYQVDYFGRYHKVHEKKRQLFVKRDE

SEQ ID NO: 4693 - protein, 1104 aa, synthetic construct
  REGION 1..1104: note = Synthetic
MGYRIGLDVGIASVGYSILKTDSYGNPYRIEFLNSVIFERAEQPKTGASLAAPRREKRGMRRLNRRKQFRKHRTKRLFIESGMLSEDEITHIFENTGDRSIYQLRTEALDHLLTNQELFRILYFFAGHRGFKSNRKSELTEKDNGPVISAIKDIQKDLTDKDYRTLGEYLYKDDKYAEHKRNKEHTYIGTAERNMLVEEINLLLTKQQEFGNEAITPEFIERFIGNGEKPGIFNQQRDFDEGPGAQSPYAGDQIEKMVGYCAFEPTEKRAAKASYTFQYFDLLSRVNNLKVQEMVGAEYKHLNHEERRLIIDKAFEKEKITYADIKKMLNLGEHARFNLLNYGSVKDAKKTEKTNFIHLKSYHTLKKTVGKEEFSHFTKSQIDEIADILTKYSSDRKRIEKFKERTTLTDEQIDKLLPITFSKFGNLSVKAMQNIIPYLELGDIYSEAATNAGYDFRHNKIDWEYIEENVMNPVVKRAVSKTIKVVDQIIRKYGEPDAISIELARELGRSFDDRKKITKHQEENRARNEKVAKRLEELGFPVNGENITRLKLWEEQGNFDPYTGIEIPLEQVFTYMYDIDHIIPYSKSFDDSYTNKVLTSAKCNREKGNRLPLEYFGNDPLRVAALESVMKSIHNKRKRDFLLKKKLSKEDISEWKQRNLQDTQYISKLLRGYFDQNITFSKELDKKQRVFVANGMITSRLRARWGLNKVRDDGDKHHAMDATIVACITPTLTRMLTLYSRRQEVKENPNLWKAYEESEDPELAKMTSIKREQYEKIFSKYFPQPWPGFSQELIMRLSDNPKELIKAQGFEEARKLYTPEEIEELKPIFVVRMPKRKISGAAHLDTIRSAKLLDEGKTISRVPVNKLKLDKNDEIVSGNAHFYRSTDKGWTIVYEALYKELVKHNGDGAKAFPEGELRYSHNGNEHVVRKVKMVQKSTLQATLNDGKSVADNGSMVRIDVFKTPKKYVFVPIYVKDTVEEELPNKYVVPLKPYSEWIKVVEDEFLFSLYPRDLVHIKSKSGIKPIFTNGRKAEKNEIIHDFLGYFVGADIHTGSIQVISNDNAFKTRGIGFATLPKIDKYTVDYFGNYQKVTEKKRQTFNRKKG

SEQ ID NO: 4694 - protein, 1102 aa, synthetic construct
  REGION 1..1102: note = Synthetic
VGYRIGLDIGITSVGYAILKTDEKGSPYKIEHLTSVIFPIAENPKDGKSLAMPRREQRGARRRNRRTKFRKHRTKMLFVRSELLTIKQIEAIYSEKQKLSSIYELRTKALNERLTNEELFRILYFFSGHRGFKSNRKSELTEKDMGPVLTAIKDIEEKLADGTYRTLGEYMELDEKYQEHKRNKDGIDRYLGTAKRSLIEDEIKQIIIAQQQFGNTKLTSGFQVAFIGDEEQTGIFNDQREFEDGPGKQSPYAGNQIEKMIGACTFEENEKRAPKASYTFQYFDFLCKLNNLKYRETIGGEYRFLSLEQKNVLKEKVLTTQKITFSGVKKLLDLPEHAQFNLVNYGTKSTVKETETKSVFYAMISYHKLKKAIPAPIFSNLSTAELDEIGRILTLYSSDKGRKNEFYSRLAIPEEVVEALLPINFSKFGNLSLKAMRKIIPYLEMGLVYSEAATQAGYDFRHKKIDQAYIHENVTNPVVKRAASQTIKIVNNIIRKYGEPDGINIELARELSKNFSERKKTVKYQEENRARNERIADKLRECELPVNGANITRLKLFEEQGKFDPYTGLKIPFDRAFSEEYEVDHIIPYSKTLDDSYGNKILVSAKANQEKGNRIPMEYLQGKPERIKKLESITATIKNPKKCEKLLKQQLTKEDVDGWKTRNLNDTRYISSLLHDYFNQNISFAKLESEKKKRVIAVNGAITSKLRARWGFNKIRENGDEHHALDALIVACVTDKYIKEITSFSKRKEVRFNENLWKREKTPQEIEQEVVHFKKDYDRIFNQAFPLPWTNFREEVSCRMSENPAELMKNHTWETYTDDEIAALRPIFIVRMPNMKTSGPAHQETIRSGKLEEKGLNISRVSIEKLKLDKEGTIKSGNAQFYKDSGNGWQLLHDKLKVALEKHDGDGSKAFPDGVFKYQYLDKEHTVRKVRLVAKSTLQTSLNEKKSVADNGSMIRIDVFRNEQGKYQFVPIYAKDRVAKKLPNQAVAVGKIAKEWPLIEESDFKFSLYSNDLIRVKHKKGVKHVSKDGNKEEKSKTDFFGYYTGADIATASISGISPNNFFEFRSMGLATLISIEKYKVDYFGNYHQVNEKVRQKFPKNRM

SEQ ID NO: 4695 - protein, 1101 aa, synthetic construct
  REGION 1..1101: note = Synthetic
MGYRIGLDIGITSIGYSILKTDENGNPKKIEFLNSVIFPIAENPKDGSSLAAPRREKRGLRRRNRRKNFRKYRTKRLFIESELLTEKDSQTIFEKNADKSIYQLRYEALNERLTNEELFRIFYFFSGHRGFKSNRKAELKESENGPVLTAINETKEALSTSGYRTLGEYYYKDDKFNAHKRNKDYNYLTTPERSLLVEEIKEIISKQREYGNKKLTDKFEEAFIGNQLEKGIFNQQRDFDEGPGGNSPYAGDQIEKMVGWCTFEKEEKRAAKASYTFQYFDLLSIVNNLRVQEYAGELYRPLTSEERQLIIDKAFEKEKITYKDVKKLLTLDEYAKFNLLNYGSKVEPEVTEKKTTFVSLKSYNKLKKAVGKEQLSELSPAVIDEVGYILTAFSSDTSRIREFKNRLDFSNELVEKLLPITFSKFGNLSIKAMKKVIPYLELGDTYDKACSGAGYDFRQNHVDEKYIKENVMNPVVKRATSKTIKVVKQIIRKYGPPDAINIELARELGKSNEERNKIKKRQDENRSYNERVASQISELGFAVNGESIIRLKLWFEQKNLDPYTGLSIPLDDVFSYKYDVDHIIPYSKSFDDQFTNKVLTSTACNREKGNRIPMEYLGNNPIRVKSLEAVANQIKNIKKREKLLKQTFSKEDTDGFKERNLKDTQYISKLLKSYFEQNIIFSESLEQKQKVFVGNGVVTARLRARWGLNKVRDDGDKHHAMDATVVACMTPTLIRMLTLYSRRQEVRANLDLWQTYDEKEDPDFLKLSKIKREQYESLFSKRFPEPWPGFRDELLIRMSEDPKSLIKNYPTVKANYSEQEIMDLKPMFVVRLANHKITGPAHQETIRSAKLLDKGKTVSRMSVDKLKLDKNGEIKTAKWEFYKPSDNGWKIVYEAIRRELEKNNGEGTKAFPKKEFTYEYNGHSHTVRKVQVVQKTTLSVQLNDGEQVADNGSMVRIDVFKTPKKHVFVPIYVSDTIKNELPKKCSAQGKKYLDWPEVDEAEFQFSLYPRDMLHIKHKTGFTAFYNGENKGPVKITDFYGYFTSADIANAQINIVSHDNSFLGKSIGIAGLEKFEKYRVDYFGNYHKVNEKVRQTFQRKKG

SEQ ID NO: 4696 - protein, 1101 aa, synthetic construct
  REGION 1..1101: note = Synthetic
MGYRIGLDIGITSIGYAILKTDNTGNPYKIEQMNSIIFPAAEHPKTGKSLALPRREQRGARRRNRRRKFRKYRTKMLFIKHHLLTKNQMEMIYTDSRILTDIYELRKKALDERISNEELYQILYFFAGHRGFKSNRKSELTEKDMGTMLTAIKGIEEVLRNGTYRTLGEYMYMDAKYQEHKRNKEGLDRYLGTAKRALVEDEIKQILTKQFELGNLDLTKEFEEAFIGDEEKTGIFNDQRDFEDGPGKQSPYAGNQVEKMIGDCTFEKDEKRAPKASFTFQYFDLLSKINQLRYRERIGSDYQELTSEQRELLKEKVLTTQKVTFAGVKKLLGLSPYTQFNLLNYGTKTTQEETESKTNFYSLLNYHKLKKTLPETFFKSLSVDQIDVIAYVLTVYSSDHRRRDEFYGRLALPEEIVDLLLPLNFSKFGNLSLTAMKKIIPYLETGKVYSEAAGLAGYDFRYKQIDEEYIEKNVNNPVVKRAVKQAIKLVKNIERQYGYPPDALNIELAREMGKTFADRRKVMKFQEEGRRRNEQLAERIRDLGQSVNGENITRLKLYEEQNGFDPYTGNTIPCNQIFSDVYDVDHIIPYSKTLDDSFGNKVLVSSAANKEKGNRIPMDYIGGNPERRKKLETIANSIKNPKKREKLLKEELTKEDMEGWKARNLNDTRYISKLLYDYFRQTIQFPELAVEKKKRVFAINGSVTAKLRARWGFNKVRANGDEHHALDALVVACVTDKYIQEVTKYSKRKEVRENSDLWRLDETPEAIEADVVKTKTDYNRIFNQAFPTPWVNFREETRCRMSGNPSELMKNYTWETYTDEEIADLKPIFIVRLPKMKTKGAAHEETLRSGKLYEQGLNISRVSVSRLKLDKNGVIKSGNAEFYQADGNGWKLVHEKLTEALLAHGGDGSKAFPEGFLQYTHEGKEYMVRKVRVVGKSSLQVPLNTKLAVADNGSMIRIDIFRTENGKYQFVPIYVSDKVKETLPNQASAGGKNSKDWPVVKPEDFLFSLYPNDLIRIKHKKGVKHTSKDGNKEVEIKSDFFAYYKGANISTASISGINHNNFFEFEGVGLATLISLEKYRVDYFGNYYKVNEKIRQEFHKK

SEQ ID NO: 4697 - protein, 1089 aa, synthetic construct
  REGION 1..1089: note = Synthetic
MGYRIVLDIGIASVGYAVLKTDEKGNPYKIENFNTVRFPISEKEGKLLNIIRREKRSAHRRNRRIKFRKYRTKQLFIRHKLLTKNEIQQIFTKLVKDIYMLRVKALEELISHEELFRIFYFFAGHRGFKSNRTSELKEKDMGPILQAIQQIDREIEQKGYRTIGEYLYKEDRYSEHKRNKDRIDGGYLGTVKRELIEKEIKMIIDMQRGFGNTALSLKFEIEFIGNEEQSGIFNAQRSFDEGPGEGPYSGNQIEKMIGICTFDKEEKRAPKASFTYQYFSLLCKVNNLKYKETLGSNLIEFNETDRKKIIEKALQQKKVTFITVKNLTKIPKESRFNLLNYSSEESLSETEKSVFYEMKAYHELKSAFVDSEFKEFSTDELDKIGYALTVYKGDKARIEYLKNELNLPIDTIELLLPFKFSGFGHLSIKTMQKIIPFLEEGLTYDKACQKAGYDFQYNKITREYIYTSVVNPVVKRAVTKAIKVVDTLIKEYGEPDAIHIELSREIGKSAEERQKIIKKQASNQKNNQKIIKKLQENNISINGENITRLKLWEEQKNHDLYEDKVIPFEKVFSSEYEVDHIIPYSISFDDSFNNKILVSKKANQEKGNRLPKSYLGKNNNKFEELVSMIKNPQKREKLLKIELTDEEKRALKTRSLNDTRHITTLMHSYLLHNIQYSNKIEKKQRVVAVNGAITAKLRARWGFNKLRENSDKHHALDALVVACITSKYIKEVTNYSKINELRYNTSLWKNKDIIEVLEQEIIHSKIDYNRIFNQKFPVPWFNFRKEVLARLSDNPKEKMKNLKWDNYTDEEIEQLKPMFVVRVPNRKIKKAAHKESIYSGKLYKEQNNIIKRCPIQKLTLNHNGEIVRKNEKFYCSEDRGWLTLYNAIKEKLQEYGGNGEEAFPNGELEYKQGEHIFKVRKVKMVSNSTIGVALNEGKSIAKNDNMIRIDVYKTSKKYVYIPIYANDVVKVELPVKACVAGKNYDKWLNVNDDEFLFSLYPGDLINLKSKSGITLNYNGEINGPTRVNELLCYYVGADISNANISIEAHDRSFKARTGIARLLTLEKYQIDYLGNYYKVHEKKRQSFTK

SEQ ID NO: 4698 - protein, 1098 aa, synthetic construct
  REGION 1..1098: note = Synthetic
MGYRIGLDIGITSVGYAVLRTDEKGEPIRIEHLNSVIFPIAEHPKDGKSLALPRRESRGARRRTRRTKFRKYRTKMLFIRHGLLTKNQIEKIYNQNLGGQSVYELRAKGLDQALTNEELFRIFYFFSGHRGFKSNRKSELTEKDMGPVLSAIKEIEDKLEDGNHRTLGEYMCKDEKYKERKRNKEGKERYLGTANRAMIEIEIKKIIETQRLLGNTDLSSEFEIEYIGDGSKTGIFNDQRDFEDGPGSGPYAGNQIEKMIGFCTHEPDEKRAPKASYTFQYFDLLSKLNNLKYQEHIGEKYQELTLEQKNLIKEKVLSSKEVKFSAIKKLLGLSSHARFNLVTYGSKATIEETEKKTKFYSMSSYYKLKNSLPEAFFNQLTAEQLDEIGYILTVYSSDHRRKDEFYGRLAFPEQIVESLLPINFSKFGNLSLKAMKKIMPFLEMGFNYYDASAQAGYDATYKKIDAKTIHEDVNNPVVKRAVSQTIKIVNHIISKYGKPDAISIELARELGKPHDIRKKISKSQETNRIVNERIADKLRELGIIVNGENIIRLKLWEEQGGMDPYTGLAIPYAHVFSDRYEIDHIIPYSLTLDDSYGNKVLVSGAANREKGNKIPLDYLAGDIDRIHKLEAIAGDIKNPRKREKLLKKQLTKEDIEGWKTRNLNDTRYISVLLHNYFKQNISFAKLETEKKQRVFAVNGTITAKLRARWGFNKIRENGDQHHALDALIVACVTPKYVKEVTNFSKRKEVRGNSQLWERKEYLQEIENEVVTNKEDYDRIFNQAFPYPWPKFRDEVICRMSENPSELMQNYQWKTYTDEEISTLKPIFIVRRPNKKVTGPAHQETIRSAKLKEQGKNISRVSISKLKLNKNGEIVSGNGTFYKTEDNGWQLLYEKLKNELEKNGGNGELAFPTGAFTYQHLEKSHTVRKVKIEAKTTLQAVLNEGKAVADNGSMVRIDVFRTNGKYLFVPIYVKDTVEKDLPNKACVAHKQHLEWPIVNEADFQFSLYSGDLIRIQHKTGVKLVSKDGLKETKIEPDFIGYYVGANISTASISGDNHNNYYRFESLGIATLVNLEKYQIDYFGNYYKVKEKQRQKFHEN

SEQ ID NO: 4699 - protein, 1105 aa, synthetic construct
  REGION 1..1105: note = Synthetic
MGYKIGLDLGIASIGYSVLATDENGVPFKILQMNSVIFPRAEQPKTGASLAAPRRDKRGLRRRNRRTNFRKHRTKRLFINEGILSEKQIENLYKDPKFERSIYELRVAGLDRLLTNEELFRVLYYFVTHRGFKSNRKFELDPSDPADKKQMGLLLNSIEEIKKDLAENNYRTVGELYLNDAKYAEHKRNKAYVDGYLGTPSRDLLYAEIEKLFAAQKSLGNSVITAQFEQVYLSGYTDKNGQEHAGIFMAQRDFDEGPGAGPYAGDQILKMIGRCTFEPNENRAAKATVTFEYFNLLQKVNSLQCREMVGGDFKPLTGEQRDLLIQAAYQRQALKYTQVRKLLKLNDEASFNLLTYSAKEDKVKTEGTKFIAMSAYHKLAKVLPEELMANTALLDHIGFALTAYSSDKRRRRYFEEELKLPEAISEKLLGLNFSKFGHLSLKAMQNIIPYLEMGQVYSEAAENAGYDFKSKQINFDEDITNPVVRRTVYKTIKVVKQIIRRYGKPDSINIELARELGKTLEKRKEITKQQEEGRQRNEKVAEKLRELGLNVNGENIIRYKLFEEQNEFDPYTGQKIKLTQAFTGSYDIDHIIPYSISFDDSYGNKVLTSSAANREKGNRIPLDYLADQPDRIAKLEAIATNSIHNPRKRDKLLKRQLSKDEVSGWKKRNINDTRYISKVLYNYFRNEIEFSETLDKKQRVLALNGEVTSKIRGRWGIRKVRENGDVHHAVDAVVIGAISPTFIRKVTHYSYNQEVKYNKALWHTEELNDNEYAKESQKLNAKLFSKIFNDFPLPWDQFRDELEMRTASDPAEFSRNHTWQHYTAEELAALKPIFVVRTPNRKVTGPAHLDTIRSGKLLKEGKVISRTAITNLKINKKGVLGTGDGPYYSDNGGGSVVEKALIEALNAHDNDGKKAFPNGYLEYMDHGTKKLVRKVKFVKKTTISTVLDQGKSAADNGSMVRIDVFKTPKKYVFVPIYVKDTVEKELPNLAVVANKGYGAWSKIESNDEFLFSLYQGDMIHIKSKKGFKPKYNKEKLDSDPETVADFYGYFDGANIATASIQVKAHDNSYSKDSIGIASLLIFEKYQVDYFGEYHQVKERKRLTFK

SEQ ID NO: 4700 - protein, 1116 aa, synthetic construct
  REGION 1..1116: note = Synthetic
MIQKSGGLHMGIKIGLDVGITSVGYAVLRTDDEGVPYKIETLNSVIFPAAENPKSGDSLAAPRRGNRGSRRRTRRTKFRKYRTKRLFIRHGLLTAEEIEDIFNQKLGHKTIYELRTEALDRKLTNEELFRILYFFAGHRGFKSNRKAEIVNADAETGMVLSAINEIKAALEDGTYRTLGEYMHAHPKYEEHKRNKDGKDRYLGTAQRDFIIDEIKQILNAQRGFDNKSLTDAFEQAFIGNGEGEAAGIFTAQRDFDEGPGKGSPYGGDQIEKMIGWCTFEKEEHRAAKGTYTFQYFELLSKLNNLKIQEFAGDDWKELNPDQRQLIIDKAFSKDKLQYAEIKKLLKLEPEAKFNLLSYGSKTEQDKTEKTNFVALRSYDKVRKALGKEVYEALPSSLKDEIGTILTTYSSDKSRRRVFADRLSLTAEQVEALLPLTMTQYGHLSLKAMRNLIPYLEMGLTYDKAAEAAGYDFKHNAIDRAFIHENVSNPVVKRAVSQCIKVVNQLTREYGKPDAINIEFSRELGKNFDERRKIEKGQKENMARNESIANELRENGIAVNGENITRLKLWREQGNMDPYTGQYIPYEEVFYGNYDVDHIIPYSISFDDSFGNKVLVSSAANREKGNRIPMEYLANDPIRIQSLENIAGTIRNYNKREKLLKKKLSKEDVEGWKSRNINDTRYIARLLRNYFKQNIEFSDKENIKEKVAVNNGTVTARMRARWGLGPKHRNNDRHHAMDAVVVACMTPAFVRRVTVYSKRQEVRFNKSLWNEGTLESDLAHMSLERREEYEKMFSKAFPQPWEGFRDELNARLSDNPKELIKNIKNTLGTYTDEEIDKLKPMFVVRRPNKKITGPAHLETIRSGKLLNEGKSLSRVSISKLKLNKNGEIGTGNAEFYKSEDNGWMPVYNALKAEMEKNGGSGEKAFPDGVFTYTQENGQTHTVRKVKVVQKSTLQAVLNDGKAMADNGSMVRIDVFRTPKKYVFVPVYVKDTVAKELPNRACVAHKNYEDWYKVSKEDNFLFSLYQNDVVYLEHKSGIPLTYIGDNTGVKKDNKLVGYFNGSNIANGTIVVKGPDSSFYAEGVGIATLLKFEKMQVDYLGNLSKVKEKTRQTFSNIKR

SEQ ID NO: 4701 - protein, 1021 aa, synthetic construct
  REGION 1..1021: note = Synthetic
MTGTDATAHSHTPYRLGLDVGTGSLGWAVVELDTDGNPVRIVRTGSRIYGSGRKPKDFSSLAADRRAARQMRKQRDRYLQRRTRLMHELVAAGLMPEAEVERQKLKDLNPYLLRARGVKEELTAHELGRALFHLQQRRGFKSNRKTDRKDDDRSAMKSAIASLQSDLGDDTLGTYMWKRIQNGESVRSRPRKVGSKNEYDFYVNRAMVEDEFNQLWDYQSQSHGDLLTDEARIRVHDAIFSQRPLKPVDPGRCTFETDQRRAPKALPSSQLFRIYQELNAIRVIDPFSSDQADRPLTRQERDAGASFLLGRVKATFPQLKKAMFGPTKLQLSLEYGERKNILGDVVGSELRKAQHIGPDWETYDLATQDLIVTILLEADTDDEVIERLQAESSLSLDQVHGALEAPLPDDYLRLSHRAIGKILPHLKDEWNEEGNAPVMYDAAVRAAGYQSHSEFHSGVLEDTLPYYGKVLKRYTQEVSGSSQAATNPDEWEFGKIANPTVHIGLNQIRTVVNSLIDRYGLPTQIHVEVARDLGQSAEGRREAASNRAKNERANEALNARLTELGQRTNFANRERLRLYDEISVLNHRCVLTGIPIEMSRLFTNDYQVDHILPFSRTLDDSRGNKILVHHTANQFKGARSPFEAYSETADWDHILQRASDAFGATSPKFKRFSADAMDRYSNGEQDFIARQLNDTSYLARVTREYLGSIVDPDRILATPGRLTSLLRHHWGLNGLLSDAAEKNRSDHRHHAIDALVVALSERVTLKAVTDANRRAGDQGIERLLVDLPQPWEGFADHARESVDRIVVSHKPDHNEKGQLHEETAYGVLEGPDKKGRFLTRKRITDPAKGVVGSWEQPKWRDVIPLYRRGEGPDSTLPYKAYIGGSNYCIEIVRTAKGKWAGEVVSTHTANTAEYRAFMAEPGAYRAQSYAGGDLVMRLIANDTIAIEVGDAGRQIMRLCQLETVGAMYFANVREGNVAARSRARDNDFSLLKKAASTLQPLKARRVFVDPIGRVFDPDFKE

SEQ ID NO: 4702 - protein, 1053 aa, synthetic construct
  REGION 1..1053: note = Synthetic
LSELVNTLSPFRNPVHSVAIDTRGEAMSALAEGTAPLKYRLGIDLGSGSLGWALLELDEHDRPCRIIDAGSRIFGTGRDPESLSSLAANRRQARQARRRRDRSIQRRKRLMHELVNFGLMPEAEEERQALKSLNPYELRHRGIRERLEPFEIGRALFHLQQRRGFKSNRKADRKNDEKSAMKAAIRELEAAVGPEETVGSFLYRRLTTHGSTRMRPTQRGGQNTWEFYVGREMLVHEFDRLWETQRAYHPELLTEEARQRIREAIFRQRPLKPVDPGRCTLEPDEKRAPIMLASSQLFRIFQEVNALRVIEGDSLDLRPRPLTREERDAAIELLRSKPKVTFAALKTRVFGKGADVRLTHEEGERAHLLGDVVSAELARDGALGSRWHDLTLDEQDEITRILHDADSDEDVVGALTTRFGFSEHEARGACEASLPDGYYRFSHKAIRRILPYLIDWDEDADAARTFDKAVAAAGYSSHSDIHSGEIFDQLPYYGRVLYRYTQDLANRSEDHVKERTNPDEWEFGRIANPTVHVGLNQLRVIVNAIVKRYGPPFQVHVELARELGQSAVKRLEASRKRSKNERRNEALAQDLQALGQINNHANRERLRLYEELAPLDQMCVLCGERIERSRLFQPGVYEVDHILPFSRTLDDSFSNKHLIHTQCNRFKKNRSPYEAYGELPEWPQILERAEAAYRNNKAKLARFASTAMERYESGGQDFIARQLTDTSYLARVAREYLTYLRLSGDDGFHPERIVAMPGRLTGLLRAKWGLNDLLSSTGAKERSDHRHHAIDAIVIALSDRATLKAVTDANRRAADKYAASNDDGFRKLLDDLPEPWTGFTEDARAAIGRIVVSHKPDHNEKGALHKDTALGVRGGPDKEGRFLVRKKGEDERWRRVVPVYRRGEGPDSSLPYKAYVGGSNYCIEIVRTSTGKWEGEVISTFQANQRDYQAFMRDRRRFLRESFSGRPLVMRLIAGDTVAIEREPGKREIWRLYKMSSAGQMYFAPVNEGNVAARVSAGLLKAFTPRADPLRKVRARRVFVDPLGRVHDPGFRE

SEQ ID NO: 4703 - protein, 1054 aa, synthetic construct
  REGION 1..1054: note = Synthetic
MSAAVNTLWNIDNVPISGTTKGNAMTRPDEGLRYRLGLDLGTGSLGWAVLELDAHGKPCRIVRMGSRIFGSGREPKTLTSLAADRRQARQMRRRRDRYIQRRTRLMHELVAAGLMPTDEVERAALKTLDPFELRARGLDEQLEPHELGRALYHLQQRRGFKSNRKADRGNVEKSAMKQAIRDLDAAMGDDETVGSHMWRRIQDGKRARIVPEKIGSKNSYEFYVDRAMIEREFDRLWETQRKFHSDILTDANKAKISHAIFDQRPLKPVDPGRCTLEPGQKRAPVALVSTQLFRIYQELNALRVQDQTSVTLANRPLTREERDAGVAFLGTKAKVSLSALKKELFGREPMTLSLEAGERAHILGDIVSAELSKASAIGARWWGLALAKQDAIAAVLHDAESDEEVITQLLAHGLTQEEAEGAADASLPEGYSRLSRVAIGKILPHLIDDWDTEADAALTYDRAVLAAGYASHSDLHGGELFEALPYYGQVLRRHTQDLANRDSYHVRTTANPGEWEFGKVANPTVHVGLNQVRVVVNALVERYGSPAEIHVEVARDLGQSAEGRREASSKRAQNEKANDALRAELAALGQRDTFANRERLRLYNELSALNHVCVLTGIPIPKSRLFTNDFQVDHALPYSRTLDDSLSNKILVHHTANQYKKARSPFEAYASLENREDNPEWAAILDRAESAFGKTSPKFRRFSADAMDRYENGEQDFIARQLTDTSYLARLTREYLATLVLAGDDGFHPERIVAMPGRLTSLLRGKWGLNSLLSDNGEKQRSDHRHHAVDGLVIALSDRSTLKAVTDANKKAEDKYRLANDAGVKKLLDDLPLPWVGFVDDAQAAVDRIVVSHKPDHNERGQLHEETAYGVHDGPDKEGRYLVAKSGEEPKWRPVVPIFRRGEGPDSALPYKAYVGGSNYCIEIVRNAKGRWEGEVISTFQANQADFQAFMGETSTFRSQSFSGRDLVMRLVAEDCIAVEREEGVREVLRFIKTSGASQMFFTNVREGNVDARSRDKSVAFAMLSKNPGPLQAIRARRVFVDPIGRVFDPGFAG

SEQ ID NO: 4704 - protein, 1032 aa, synthetic construct
  REGION 1..1032: note = Synthetic
MKKRILGLDIGIASVGWALVEFDDEFQDNKKKGTIIKSGVRIFTRAETPKERESLAKPRREARSQRRRIRRRVERLNSIRELFVKNGVVEEWSVSKKNPNNIYITLNQIKTPWQLRMESLDRKLTNEQFAVVLTHLAKHRGYKSLRKDDKAGKVLEAISQNKKRLNDSDYRTLGEMFCKNESYKEHKRNKGGEYINSVARELIEEEVEKIFVKQREKGNNFADVNTEREYLKIAFSQKPAGSISKMVGFCTFENGEKRAPRDSYSAELFKVLCTINNTTFTDMKTGEIRSFSKEEIGKTLETVKNVKDVKYAKIRKDLGLEDSVKFSGVDYRENAKSKGEGEIFVSMKTYHEIKSKIEKLSKEKWDNLKGNTELLDSIVNIIANLKDDESIKKEFQKLKIDEDIIDVLLNFEFKKFINLSFKALRKIIPFQFQGQKYITASTSAGYSLKQEGIKNKLVPPAKENINVAVVARAFAQTRKVINAVIRKYGQFDQINIELATELKNSKFDRSKIEEGQKKFQSQKDKIFKEVQELRGGMTPSSSLLLKYRLWREQDERCVYSGRKISFEDLLDTGFLDIDHIIPYSKSMDDSFNNKVLCLAEENRNKKNDIPFNYYQRIDRDWNLLISIITSMKNMKIAKKSRLLKQELSDIEGFIERNINDTRYATRYIKDFLENNLEFKENEFIKVKVQARSGGLTSVLSYNWGMSKDREESYFHHAKDAIIVACSTQGMVQYISKISQQYENDKDKMKKIKDKTENCIPKPWDSFRADVEESIEGIFVSFAPRHKVTGSAHKETIYSKKHLEKERYVTVKKSLDKIKLSDLENIPCNENCGIIRVLKERLEKFKNDSLKAFADPVHMPTKCPNKKGPVIRSVKIKESNKTGIEVRKGLAERGEMVRVDVFIKDKKYYLVPIYVSDFKNKDLPNKAIAALKLENEWIMIDKTYSFKFSLFKDDLIKIKKKKEEIFGYFGGVHRSTGTIKIKSRHKPKEIDEGIGSRCLLDFRKFQVDVLGNYTEVKHEKRMPAYITRKDKKH

SEQ ID NO: 4705 - protein, 1083 aa, synthetic construct
  REGION 1..1083: note = Synthetic
MVEQDYRLGLDIGTNSIGWSVIGLRYDDLSGRYVKEKIIDLGVRMFDKAEIPKTGASLAEPRRIARSSRRRLNRRSQRKRDIRQLLIKHSIINQKELDHLYPLPPGSVDIWDIRIDGLERKLSHLEWVRLLIHLAQRRGYKSNRKSERKEEETGKVLSSIQTNQQLLAEYRTVGEMWVKNEKFSSSDKRRNSPNEYIFNVSREDLKQEIITLFNFQRQYLSPYATEKLQEEYLEIWEYQLPFASGNDILKRVGCCSLEPNERRIPKASFTFQYFAVLDKLNNLRIGNNAEHLTEDQRNLLLNRIFERTDYYSKKEVPKVHYSDLRKWLNLDYSFRFNGFDSASTDELKKIEKREFVNLKPYYEIKKAAALYSEKSGEFCSHEDFDTFAYVLTVYKNDKDIRAYLLNQNNIAKKVYDLDLIENLSDLSYSKFGHLSYKSLKRIIPLMEAGKSFKQSAEELGYDTTGMQKSKRSLLLPTIPDEITNPIVKRALSQSRKVVNAIIKRNGSPLSIHIELARELSKDHSERNKIKKEQDANYEKNKGAIKVLVENGVFNPTGFDIVRYKLWKEQNGQCAYSLKKIPANVFFAELRRERNSSPILDVDHILPYSQSFIDGYDNKVLVYSDENRKKGNRIPYYYLKDKPEKWTAFENYVESNKEFKGKKRNYLLKKEFSARESELFKERHLNDTRYATRFFKNFVERNLLFKEPLVPIAKKVQTINGKITAHLRSRWGLEKARKESFLHHAMDAVVIACTDQHMVTKVTEYYQLKENAKNIRKPYFPLPWEGFRDELLTRLATQPVPQKIKEALELKAPLPDYMFVSRMPKRSVTGAAHKETIMKYGGIDEKTGKTKIIKKVALKDIKFNSDGDFEMIGKESDMATYEAIKSRYLEYDKNPEAAFAQPLFKPSKTGLFNPIKKVKIQMETKSFVREVNGGVAQNGDLVRIDLFRKDNKYSIVPIYVIDTAEEDLPNRMVAARKGYHHWPELDKSFEFEFSVHPFDLIRIQSEKGDKIEDKFLYFATIDIDSNRLECKEVNIPSVRNARFGLNSIISIEKYEVGILGDLHLVKKEPRKPFQNSKGRKVVLN

SEQ ID NO: 4706 - protein, 1076 aa, synthetic construct
  REGION 1..1076: note = Synthetic
MRELDYRIGLDIGTNSVGWGVIELEKNESDNKYRTIGIVDSGVRMFDKAEIPKTGASLAEPRRLARSARRRLRRRSERRREIRNLLIQFNIVTEVEMEHLYPLNDGSVDIWDIRIDGLDRLLANDEWARLLIHLAQRRGFKSNRKSEQKDKETGKVLTSIQQNKERLDKYRTVGEMWGKDPHFAQYDKRHNSRDEYIFNVSRYDLELEIVTLFETQRKLGSSYASEELQVSYLKIWNHQLPFASGNAILNKVGFCSLEDEERRIPKATYTFQYYMALDKINRIRIGKNVEAISMEQRQILLHSIFNRDDLVKRKSTPDVKYSDIRKWLKLDDELKFNDLMYDPEATLSMNEKLPFVNLSAYYEIKKVTDSHAMDTGEAYDTTDYDAIGYALTVYKTDKDIHQYLRNPNNIAKRVYSEDLIQMLLSLSYTKFGHLSSKAIQNLLPLMEEGLPFKLAADQFGYDTTGLQKVKREKFLPPIPNDIANPVVKRALTQSRKIVNAIIKRYGSPMSVHIELARELSKTHEERSKLQKNQKANFDRNAGAIKVLAENGILQPKGHDIVRYKLWEEQDHKCAYSQKSIPPEVFFGELRRERNSTPNLDVDHILPYSKSFMDNYQNKVLVYSDENRKKGNRIPFDYLKDNPEAWERFEIYVNYNTKFSKGKKQYLLKKEFTAHEEDVVKERHLNDTRFISRFFKNFMEKKLEPKDPHLKKWVVTVSGQVTAHLRSRFGLSKHRDETHLHHALDAIVVACTDDGMIRRVTNYHKVKESSKAVKEPLFPRPWDNFRDELLTHLAESANPKAISQALEAKISLPRYMMVSRMARYSVTGAAHKETIMINGGIDEKTGKTIVVKRVPLAEIKFDEDGDFSMVNKVSDLATYHAIKERYLAFGGNVKEAFKETLYKPSEKGKGNPIRRVKVEIEKRAHVREVNRGIAQNGNLVRIDIFLKEEQFYMVPIYVMDTSLPELPDRVVTARKGYEQWTRMDDSFIFQFSLYPYDLVRVKRGEDDRFLYFNSIDIDSNRIYFKEPNFPHKHTENRIGLKGIDILEKYKVGILGDITRVNRETRQAFKKKNMKQTI

SEQ ID NO: 4707 - protein, 1071 aa, synthetic construct
  REGION 1..1071: note = Synthetic
LDYRIGLDIGTNSIGWSIIELTTVQSKLDGKYRLKAVGLIDAGVRMFDRAEVPKTGASLALPRRLARSSRRRLTRRSARKKAIRNLLVKEDILNQIELDHLYRTSELVDIWQIRVEGLERRLGRQEWARLLIHLGQKRGYRSTRKAEEGADTEGRAVLSSIKENQETLKQYRTVGEMWATDDKFKGRVRNSTNEFIFNVSRDNLEEEIRFLFQQQRELGSMYASKLLEESYMEVWGHQLPFASGESILKNVGTCSLYEKEKRAAKATYTFQYFMALDKLNNVRILPSMRTLSEEERGLALKAMFERDKLPKNPPKFTYSHLRKAIKLEEDETFQTISYDVEKTLATNESAVFVNLAAYYQIKKVCDEHNENYDYVDYNTIGHALTVYKTDEDINKYLASKNNIAKRVYANDFIDSVLKHSYTTFGHLSLKALSRIIPLMEEGEVFAKAKEKAGFKEESYLEIKSKLLTNIPDAIKNPVVMRSLTQARKVINAIIKRMGEQPASIQIELARELSKDVSERKKITNGFAENRSRNQFAIKTLEENHITNIRGQDIVKFKLWQEQGGRCAYSLKPIKLEELISFLKKERRYEHNLDVDHIIPYSKTFDDSYTNKVLVFSDENRKKGDQIPAEYLGIGTKRWEKYKEFVITSKFPASKKKRLLKEQLVEREELFMKERHLNDTRYASRYFMNFLRENLLRKETVLHETQWVTAVAGRVTSHIRKRLGFGKDREETHLHHALDAIIVACTDKWMIDCVTNYYKSREGGSIKRKEIRFPSPWNGFWHDVQTKLAQLPQPEVINESISKGNPDAVDYMLVSRMPRKSITGAAHKETISKWGGYDDKGKALLVKKVALSELKFKNDDFPMYNKETDPLLYEAIKNRYVESGRDVKRAFATPLYKPSKSGKRNEVKRVKVIAEKKAMVREVNGGIAENGGLVRSDIFLKEKKYVMVPVYTFDTIKQQLPNKYVVSGRGYEQWPELTAEHVFQFSVYPYELVHVGTNKGDNSFYYFASLNISSNVLKFSECNRPTKDYIEIGLNSIILLEKYEIDVLGRITGQSKKGIRQSFKNNKSQMKE

SEQ ID NO: 4708 - protein, 1069 aa, synthetic construct
  REGION 1..1069: note = Synthetic
MSDTIDYRIGLDIGTNSVGWSIVELEFNGEQYETVNLIDAGVRMFDKAEVPKTGASLAFPRRLARSTRRRLKRRANRKKAIRNLLINQDVVNEKELEKLFQSPTLIDVWSLRVEALDRLLGREEWARLLIHLAQKRGYKSNRKAEESTKEGKVVLSSINENTERLKRYRTVGEMWVEDPHFEGRFHNQENEYKFNVTRHQLEEEIRFLFKQQRELNSPYASNELEEHYLNIWGHQLPFTSGNSILNKVGQCSLLENEKRFPKATYTFQYFMVLDKLNRIRLKPSVRKLTQEERSHVINSLFNRSNIKKTPPKVKYKDIRKIIEIAEEETFHDVVYDTEKSITKNEDIPFVNLDSYYKIKKVCDEHKEEYGPADYDAVGYALTVYKTDHDIRLYLRNPENLAKRVFEEKFIQTLLLQSYSTFGHLSQKGIQAILPFMEEGMTYIEAAQQAGFNTTGFKKEGKSKFLKVIPDDIRNPVVMRSLTQSRKVVNAIIKEMEEQPQSIHVELARELSKDNDERKKISNQYEKNRKRNEGAVKILSENGILNPTGHDIVKYKLWSEQRGHCMYSLKPIPAEEFFAELKAERNRAPMLDVDHIIPYSKSFDDSYSNKVLVYSDQNRIKGDRLPVEYFDGDIDRWNEFIGFVNSCDFSKRKRTNLTKKRLNEEEEQLIKERHLNDTRYASRYFKNYLEEHLKFKVSEKKKDKKRVETVAGKITSHLRKRWGLVKHRQDTHLHHALDAVVVACTDTKIIQDVIRYYRLKEESRAESNIYFPLPWKTFRNDILHRLSLVAVPEQVKEALEGDQEQTEYMLVSRMPRRSITGAVHKETISTFGGYDEKGKVLMVQKVPLNEIKFDENGDFKMFNKESDPATYEVIKQRLLENNGDSNIAFEKPLYKPSKKGNGNEIKRVKVIKEQKTMMRQVNGGIAENGDLVRIDFFQKDKKYVMVPIYTWDTIEPVLPDKYVVGGKGYQQWPKITEDYHFSASIYPYELIRVVTKKGVDRFYYFSSLNIGKNVIKVIECNIPHQEYIEIGVNSITLLEKYEMNVLGKIKGVVQDSRNTFSNYKIKKHTQ

SEQ ID NO: 4709 - protein, 1076 aa, synthetic construct
  REGION 1..1076: note = Synthetic
MSELDYRIGLDIGTNSIGWGVIELFWNKDRERYEKVRIVDKGVRMFDKAEIPKTGASLAEPRRIARSSRRRLNRKSQRKKEIRNLLVQHGVITQEELDLLYPLSKKSMDIWDIRLDGLDRLLNHLEWTRLLIHLAQRRGFKSNRKSELKDAETGKVLSSIQVNEKRLSLYRTVGEMWIKDAEFSKYDRRRNSPNEYVFSVSRADLEKEIVTLFEAQRKFQSSYSSKNLQETYLQIWAHQLPFASGNAILNKVGYCSLLKGKERRIPKATYTFQYFSALDQVNRTRLGPDFQPFTQEQKEIILDKMFQRTDYYKKKTIPEVSYYDIRKWLELDETIQFKGLNYDPNEELKKIEKKPFINLKAFYEIKKVVANYAERTNEAFSTLDYDAIAYALTVYKTDKDIRSYLKKSNNLSKRCYDDQLIEELFTLSYTKFGHLSFKAINRVLPIMQEGRTYQEAIQQLGYDTTNLKKENRSMFLPLIPDEITNPIVKRALTQARKVVNAIIRRYGSPNSVHIELARELSKSHDERKKIMTAHDENYKKNKGAISILIENGILNPTGYDIVRYKLWKEQGERCAYSLKEIPPDTFFNELKKERNGSSILEVDHILPYSQSFIDSYHNKVLVYSDENRNKGNRIPYTYFLETNKDWEAFERYVRSNKLFSKKKREYLLKKAYLPRESELIKERHLNDTRYASTFLKNFIEQNLQFKEVEVNLRKKRVQTVNGVITAHLRKRWGLEKNRQETYLHHAMDAIIVACTDHHMVTRITEYYQIKESNKSVKKPYFPMPWEGFRDELLSHLASQPIAKKISEELKAGYQSSDYIFVSRMPKRSVTGAAHNQMIRRKGGIDKKGKTIIIKRVRLKDIKFDENGDFKMVGKEQDLATYEAIKQRYLDHGKNLKKAFETPLYKPSKKGTGNLIKRVKIEGQTKAFVREVNGGVAQNSDLVRVDLFEKDDKYYMVPIYVPDTVCSELPKKVVKSGKGYEQWLTLDNSFTFKFSLYPYDLVRLVKGDEDRFLYFGTLDIDSDRLNFKDVNKPSKQNEYRYSLKTIEDLEKYEVGVLGDLRLVRKETRRNFHEIKIN

SEQ ID NO: 4710 - protein, 1074 aa, synthetic construct
  REGION 1..1074: note = Synthetic
VTDTRDYRIGLDIGTNSIGWAIIELEYNGEQYDKKGLIDAGVRMFDKAEIPKTGASLAEPRRLARSTRRRLNRRADRKKSIRRLIVEQDILNEAELQVLYQEKELLDIWTIRVEALDRRLSRTEWARLLIQLAQRRGYRSARKSEENDKETGVVLQNIRENKKLIDGYRTVGEMWVKDPRFQGRRHNSRSEYVFNVTREMLEEEIRTLFHTQRELGLSFASKEMEESYLSIWGKQLPFASGKDILKRVGFCTLEEQERRFPKATFTFQYFMVLDKLNRLRIKPSMRPLTEEERKSTLHYLFDRDDLSKKKTPPKVMYKEIRKQLNLAATETFNELTYDPNESMTKNENVLFVNLDAYYRIKQQCDLHNERYGPRDYDALGYALTVYKTDKDIRQYLRNKTNLANRIYSEELISNLLSQSYATFGHISKKALLAILPSMEKGDTFKVAADKMGYDTTGLQLVKKELLLPVIPNDITNPVVMRALTQARKVVNAIIKRLGEQPLSIHIELARDLLKGHDERRKISNEYKQNHKRNAGAYTILNENGIINPRGYDIVRYKLWQEQKQKCAYSGKVIPSETFFGELKKERGQGAPTLDVDHIIPYSKCFNDSYSNKVLVYSDENRKKGNHLPFDYLKESPSRWEEFETYVLTNEFPRAKRERLLKKQFSEDEESVMKERHLNDTRYASRYFKQFVEKSLQFKKSKNQFHKKRVETVAGRVTAHFRQRWGFEKHREGTHLHHALDAIVVACTDAAMIQALSLYHKQKEEGKKGYIKRFPLPWITFRDDVLNKLSESAIPEQIYSALVSGTTLPSYMLVSRMPRRSVTGPVHKETISKDGGVDEKGKTLIVKKVQLQDIKFNKNGDFLMYMEETDPATYKAIKERYLSFNKDAKKAFQDPLYKPSKKGKPNQIKSVKVIVEKKAHVRKVNGGVAENGDLIRIDFFQKEGKFFMVPLYTYDTIQSDLPNRYVVSGKGYQLWPQLTNEHKFIQSVHPYELLRVVKRSGDDRFLYLASINISNNVLKFIEPNFPHNDYIEISLGTIKHMEKYDVNVLGQVSLKATGPRLGFNNMKAQKNKVKG

SEQ ID NO: 4711 - protein, 1089 aa, synthetic construct
  REGION 1..1089: note = Synthetic
MNNMDYRLGLDIGTSSIGWGLVEMKWDEDDELYDLVGILDKGVRMFDRAEIPKTGASLALPRRIARSTRRRLGRKCDRKQKIRQLIIKNGLISKEQMEKLYPLEHGSIDVWDLRLDGLERLLSGKEWTRLLIHLSQKRGYKSNRKSEENNKETGVVLNSIKENEMRLNIYRTVGEMWMKDEVFASHDKRRNSDDSYLFSISRFQLEQEIRTLFSCQREFGSTIASIELEEDYLKIWNHQLPFASSDDIIKKVGHCSIFHEEKRIPKATYTFQYFSALDALNRVRVGTEYRKLTIDERDEVLTKLFNRKDYFNKKSLPDIKYSDVRKMISLSTEEKFKGLIYDPNATLNQNENQTFLNLKDYYTIHQCLSCYGKQTGVSFTFDDYDIVAHALTIYKTDNDIRNYLLSNRFKNKFTTELIDSFLHLSFSKFGHLSSKAIKILLPEMTKGLTFKEAADVLEVDTTGLTKKTKQKLLPPIPDEMANPIVKRALSQARKVVNEVIRKYGSPLSIHIELARELSKNHEERKKITKGYDENRNKNKAAIAFLLENGIKQPTGFDITRYKLWEEQNQTCAYSINKIPIDVFVKELQKDRSSAPSLDVDHIIPYSQSYMDGYQNKVLVYSDENHKKGNRLPYEYLSTIPGRWEAFEEFVAVTYNTKNNQFKKKRDLLLKKEISEEALFDLKDRHLNDTRYITRYFKNFIEQNLLFKSSMDNRKKKVIAVSGQITSYLRKWWGLNKDRNATFLHHAMDAIVVACADDQMIKRISDYNKQKENGYKKFLTRFPEPWYGFRDDIYTILTEQPIPEELLKKIQFNLDKDYLLVSRAPRYSITGEAHEMTVRKKVGVDKNGKILTTKRIHLRDIKFDANGDFEMVGKDTDLATYNTIKNHYLSFNKNVNVAFSDENLPFKPVKEGKDPTKANKIKKITVMDTAKSYVREINGGITGNGSLVRVDIFKREEKYIMIPIYVADTVLSQLPNKYVKSGKGFEHWPELDSLCEFQFSLYPYDILCVEREASVELLHFVSADISGNKLECKLINSPSDKTEHRFSIGTAKKLVKMKSGILGELYIVKQEKRQSFNRKEKIKMLNENFN

SEQ ID NO: 4712 - protein, 1078 aa, synthetic construct
  REGION 1..1078: note = Synthetic
MRDLDYRIGLDIGTNSVGWSVIDLRFNEDTGRYEKSGIIDLGVRMFDKAEIHTGASLAEPRRLARSSRLRLKRKSQRKSEIRQLLINYGIVSQEELDQLFPLPKDFVDIWTVRLEGLDRYLNRFEWARLLLHLAQRRGFKSNRKSERNETETGKVLESIYDNRNRLGSYRTVGEMWMKDGKFTQYDKRRNSPNEYIFNVSRIDLEKEIITLFRAQRHFSSGYASEQLEEAYLRIWNHQLPFASGNDILKKVGYCSLEENERRIPKSTYTFQYFAALDKLNNIRLGNDVQPLTQEQRELVLKEMFERTDYINKKAIPKITYSNLRKWLKLDESIQFKGLLYDPTEKITKTESKEFISLKPYYEIQKIVSLHPKENSHTYNKTDFDTFGYALTVYKNDKDIRSYLRNTNNIGKKVYDEDLIEELLDLSYTKFGHLSFKALHKLLPFMEEGKSFSDAAKELGYDTTGSKKLERSRLLPPIPDDITNPIVNRSLTQARKVVNGIIKKYGPPLSVHIELARELSKDHEERRKLSKAQDENYKRNKGAIEVLIENGIINPTGYDIVRYKLWREQTECCAYSLRKIPADVFFSELRRERGGSPILEVDHILPYSQSFMDSYHNKVLVYSDENRKKGNRIPFDYLNENKQKREEFEAYVQSNHSFPKKKREYLLKKEYTPRDSDIVKERHLNDTRYATRFFKNFIEQLLLFKEAKVSMEKRVQTVNGIITSHFRGRWGLEKVREDTHLHHALDAVVIACTDQHMVTRVTEYYKTRESSLKPKRPFFPWPWEGFRDELLIRLAAQPDPTKINESLQLGIPLPDYRIVSRMPKRSVTGSAHKETIMIKGGVDEKTGKTITVKRVALKDITFDENGDFKMVRKEQDRATYEAIKLRYLENGKDTKKAFEEPLFKPCKTGKGNPIKKVKVEFQTKAFVREVNGGVAENGDLVRIDLFKKEGKYFVIPIYVLDTTSSELPNRIVTSGKGYKHWKTLNETYEFQFSLYSYDLVRLIKNDEDIFLYFSSFDIDSNRVLFKHVNKPSVQSEYRYSLGTINLLEKYEVGILGDVNLVKKEVRRSFRQPKKQETTL

SEQ ID NO: 4713 - protein, 1116 aa, synthetic construct
  REGION 1..1116: note = Synthetic
MNTNYLVGKNSPLTKLPQTFPTQVDDELFCGIDIGVGSCGVALVSTASNKHVIRGFEGLPGQLTFMGIRAFDLPEEKTTAGISLKNPDRRQKRLMRRVLERRAQRIRSIKNLLVECNILPKEYNFKDDEWRGRHESATPWRWRVQALTRKLSSWEFAVILIHYAKRRGFKSAKKSDLESKGSEGGTLQSSRANHAALEHYDTVAEMLLNDPRFAISKTDDQTTETRQRNHDGDYIAMVTRADVVDEIHKVFSQQRAFGNEHASEEFEQQYLEQLNKQRAMQDPIKLLGDCPFIPSEKRASVMCPSFELARALQKLNALQIISSENQKTMFSEWILQNGGYASFVSDFGRKAKITWGDLRKFWQLPSTYQFADLRSLPSKRNKNGEFEPELSPAEKERSDFSNRSNAGACAQGSHALRKVLGDKLWAQCLESDFAELDYAAFCLTFYEVVEEEGSQTTMLGAISANAKNHQLFEAIAQDLRSEKPTLHKFKGSASTSAALMRRLIPFLMQGQVYSTAMENAGFNHVKTDFSLDKITNPIVKSVLREAMKQIAHVFNEVGRLPGRINIEVARDVGKSIEERNELERGLKKRTTQKNINRETVAARKGCNESDVTEDELMRYELYMEQGGMCPYSGLSLPNVENIYNADLQIDHIQPRSRSHDNSYDNKVLVYASANQNKGNLTPYEWLATSASGWQEFQTRIAAIRGIRRGKRNRLLSETFATQEPEFLERNLNDTRYISRLLLAYVNDFYRIVGEEPEGKGAVRRVYSIPGALTSLVRKAWGLENLKKDVDGNRVGDKHHAVDALVCACLSHGRAQWITRLSQAYASSVHLLTLRNLSTPWQNFRNDVVSALNQITVSRRERCGAGGALHQETNYGVVIDEHGKQTIYKRQNIIGKNSANKLEASFKTLADLEQIRGINEERSAWLKNALSAWIAAGSPLETEQLPRDPQGCLIRKVFVAQSRVKNVRKQNQGHVTSGTLVRCDVFSKAGKYYLVPIYNYQLASATPPMRAIVAIKDEDDWVIMDESYQFEFSLWKNSRFQFVEKKSKSTFIGCYSGVNRSTGLVEFNLPDDFGDKEKRGVSPKSTITNFRKLNVDRLGRVFMVKNEKRVWRGVVCI

SEQ ID NO: 4714 - protein, 1070 aa, synthetic construct
  REGION 1..1070: note = Synthetic
MPDFVLGLDLGPNSIGWALLTAEFSTQAGHESYSVTGFLDTQSAGHPPVGVRVFEAGLQNFGTAKESSLCQQRRTARAMRRNHARRNARRYALRRLLTRGGLLPTEQAELDRVLSANPYALRAHGLDSALSPHELGRAIYHLGQRRGFKSNRKSGQSSEEKGMLKEIGDLRSAISASEARTLGEYLYHLSKNQVDGRCPLTRGTLRLRNTHTRREMYVQEFDQLIAAQRAYHTEVLTDGFVEDLRRTIFFQHPFEVTEERRRSASSRANLHRSPQAKRCLLIPELRRGSRAAWCAQQFRILKEVNNLRVSEHFSTVERPLTAKERELILARLYISQKVTFDQLRKIVAKVGTDPYAVFNLERGARNHLDGNSVESKLRACFGTSTWDSLADAIRDELRDSLLNTEDLEGFKNECVRHGASPDKAGKLAEWCPSDGYLAYSHTAIRRLIPHLMNGKGEDEAIRLEFPESAEPEALAVLPSLVDPLLPDNLREITNPIVRRALGELRKVVNAIISAHGRPRKIVIELAREMKDGPKGRAEKSKRNAAQRKRREAARTRAEQLGGNPNSRKDVDRILLWEDQGGVCLYSGRPIPQSELFGGEWEVDHILPRWRSLDDSYMNKALVHRTENSAKGDRLPGEWLSPDSEQHRQLLQRARTAFAGKNLDPKLARLGQSELAANEFAARQLNDTRYITRAVCAYLELLYPAELRQGESAVQSTRGGLTAELRRKWGLNDILAPLLDKHGELVLSGQQDEDGQPRKSRADHRHHAIDAIVVAASSRSMLKRYQDFWKAREAHGDFIAFPRPWEDFRFDCKEVLDQILVSHRPARRVRGALHEATFYGQARDRSGELAGQVVTRKPVADLKPAMIDRIRDDIVRERIQERLRERGWREGDKTLPKDWHNPEITTLSGIPIRRVRVGSAMKAGLPLRKGRVTLGNNHHLAILRDPDGNTKVEVIPAFEAIQRARKNCGNPVLRKREDNLELICSLSRKESVLVQCAGDESPRLAVVQMMSGQPKPGSRLDLYLRDARDARPASEGNKSPLVRIQSIGALTSLHLKKVTIDPLGRVRPAGD

SEQ ID NO: 4715 - protein, 1511 aa, synthetic construct
  REGION 1..1511: note = Synthetic
MITLGLDIGVSSLGTAIVDTQKNQILHTGVYVFPAGKEAFGTNKEKPKNETRRVARQGRRQNYRRRLRRSQLLKFLYQLSELNSPEGDRYVPLTFEEIDAWLSWDKEGKTAARQFPDSEAFRAWMAMNPYEIRSRAVEGSITRAEFGRLLYHIIQRRGFQSSRKMKADEGAMAKGKDDIIGYTQTKSEIGEQTLGQYLYQISAKEGEPFTQREEKPRGRYTLRSMYVEEMERIWGQQSKRLGLEGLEIEGTPVKELLIGQISHDPESGELLYKSNDSVLFWQRPLRSQKHLINKCSLESRKMYDPVKQRHYIQGPRVAAVSHPTSEFHRALQVLSNVRVEGRTLYDMGLFQTSLDFLCSKNSKTIKVADLKRHLSLVSKLNYDDDQTLPGCPTIASITDLFEKGALSYHYGETDTIYIDIWQKLLFYDDERLLEKNIADYAQSKGLKLKADFAKRLEGINLVDDYGSISIHAMDNIIPFLLQGRSHTEAIFLGGVKNAFGPRYYYFEKEEQMWQELLQIINEPASKGEKIDRLIQFLSNPDEQTGLDEKRLRMKLYHPTQSVQKIEIQNRLGEVDNLRNPIVEQALWAVRRQVNALIDQMIEQTGNPNFRFDRITIELSRDLKSSKERRSKIQQEQEANRAENEEAVMWLKALDLPYTGDNILKYRLHKELRLKGGGVARCPYTGKDIRLAQLYDGNNLFQIEHIIPRSISLDNSFGNKTLCESNFNREKGNMTPYEFYSVNSSKTLWGAEDWDEIIHRVRQVLPARKASRFLSKRSAQEQREELPSKMLNDTAYMSVKAREYLTSICSDVRTVSGSITANLRRLWGLNKILGETYECLPGTVSKELAAGEEKEVYAILDTKSNVITRVVPKFNPIPYRTADEIRIPVVVKGTKLFCDGKEYPKPAHLDLNGVSGEALLAYHAVGGIPHCQPLFNPKPSNKGVLVVTATRSGKSNLISNDIDVLDKIKKSRYPTEPGKYWVTLQLKGEPIWEFPSNKKRVAANAVRVPGRLKGNTFVSSFFETEEENSVVNMEEHRNRTAYLNLDYDTAEFTKMLRPEPAVGEGELLLTGVVNHGSLLLDQCDGKTIDVQHLNLKEQTRHYVLLQYGKNLSSKEQVTIYPIYNKAPKSRKDEVLLEGKFFALDKDKSLYALEPVKNRDDHRHHAVDALVIALAKQNYVTELSTYNRQDDSYRQGGRLKPRFDLPWDGFREEAEQSINDILVVHKKNRVDPLSKVTRKITKNGKVYTSEGYAVRGALHMDTIYGQRKAPGQAEVGYHSRKSITEVTNMSQLNKVVDAAIRKEMLRILKEELGLDTSNSSLTFPKNAFIDEDGKTKVYLPNRNGGEPVPVKKVRLRENFSSPRCLKNQNQFVKTENNHHMLVYKTKKGKFNESIVTFWDVVERLNRGEAIFQLPEDGEKIIFKLMANDYFIIGLKKQEIISNLSNPSLLSKYLFRVTSLSSRDYRFRLVAASTDKNKHENRRIRTPNFFDPTKENIHAVEVDLNGNIRLKEDD

SEQ ID NO: 4716 - protein, 1510 aa, synthetic construct
  REGION 1..1510: note = Synthetic
MITLGLDIGVSSLGTAIVDTQKNQILHTGVYVFPAGKEAFGTKDEKSRNETRRLARQSRRQHFRRRLRRSQLLKFLYQLSELNSPEGDRYVPLTFEEIDAWLSWDKEGKTAARKFPDSEAFRAWMAMNPYEIRSRAVEGSITRAEFGRLLYHIIQRRGFHSSRKIKFGGSNSMAEGKDPIIGYTQTKSEIGDQTLGQYLYQISAKEGEPFTQREEKPRGRYTLRSMYVEEMERIWDQQAKRLGLEELEIEGTPIKELLIGQISHDPESGELLYKSNDSVLFWQRPLRSQKHLINKCSLESRKMYDPVKQRHYIQGPRVAAVSHPTSEFHRALQVLSNVRVEGRTLYNMGLFQTSLDFLCSKNSNTIKVADLKRHLIVSKLNYDDDQDLPGCPTIASITDLFEKGALSYHYGETDTIYIDIWQKLLFYNDERLLEKSIAKYAKGKRLKLKADFAKRLEGINLVDDYGSISIHAMDNIIPFLLQGRSHTEAIFLGGVKNAFGSRYCDFEKKEQMWQELLQIINEPASKGEKIDRLIEFLSDPDEQTGLDEKRLRMKLYHPTQSVQKIEIQNRLGKVDNLRNPIVEQALWAVRRQVNALIDQMIKQTGNPNFRFDRITIELSRDLKSSKKRRDKIQQEQKANLAENEEAVMWLRALKLPVTSDNILKYRLHKELRLKGDGIARCPYTGKDIGLSQLYDGNNLFQIEHIIPRSISLDDSFGNKTLCESNFNREKGNMTPYEFYSVNSSKTLWGAEDWDEITHRVRQVLPARKASRFLSKRSAQEQLEGLPSKMLNDTAYMSVKAREYLTSICGDVRTVSGSITANLRRLWRLNKILGETYECVQGAVSQELAAREEKEVYAILDTKSKVITRVVPKFNRIPDRTEDEIRIPVVVKGTKLYRDGKEYPKPAHLDLNGVTGKALLTYHAVGGTPHCQPLFNPRPSNKGVLVVTATRSGKKNLISNDIDVLDKIKKSRYPTDPGKYWVTLQLKEDPIWELPSNKKRVVANAVRVPGRLKGNTFVSPFFKTEVEDSVVNMEEHRNRTAYLNLDYDTAEFTKMLRPAPEVGEGELLLTGVVNHGSLLLDQCDGKTIDVQHLNLKEQTRYYVLLQYGKNLSSKERVTIYPIYNKAPKSRKDEVLLEGKLFALDKNKSLYALEPVKNRDDHRHHAVDALVIALAKQNYVTELSTYNRQNDSRRQGEALKPRFDLPWDGFREEAEQSINDILVVHKKKRVVPLSKVTRKITKNGKVYTFKGNAVRGALHKATIYGRRKAPGQTDYGYHLRKGIAEVTNMKQLNKVVDAAIRKEMLRILKEELGLDTSNPSLTFPKKAFIDENGKTKVYLPNRNGGEPVPVKKVRMCDNLSNAVRLKEINQYVDLKNNHHVLIYEALDGRLQESVVTMWDVVDRLNRGEEIFQLPPDGKRILFKLIIDQMYLIGVKRDDVIHNLSNTDYLIRYLYRVQNLSSVDYVFRKATASTINYDREMIRVQSLTFFEPDKDNIHSVEITLTGQVILKDD

SEQ ID NO: 4717 - protein, 1510 aa, synthetic construct
  REGION 1..1510: note = Synthetic
MITLGLDIGVSSLGTAIVDTQKNQILHTGVYVFPAGKEAFGTNKEKPKNETRRVARQGRRQNYRRRLRRSQLLKFLYQLSELNSPEGDRYVPLTFEEIDAWLSWDKEGKTAARQFPDSEAFRAWMAMNPYEIRSRAVEGSITRAEFGRLLYHIIQRRGFQSSRKMKADEGAMAKGKDDIIGYTQTKSEIGEQTLGQYLYQISAKEGEPFTQREEKPRGRYTLRSMYVEEMERIWGQQSKRLGLEGLEIEGTPVKELLIGQISHDPESGELLYKSNDSVLFWQRPLRSQKHLINKCSLESRKMYDPVKQRHYIQGPRVAAVSHPTSEFHRALQVLSNVRVEGRTLYDMGLFQTSLDFLCSKNSKTIKVADLKRHLSLVSKLNYDDDQTLPGCPTIASITDLFEKGALSYHYGETDTIYIDIWQKLLFYDDERLLEKNIADYAQDKGLKLKADFAKRLEGINLVDDYGSISIHAMDNIIPFLLQGRSHTEAIFLGGVKNAFGPRYYYFEKEEQMWQELLQIINEPASKGEKIDRLIEFLSNPDEQTGLDEKRLRMKLYHPTQSVQKIEIQNRLGEVDNLRNPIVEQALWAVRRQVNALIDQMIEQTGNPNFRFDRITIELSRDLKSSLDRRLKIRQEQEANRAENEEAVMWLRALNVQVNRDNILKYRLHKELQQQDGIARCPYTGKTINPAHLFAGNNYFQIEHIIPRSISLDDSFGNKTLCESNFNREKGNKTPYEFYSVNSSKTLWGAEDWDEITHRVRRVLPARKASRFLSKRSAQEQLEELPNKMLNDTAYMSVKAREYLTTICGDVRSVTGHITADLRRMWQLNKILGETYECAPGAVSEELIARGDTDVYALLDSESQVVNRVAPKLNLIPNPTADEIRIPVVVKGSKLYRDGKEYPKPAHLDLSGVTGEALIAYHRVGGTPHCQPLFNPKPSAKDRLVVPATINSKNQLTSDYIEALRKVKRGNYPTEPGKYWVTLQLKGEPIWELPSNKKRVAANAVRVSGRLNGNAFWSPLFETEVDSSVVNMEEHRNRTAYLNLDYDTAEFTKMLRPAPEVGEGELLLTGVANHGSLLLDQCDGKTIDVQHLNLQEQTKYYVSLRYGETISPEERVTIYPLYAKAPTPRSGEVLLEGKLFLLDKSQDLYALEPVKNRDDHRHHAVDALVIALAKQNYVTELSTYNRQDDSYRQGERLKPRFDLPWDGFREEAEQSINDILVVHKKNRVDPLSKVTRKITKNGKVYTSEGYAVRGALHMDTIYGQRKAPGQTEVGYHSRKSITEVTNMSQLNKVVDAAIRKEMLRILKEELGLDTSNSSLTFPKNAFIDEDGKTKVYLPNRNGGEPVPVKKVRLRENFSSPRCLKKQNQFVKTENNHHMLVYKTKKGKFNESIVTFWDVVERLNRGEAIFQLPEDGEKIIFKLMANDYFIIGLKKQEIISNLSNPSLLSKYLFRVTSLSSRDYRFRLVAASTDKNKHENRRIRTPNFFDPTKENIHAVEVDLNGNIRLKEDD

SEQ ID NO: 4718 - protein, 1349 aa, synthetic construct
  REGION 1..1349: note = Synthetic
MQKILGLDLGTNSIGWAIRDIDEVENQIIDKGVLTFEKGVATTKSGEEPMVKKRTESRSKRRNYQAEKYRKWEMLKCLIENKPKMCPLTIDELNGWRKYNKENGRVYPQRKEFINWLKLDFDGDGKIDFENPYHLRKTAAEKKIDDPSILGRAFYHLVQRRGFRGRDEEESKTIMTGSKETGTIGAEDIHKIMEEQSTTLGGALYYDLKNNGKRIRKRYNLRTDFEAELKAICHLQGIDEGSELFKKLYKAIIWQRPLRTQKGNIGRCTYEPSKQRCPISHPLYEEYRAWCFINNIKIKSASSAGSTFESLSAEHRENVYKKLFFRKSKAHFEFVDIEKLLDPKKNLYVFNYKDNTSISGCPVSAAIKEIFGELEDIRIPHAINEKRSKKKDYYDHEDIWHVLFSFDSKEKLKDFAKVQLKLDNENADKFCKIKPQQGYASLSISVIKKIVPYLRKGFIYSDAVYLANLKKVLGKELTDEETNKIIEGIRLQIKLQKEEKELIGATNNLIAKHLNLETHEGYARYPEYILRQKDYDDIDNELINNFGAKTWDEKNEETKNKYRIRVQELYQAYLQTPVNVEKGLLFNKVPRLDERIKTYLKNEWNAEDENLKHLYHPSETEMYPGAMEKNGKKYLGDPMPLSRGFKNPMAMKTLHHLKRLVNYLLDQDKIDENTRIVVEIARELNDANRRKAIERWQGYRQKQNKEYHEAIKEIIEKHGLNIDPSKDDIIDKYRLWIEQERQCLYTGKVINCTELFDGTKFDFEHTIPADISFDNELKNLTIADSKYNREIKQKRIPTDLPNYERDTTIGDETYTAIQPRLKFMEEKVEHFEKQVEFWKNESRKAGTKDRKDFSIQQKHFNQFELDYWKKKLDTFTITEYKVGWRNSQLRDTQIITKYALPYLKTVFNKVEVQKGIITAEFRKIFNVGFEKDRSKHTHHAVDAAILTLIPSAVMRDKLLKAHFEAVENNTRFHSLPPEWKNYNSQFIKNIEEETLINYINQDRTLVPTVKHVRKRGRIQYVKEKLPNGKWVYKLDDLGKKIPLIAQGDSIRGKLHKETFYGSIKKPSEGSITFVERILLKEIEEKNIDKIVDQKVKEVIRDTVKERINSGKSFKEAISEDIWMIGKNGKPKKVDKNGNRIFPIRHVRCEVKVGQGSLTEEKALEIKQHIFKSKHEYKQSYYALNETMSVCLYYEGTTNNKTQKAFRFIGLFELAQYKLRNLSDIISISEFQYCEVGRGMNKNLIPLCFLITSGTHVLIYSNNPDEIKELNKTGMLKRLYRIYKFNKAPSPYVYMQHHTEARPDPELGLGQTKIDINKYQPRLKLVANNFNCLIEGKDFEIKPDGEIILR

SEQ ID NO: 4719 - protein, 1353 aa, synthetic construct
  REGION 1..1353: note = Synthetic
MSKILGLDLGTNSIGCTLRDTSQRENQIVFSTVLTFDKGVGEEKGVEVPLVQQRTMSRSKRRNYNARRYRKWQLLETLIKASPPMCPLTMDELNRWRKYDNENGNEYPSSPEFLAWIRLDFDGDNISDFINPYELRALASKQKINNPLILGRIFYHITQRRGFKGRDEAESETILKGSDEKGIAGADATLNIMKDKNVSLSEALLIDHNENLKRIRNRYSLRKLVEEELKSICLKNEIDIESELYKNLAKSILWQRPLRTQKGNIGKCTFEINKPRCPISHPLFEEYRALAFLNNIKITNLENNEEQNLSLEEKEKIISKLFLRKSKPTFDFSEIMKLIDPNKNQYKFNFKDYVSVSGMPVTAALKELFGCNVYEISINKASSANGEKGYYDYEDLWHVLYTFTDSESLIKFAKSKLQLSDEDSVKFSKIKIPQGFAALSINAIKKILKYLHQGYIYSDAVFLANLSKVLDQSLTSEEEEKLIANVHRLMINQRSNKNKSAIINNLISNYINNEEMNGKKESSYISDDNLNKLVENEIINVLGNNRWIELGEQNQNHLINEIRDNFKNLLITRGNFSRGVLYDKVPRFDDQIKTLLKKEYPEWDEERFKYLYHPAESEFYPAAKEIDGKKILGSPEPISKGLKNPMALKTLYVLKKLINHLILTEKIDSETRVVVEIARELNDANRRAAYERWKNERQKENESLVDKITQSASEAGYPDISVDDNILTKYKLWLEQGMQCLYTGKVIAFSELLNGTSVDIEHTIPASISFDNELSNLTLANSRYNRDIKKKLIPTQLPNYNTTIEINGESYKAILPNIKFIENKVKHYSKLVEDAKKKSKSAQSKDQKDTQIQNRHYYKMHYDYWNKKLRTFTDTEIRSSWKNSQLVDTQIISKYAFHYLKTVFNIVDVQKGSVTAAFREIFNLGFKKDRNSSIHHAIDAATLTLIPYPKKRDYLLLKYFEATERKLAFHSKPEYWNNFSSEIIKELEEKTFVNYYKKDTTLVQTYKNVRKRGRIQYIRKQLANGKFEYILDDKGNKIPMVSQGDAIRGQLHKETFMGAIKLPLNNTGIRGNYKTSDKPLIFVERVPLKSLKKMEDLKKIIDDKVKGDIQKTLERKISQGKSFVQAINEDFWLLDKNGNEIKQDKNEKVLFPMRHVRCISSAGGGILTPEKALQIKQQTFLSEHEYKQYYYAQNKEMALCIFYEKNVKNKLLREFRFAGLFELAQLKIKNVNELATIPEYNLLEKRHIPSKYFIKTGYRVIVYENSPDEIRELNPDELIKRIYRVYKFNDSGANYIFLQYNSESRKDKELGEGSTKFDLSIYQPRLKLTANNFNCLVEHYDFNISIDGEIIFK

SEQ ID NO: 4720 - protein, 1352 aa, synthetic construct
  REGION 1..1352: note = Synthetic
MKNILGLDLGTNSIGWSIRELNSTNNQIIYNGVLTFEKGVGEDQGKEVPLVQKRTESRSKRRNYQAKKYRKWELLETLILNNPKLCPLTLEELDRWRKYEKGTDRIYPKREFFINWLRLDFNNDGKPEYKNPYELRKLVSEKKVDDFYSLGRAFYHMIQRRGFRGRDEEESKTILDGSKEKETIGASEIKKIMLEEKATLGGALHHVQQKYNKRIRNRYNLRTDVEAELKTVCKVQGIDENNDLFHKLYKSIIWQRPLRTQKGNIGRCTLEPTKPRCPLSHPQYEEYRMWSFINNIRVSDYKDPESEETQLNDEQKAIILEKVFFGKKKNKDDFEFIEIMKTLDKKGDALKFNYKAYTTVSGCPVTFSLKEIFDCELSEIKIAHKPNERSKSKKDYYDSNDLWHTLYTFDSKEKLESFAKEKLGLSDEKAKAFSKIKMPKGYASLSLNAINKILPFLHEGFIYTEAVYFANLPKVFNRKLTESDINKIVEGIRLQMKLHKRVKEELSIVNSLIGDYLNKQPGEQTGRYPNYILLEKDKELVDQKIIERLGNKRWEEFDVEKKSGLKQFVEQKYLEFQQTPMSTDIKLLYHRLPRLDDLIKEYLRNEWRIEESKLKYLYHPSETEMYPPAKETNGKKYLGDPVPISRGFKNPMALKTLHHLKHLINYLIEQGKIDEETRVVVEIARELNDANKRKAIERWQRDREKQNQEFTKAINEFAERENVAIETTDEIIDKYRLWMEQERLCIYTGKVISLSELFDGTKFDFEHTIPAAISYDNELKNLTVSDSVYNRQFKQKRIPAELPNYNNDIEIDGILYSAIKPRINFMSENVEHFKKQVEFWKKESKKASTKDRKDYSIQQKHYNQFELDYWFKKLDTFTMKEYKPQWRNSQLRDTQIITKYALHYMKTVFDKVEVQKGNIVAEFRKIFNVGFEKKRSKHTHHAIDAAVLTLIPPPTIRDMLLKEHFTAMENNIHFHSKPNQWNNFNPSSILDIENHTLVNYIAQDRTLIPSKKNVRKRGRIQYVKEKIENGKWQYKLDGNGKRIPLRSKGDSIRGKLHKETFYGAIKENSNEDLLYVVRKQIKDFKSEKEFEDIVDPVVKNVISDTVAERIKNGKSFKEAIAEPIWMFDKDKNFKKSDKNGNPLLPIRHIRCKARAGRGYFKKALQLKEHIFKSEHEYKQWYYVQNEINYLFLLYENQINEKISRSYRILNLLDIVNLKIKGPNELFRIPSFQLIEKGQGKKKNLYHLKHILKVGQRVLLWNENPDELRDLEKTEILKRLYKIYKFNEIIAPTTYIYLKHHNEARQENELDEEKKLVIEKYQPLIALKPNDFNCLIEGIDFDITLDGEIIMKQ

SEQ ID NO: 4721 - protein, 1542 aa, synthetic construct
  REGION 1..1542: note = Synthetic
MAKILGLDLGTNSIGWAVVDATLKNGKVEAYHSIIDSGVRIFPEGIEPTTIGQGDKEQSKNASRREHRQMRRQFYRKKIRKAKLLQVLIALNMCPLTQEGLDQWSKWKKSEKTEGKQFPKEPEFIEWLKLNPYELRAKALTEPISRTELGRIFYHFIQRRGFLSSRKGNEEGKIFEGKDHMSGIDQTRALMNGQTLGKTLYDISDKPGAKFSLKKDPEGNELRVRARYTQREMYVDEFLRIWEQQAKQLGLDQQKMPLQKTRFLKGSMESARNERKLKSYLSKYGHEHVHVIGNKVTTTEEIPLKEFLAGKIEILDGQLKFKSNESLLFWQRPLRSQKGLLDNCRFENKLPVIMGNGQFRKSKGEIITRSKKPCPLSHPEFELFRAYQFINNIKYGKGQRLTPDQRQVVMDLINSKDTNFNFELIPKALNLTYEKFNYDNDQKVAANPTIKKLKPLFSKEVWDTHYEEIWHCFHFFEDNDKLVAKLAKDYQLQAIDPEKIAKIRLKEGYSNVSLKAIRNINPFLEKGYPYSDAVVLGGIKNAFGKRWSFFQVDGFIERLEKDIIRILHEENKAGEAIQKIKDYLAEPVNSYGFAKDDPYFSQLYHHSQEVSEQEKQAKVPEVENLRNPIVQQALHEMRRLVNKLLVQYRETEPGFSFDRIHVEMGRNLKNNKTKRQELTRNIRDNEQRNDEARARLAEFGLRPTRDNLLRYLLYDEIQKHISGPVLCPYTKKVIKLSDLLGGSNTVQIEHMIPFSVSLDDSFGNKTLCEANFNRLKGEKTPYEFYLTNPDYKLWGINKYDNPEDGWKEIAERAFKILPYFKAKRFTSKKEFKTTEFIERQLNDSRYISRKAVELLSAICDDVRMLPGQVTAELRHLWGINNILNPIVGFEKFNPSVREQQRLPYYVVTDESNQVLAIERKTNERPTAQKNQLILTGQVNKNEFSSKYLSMKLDAPNLKDGSYWIVVNISEPHSFQPVFAQKPASSENQLVLKGRIEKQVFRNDTIGKNIKNTITENGAYWASFSITGKEFKLAEGKGKIKATGSKIALFGEIKNGEFSCHVYQCETNLPDGKYWVVLELDFEQVDYTQAVNPKPEASEKQIFSYATIDNEGLLAADPDPGYQTKSAQPAGRYYCLFNIKSVEPELYPLENEPPKPEKGQRLTEATVWVDKATGEIKYDPKKNREDHRHHAIDAITVALTEQGFLQRLSTHHAKEENAKRGLDNTEKFPEPWSGFAEDVKKVAESILISHKQNNKVLTKISKTITKNGKQYKSVGFAARGQLHKETVFGKRQAPGQSTESYHIRKPIVGLKDKKQINKIVDDTIRQLILDHLKNNCGVDISKPNFSVPKDAFFQDGQARLFLPNRKGGEPVPIKKVRMREVVSNAEPLKKDVNQYINPRNNHHILVYEQEDSSLDKDVVSFLKVVERKLKGQPIYQLPPEGESIVCTFETNDMFLLGLTEDEYDVYRDDKAELSNYLYRVQKIAGGSYFLEICFRNHTDSRKDQDAKPDYKYIKGFGSGTTGWHTLNPIKVTIDSLGHIKRIK

SEQ ID NO: 4722 - protein, 1520 aa, synthetic construct
  REGION 1..1520: note = Synthetic
LQNQNILQNFNGINLRIVNYQLMETTLGIDLGTNSIGLALVDQEEHQILYSGVRIFPEGINKDTIGLGEKEESRNATRRAKRQMRRQYFRKKLRKAKLLELLIAYDMCPLKPEDVRRWKNWDKQQKSTVRQFPDTPAFREWLKQNPYELRKQAVTEDVTRPELGRILYQMIQRRGFLSSRKGKEEGKIFTGKDRMVGIDETRKNLQKQTLGAYLYDIAPKNGEKYRFRTERVRARYTLRDMYIREFEIIWQRQAGHLGLAHEQATRKKNIFLEGSATNVRNSKLITHLQAKYGRGHVLIEDTRITVTFQLPLKEVLGGKIEIEEEQLKFKSNESVLFWQRPLRSQKSLLSKCVFEGRNFYDPVHQKWIIAGPTPAPLSHPEFEEFRAYQFINNIIYGKNEHLTAIQREAVFELMCTESKDFNFEKIPKHLKLFEKFNFDDTTKVPACTTISQLRKLFPHPVWEEKREEIWHCFYFYDDNTLLFEKLQKDYALQTNDLEKIKKIRLSESYGNVSLKAIRRINPYLKKGYAYSTAVLLGGIRNSFGKRFEYFKEYEPEIEKAVCRILKEKNAEGEVIRKIKDYLVHNRFGFAKNDRAFQKLYHHSQAITTQAQKERLPETGNLRNPIVQQGLNELRRTVNKLLATCREKYGPSFKFDHIHVEMGRELRSSKTEREKQSRQIRENEKKNEAAKVKLAEYGLKAYRDNIQKYLLYKEIEEKGGTVCCPYTGKTLNISHTLGSDNSVQIEHIIPYSISLDDSLANKTLCDATFNREKGELTPYDFYQKDPSPEKWGASSWEEIEDRAFRLLPYAKAQRFIRRKPQESNEFISRQLNDTRYISKKAVEYLSAICSDVKAFPGQLTAELRHLWGLNNILQSAPDITFPLPVSATENHREYYVITNEQNEVIRLFPKQGETPRTEKGELLLTGEVERKVFRCKGMQEFQTDVSDGKYWRRIKLSSSVTWSPLFAPKPISADGQIVLKGRIEKGVFVCNQLKQKLKTGLPDGSYWISLPVISQTFKEGESVNNSKLTSQQVQLFGRVREGIFRCHNYQCPASGADGNFWCTLDTDTAQPAFTPIKNAPPGVGGGQIILTGDVDDKGIFHADDDLHYELPASLPKGKYYGIFTVESCDPTLIPIELSAPKTSKGENLIEGNIWVDEHTGEVRFDPKKNREDQRHHAIDAIVIALSSQSLFQRLSTYNARRENKKRGLDSTEHFPSPWPGFAQDVRQSVVPLLVSYKQNPKTLCKISKTLYKDGKKIHSCGNAVRGQLHKETVYGQRTAPGATEKSYHIRKDIRELKTSKHIGKVVDITIRQMLLKHLQENYHIDITQEFNIPSNAFFKEGVYRIFLPNKHGEPVPIKKIRMKEELGNAERLKDNINQYVNPRNNHHVMIYQDADGNLKEEIVSFWSVIERQNQGQPIYQLPREGRNIVSILQINDTFLIGLKEEEPEVYRNDLSTLSKHLYRVQKLSGMYYTFRHHLASTLNNEREEFRIQSLEAWKRANPVKVQIDEIGRITFLNGPLC

SEQ ID NO: 4723 - protein, 1517 aa, synthetic construct
  REGION 1..1517: note = Synthetic
MTKVLGLDLGTNSIGWAVVDKEGEKILDAGVRIFPEGVEPTTIGKGDNEQSKNATRREKRQLRRHFYRKRLRKIKLLEVLIGQKMCPLRIEDLRKWKNWNSKEKAEGRRFPSTIEFDRWIQMNPYELRDKALREQVTLFEFGRIMYNLIQRRGFLSSRKGEQDPKTLFEKGKPDENILPVNETKEKIGNTSLGSYLNSIAYKENTPYKTRTDVKGNEIRVRGRYTVRKMYVEEFMKIWDKQNEYYDLDVIKLKTRKIRELRGSLNGARNRNKLEYLVSKYGEENVIIEQKSNNITQVITISEILLKKYLGGEIYYVENEEGEKKLKFRSNESVLFWQRPLKSQKSLLTDCRFESNLPVIMSNCEIRKDKEGKFVLRSKKPCPISHPEFELFRAYQFVNNIRFGRNTNLTNEQKDTVLDLINSKDASFYFSDIRKKLELTYEKFNYDDKFKVVGNPTIKKLSSLFDKKIWEENYQDIWHCFYFYDDNQKLFEKLKKDYDYSKGIDLLVKVKLKDGYSNVSLKAIRNILPFLKKGYQYDKAVILGGVKNAFGKRWEYFKDSHYKIENEIISILSEDNAEGDAICKIKEHLSSPVFNYGFSKDDNWFAHLYHHSQEIEKASKFSDKLPIPENLRNPIVQQGINEMRRLVNSLMEKYQNQYGDDFRFDAIKVEMGRDLRNSKSARQELTFRIRDNESKNEEARARLAEYGLQQSRSNINKYLMWKEIEEKAGAAKCPYTGKTISISDLLGTDNSVQIEHIIPYSVSLDDGFGNKTICESHFNNLKGELTPYQFYQKRSDKDLWGVNSWDAVVERAFQILPYNKAKRFTSKKDFEKSSFIERQLNDSRYIAKKSIELLSNICENVRVMPGQLTAELRHLWGINNVLQKPVVGINDHVLKLAKEETVKCYLVVDEENNVIDFVKKQNDRPNTKEGEILIPVSVNKNKLISNLFSFDIDVDDLQDGKYWIKVNLSDDFTVIPKHIDKANVDDDRIVFRGKIEKQVFKNDTSGNVNKTGKEDGVYWANFGIKDKKFVDLKTNKERPKTKSKKQIVLFGNVANDEFKCYIYNCQTNLPDGKYWLILDIDYNDVSFEKAINEKPELRNDQVCLSATVDQNSELILDVDKTYKKQVGLAPGKYYSVYQIVDYTKELCPIENQKPKVANEQKIIEGSIWVDKYTGEAKFDPKKNRDDHRHHAIDAIVIALTEQSYLQHLSTYNAKQKARQRGKIDSTEKFSLPWTGFINDVHKKADEILISYKKQNKVLTKNKKGFSVRGQLHKENVFGKRQAPNQEQGYHRRTKVTDLENNKHIAKVVDDSVRKIILDHLRYNCAVDISNPKGFKVPKDAFVKDGEWQLFLPNKRGDKVPIKKVRIKESIGNAAQLKSNINQFVNPRNNHHVVIYEDFDGNLQENVVQFWTVVERQMNGEEIYKLPHDGKNIITTLEINDMFILGLSDEEFEDNKSNYAFLSKYLYRVQKVSSMYYTFRYHLASTVTNNEQEFSIRSMKSFVEANPIKLKINEHGKLV

SEQ ID NO: 4724 - protein, 1492 aa, synthetic construct
  REGION 1..1492: note = Synthetic
METTLGIDLGTNSIGIALTDQKQARILYSGIRIFPEGITKDTIGQGEKEESRNATRRMKRQMRRQYFRKRLRKIKLLEILVACNMCPLQPEDIRRWKNWDKHLKSTARQFPDSPAFREWLKLNPYELRKKGVTENISRQELGRILYHFIQRRGFLSSRKGKEDGKIFTGKDQMTGIDETRKNLQNRTLGTYLYEIAPKKGEKYRFRTERVRARYTLRDMYVREFETLWNRQAAHLELDNKQMPQKRHIYLKGTSTNNRNRKIITHLQQKYGTENISIENSRITVSYLLPLKELLGGKIEQQDGNLKFKCNESVLFWQRSLRTQKSLLSKCVFEGRRFYDSIHRKWITAGPTPAPLSHPEFEEFRAYQFINNITYGKGEHLNATQREDLFKLMCSESKEFNFDKIPKHLKLYEKFNFDKQTKVPACTTISQLQKLFPPETWQQHREEIWHCFYFYDDNELLFQKLKKDYNLQLNESEKLKKIRLAEGYGHVSLKAIRRINPYLQKGYAFSTAVLLGGIRNAFGKRFEYFKESETEIEQAVCRILKERNTEGGTILKIKDYLTKNQYGFTEHDRAFQKLYHHSQPVNAKTLQEKLPATENLRNPIVQQALNELRRTVNKLLSDCRQKYGPEFQFDHIHVEMGRDLRSSKTEREKQTRFIRENEKKNEAARQKLREFGLQPNRENIQKYLLYKEIEDKAGIVSCPYTGKTIKISDALGSDGCVQIEHIIPYSISLDDSFANKTLCEATFNREKGERTPYEFYEKNPSSSLWGDVHCWEDVEERAFRLLPYPKAQRFIRRKNPDTNEFIRRQLNDTRYMGKKAVEYLSSICKDVKAFPGQLTAELRHLWGLNNILQSVPDITFATPVPVGMRKNYYLITNEQYQVTQILPQEADRPQTENNEVFITGTVKHNSFKYRGMQDYPTERNDGKYGARLKLSAPVAWHPLFAQKPNSSEEQLVLKGKIDKGIFVCDYLKQKIKTNLPDGSYWVSLPVRNRSFQDSESVNRPKLTPQQVQLYGTIHEGRFHCDTYQCQTTGGDGKFWCILDVDTEQPEFTRIKNEFPALEERQIILTGSIDEKGIFCADDDLNYKVSTTLSKGKYYGIFPWESQQPELSEIEFTAPKINKDEKLIEGQIWVDEHTGEIKFDPKKNREDQRHHAIDAIVIALSSQSLFQRLSTFNAQRENKKRGINSTEHFPLPWSGFIGDVSQSVKNILVSYKQNLRTRCKISKTLIKDGRQIHSVGNAVRGQLHKDSIYGQRLAPGNTEKTYHIRKDIRDLKTKKHIEKVVDPTIRQMLLTHLQENCHINTNQEFDIPSDAFFKDDKYRIFLPNKYGEPVPVKKVRIKEKMENAEQLKNNVNQFVNPRNNHHVMLYIDREGNLKEEIVSFWTVIERQNQHQPVFQLPADGKAPICTLQINDTFIIGLKDEELEVYRNDRSTLSKYLYRVQKLSSMYYTFRHHLASTIKNEKEEVHIRSLEAWKQANPVKVYIDEIGNLTF

SEQ ID NO: 4725 - protein, 1524 aa, synthetic construct
  REGION 1..1524: note = Synthetic
MSKILGLDLGTNSIGWAVVDATFKNNKVEQYNCIDDCGVRIFPAGVSDIGKGDSEKSNNATRTENRQKRRHFYRKRLRKIKLLQVLIDQSMCPLSHQELNSWKNWDRQQKSEGKKFPDAEEFRNWIKLNPYELRSKALSEPISLYELGRIFYHLIQRRGFLSSRKGNDDPKTLFEKGKPEENILPVNATKEKAKNSSLGDYLYSIIPQEGVPYKSIRDENGQSIRVRGRYTTRDMYIAEFEAIWIKQAKHLGLNERMAELQRTRELKGSLDGKRNQSRIQYLNEIYGAKNITISPQKDGHITKVTTTSTVPLKNFLAGNIQEINLENGEKALQFKSNESVLFWQRPLRSQKGLLANCRFEDNLPVINNEDNFVFDKNGKQIKRSKKPCPLSHPEFELFRTYQFLNNIRYGKNQVLSDEQKQQVLQLINKKDKNFNFSEIPKLLKLTYEKFNYEDDLKVAGNTTIKQLQPLFKPEVWEKHMLDIWHCFYFYEDNEKLFEKLQKDFAYTKSLDIIRKVKLKDGYSNTSLKAIRNIQHFLLMGLQFDRAVILGGIKNAFGKRYEHFGESEQELKAGVLKILNENNKEGEAIEKIKAYLSNPDNHYGFAKDDPHFSHLYHHSQEIEEKDELALWVPELENLRNPIVQQALHETRRLVNALLLKYRKELGDDFEFAQIKVEMGRDLRNNKSQRKKITDNISTNETKNNEARERLAEYGLRPSRNNVQKYLMYKEIVERSGKCTCPYTGKIISINDLLGNANAIQIEHIIPYSVSLDDSFGNKTLCEAHFNNDKGEKTPYEYYTENPDSKIWGANSWDEIVARAFHTLPYPKAKRFTSKKKFEKETFIERQLNDSRYIARKAVELLSNICHDIRVMPGQLTAELRHLWGLNSILQPTQSLVEHTFDINDDKPVPYYAITNEAGETLALHKKYNERPATNENELLLSGYASKNKFDAKSFKIDFKDVDVKDGHYWAKVNVNGSLQLMPQYTSKPQSDKNHIVLRGKVEKGQFKNDTSGNYKTTNIEDGSYWAKFEITNTQFQAPEKNKQPKTKRNQLLLFGTVHNCEFNCYIYNCQTNLPDGKYWLIVDISPDSIEFIKAVNPRPQAHNNEVCISATVDEYGYMVADCDPQYKRKTEHLPGKYFATLSIESKPKELYAVEKEQPKVEKGQKLVEGSIWVDKYSGEIQFDPKKNRDDHRHHVIDAITIALTEQGYLQRLSTENAKRKDKQRGKTNSTEKFPEPWNGFNLDVQKKAANILISFKQNNKTLTKNKKGFSVRGQLHKENVFGLRQSPNMEKAFHRRTKVTELKNNKHVAKIADITIQEHIKKFLKEKHGINTENTKGYTIPKDAFVSNGEWQLFLPNKKGGDEVPIKKVRIREMLGNANRLKGDLNQHVNPRNNHHVLIYKDSDGNLKEDTVQFWTVVERKRQNMPTYLLPEDGDTIVATLETNDMFLLGLSDEEFHSNIENKQILSKHLYRVQKLSSMYYTFRHHLASTIQNQEEEWRIVSFKAWEEANPIKVKISPLGKIQKL

SEQ ID NO: 4726 - protein, 1538 aa, synthetic construct
  REGION 1..1538: note = Synthetic
MGKILGLDLGTNSIGWAVVKAKFDNNGKVEKYEQIEDTGVRIFPEGVKKETIGKGDLEESKNAARREHRQSRKQQYRKKLRKYKLLQILISLDMCPLTLEELKKWMKWNKNEKTEGRQYPQSSEFIEWLKLNPYELRAKGVEADLTKPEFGRILYHLIQRRGFLSSRKGSDEGAIYKGKENVKGIESTKQHLNGKTLGQYLNSLYPKEGESYKTQKERIRARYTLRDMYIHEFETIYNRQREHLKLDQINIPFSKKRYLTGGKDRKRNQKKMEYLIKTKGVENVSINEIKHGNRTVTEIITREIQPFKQFIAGDITNENGQLKYKSNESLLFWQRPLKSQKSLLAKCRFESSVFKQNGKSRTIGKTPCPLSHPEFELFRSYQFINTIQFGKRGRLDEFQQKKVMDLMDTKKGNFGFSDIPKTLHLTFERFNYADDQKIAGNTTISQLKPLFPDTIWEQHYEQIWHCFYFYEDNEMLFTKLTKDFQLNTKRVPNPEKLKDIQLKEGYSNVSLKAIRNILPFLKKGYGYNIAVILGGVKNAFGDKWEYFQSFHDELEKDITAIIFEPNKEGELIEKIKDYLSTRAFDYGFERNDKRFKKLYHHSQEVEQKTIKEQLDPVENLRNPIVQQGINELRRIVNSLNKEYGPFDQIKVEMGRDLRNNKNRRQEISYNIRRNEEKNEKAREILREYGLQPTRENMHKYLLYEEISNRANVVMCPYTGNTINISDVLGSINSYQVEHIIPYSVSLNDSFDNKTLCESNFNRKKGELTPYEFYQKNPNTEIWNAASWEQIEERAFRLLPYQKAKRFISRRKPDVNDFIERQLNDSRYISKKAKEILSQICKDVRLMPGALTSELRHLWGLNNVLQPVRILQFDGYDVHENKRLAHYLVYDEDDNPVEIKPVMNNKPAADKNESVITGYIHKGVFESSLLKIKVDTPDLEDGKYWALIGTQSHQIPLKVFAEKPDTEQDRIVLKVKVNKGDFYHENIGRKLPAKLEDGSYWSVFKITGKDFIKPSKDKPPKKTTRQLMLYGTVKGGIFKSYIYQCETEFPEGNYWLILDIDLDNIEFVSAKNKPPEASENELVLTGSVNENNNFTADNDPDFNLAINTEPDKYYLKLEITRKPHGFVNIYNKPPDLKKGQRLVEGITWVDKQTGEIKFDPKKNRDDHRHHAIDAITIAVTDQAFLQKLSTANAKKKEKERGVSHEITFPEPWAGFRRDVEQVAEKILVSYKQQKQVLTTFSKSVYKEGRKFVSKGKIARGRLHREFYFGKHARPLINENGKMIHKDNKIVLETDSQNTEKPYYHIRKSIATIKNNKHVEKIVDEHIKKLIKDRLVSEYTININKNYTIPDDFFYKKNENGEKELNFFLPNKHGNPVPVKKVRMRENVGNAVHLKSNINQWVNPYNNHHIVIYKDENGVLQEEVVSFWTAVERMYQKQPLYQLPSDGKEFIATLQENDMFLLGLNKEDIQTLKWDKTEYELISKHLYRVQKISSMDYTFRHHLSSKIDDKETSVRLSSFSSWENMNPVKVFNNNIGKIKG

SEQ ID NO: 4727 - protein, 1587 aa, synthetic construct
  REGION 1..1587: note = Synthetic
MAKILGLDLGTNSIGWAVIDATMKNGKVECYHSIVDSGVRIFPEGVEPTTIGQGDKEQSKNATRREHRQMRRQFYRKKLRKVKLLEALIDLGMCPLSVDNLDKWAKWRKSFKTNGQQFPTEPSFIEWLKLNPYELRAKALTQPISLLELGRIFYHFIQRRGFLSNRKGSDDGTIFKGKDSMSGIDSTRELMNGATLGKTMYDISTKTGEKYYLKTDEKGNALRVRARYTQRDMYVDEFLKIWEQQAPLLGLNEQKVAVRKVRYLKGSMSCNRNQHKLEKYYEKYGKDNLVIDKNKVTSIAEVPLKEFFAGEIKELNGQLKFKSNDSLLFWQRPLRSQKKLLENCRFENNKPVLMTNGQYREKNGKKVLRSKKPCPLSHPEFESFRSHQFINNIRFGKGQKLTDEQRQLVLDLMNGKDNSFNFEEIPKALNLTYEKFNYDNDQKIAGNTTIKKLKQLFPEDVWEDSYETIWHCFYFYEDNELLLAKLQNSFRVKTNELAKIAKIRLKDGYSNVSLKAIRNISPFLEKGYSYADAVILGGVKNAFGNRWENFEIYQSEIERAICQILREDNKEGEAIEKIKDWLALPINSYGFAKDDPAFSLLYHHSQEIAEKEKQDLLPEVENLRNPIVQQALQEMRRLVNSLIKKYEETESGFSFDRIHVEMGRDLKNNKTKRQVLTKRIRDNEKRNEEARQRLEEFGLRPTRDNLLRYLLYDEIQKHISGPVLCPYTSKVISIADLMGGGNTVQIEHMIPYSVSLDDSFGNKTLCEANFNRMKGEKTPYEFYLVNPDYKLWGINKYPDLEDGWQEISERAFKVLPYNKAKRFASKKKFDKDDFIERQLNDTRYISRKAVELLSSICSDVRMLPGQVTAELRHLWGINNILNPVFGIENFNADVRAEERLAYYVLTDENNQVLSLYRKTNDRPKTGTGQLLLAGKTNKGTFASKYMQLKVAVPNLKDGEYWAIVNVSEPHSFQPVYAKKPMTTEDRIVFKGRIEKQFFNNDTIGKRIKAEGKEDGAYWANFSIINKTFQLAEGKGKLKMTGSKVALFGQIYNGQFTCHIYQCETNLPDGKYWAVLELDFERVDYTRALNPIPESKERQLVTYATVDKAGWMAADPDPGYRTNVQVQEGRYYCLFDIESVGQELYPMENEAPVPAKGQRLTEAVVWVDKMTGEIKYDPKKNRDDHRHHAIDAITVALTEQGFLQRLSTYHAQEENEKRGSDNTEKFPEPWDGFGNDVKNAAASMFISHKQNNKVLTKISKTVSKNGRTYRSIGDAVRGELHEMTLYGKKGYCEAKEFTTRVHIPKLKFAKTKGQAVYLDDIIDSAIKESIYKKIRERLTESEKSVLCEIEEGVRQIHKISKVKDREAELKRINKLRQEINNTVENILQQEKFFLENVGKRSKRQGKYQESDRRDPVPIKKVKVKKVLNNALQLKQLTSYSPRKQEIVETSQYINPGNNHHILIYEDFDGNMKEQVVSFIEVVERQRQNNPIYMLPEDGKRMITTLEINDMFLLGVDEDLELRNSNAALLSKHLYRVQKVSGSYYTFRHHLASTLNNKDEEIYIQSFSAWQKYNPIKVVIDPLGNISRI

SEQ ID NO: 4728 - protein, 1519 aa, synthetic construct
  REGION 1..1519: note = Synthetic
MAKILGLDLGTNSIGWAVINAKIVNGKVEEYLSIEDSGVRIFPEGVEPNTIGQGDKEQSKNAGRREHRQMRRQFYRKKLRKVKLLETLINLNMCPLSVEGLHQWSKWDKAKKTEGKQFPTEPEFVEWLKLNPYELRAKAIVEPVSLLELGRIYYHFIQHRGFLSSRKGTEDGAIFKGKDNMSGIDATRTLMNGRPLGKTLYEISYKSGEKFNIKKDSTGNELRVRARYTQRDMYIEEFQKIWERQADALGLGKKEIEVKKVRFLKGSSDSNRNKTRISKFLQKYGKANVHIEGKKITTLENMPLKEYLAGEIKTDGEQIKFKSNNSLLFWQRPLRSQKGLLDNCRFENNMPVIMGNGEFRRKGMDIVKRSKKPCPLSHPEFELFRAYQFINNIKYGKGQRLTVDQRQVALDVFNSKDGSFNFEEIPKALNLTYEKFNYDNDQKIAGNTTVKKLKPLFPEEIWDAGYEKIWHCFYFFEDNDKLFAKLEKDFGLRTDDPSKIAKIRLKDGYSNVSLKAIRNINPFLKKGYAYSDAVILGGIKNAFGERWDRFNVQDFIDRLEKDVINILHEDNKEGEAIEKIKDYLAEPLNIYGFVKDDPYFTQLYHHSQEITEKELQDVVPEVENLRNPIVQQALHEMRRLVNALLFKYQETDPGFSFDRIHVEMGRDLKNNKTKRRELTLKIRENEQKNDQARKRLTEFGLRPTRDNLLRYLLYDEIQKHVSGPVLCPYTGKVISMADLLGGGNTVQIEHIVPYSISLDDSFGNKTLCEGNFNRMKGEKTPYEYYQYNPDPKLWGVSSWDDVAERAFKLLPYPKARRFTSKREFKKSDFIERQLNDSRYISRKAVELLSAICNDVRMLPGQVTAELRHLWGINNILNPVHDIDQFKSEVREDERVPYYVVTDEDSRVLGIYRKTNDRPVSNDDQLLLTGDVSKGVFASKYLSVKIEVPSLKDGSYWVIVNVSAPHSFHPVFADKPVSDKDHLVFKGRVEKQYFSNDTIGKRIKANDMDDGAYWASFSIVDKEFKLAEGKGKMKTSGAKIALFGEIKNRQFTCHVYQCDTNLPDGKYWALLELDFEKVDYIRSVNPKPVTGERQLLSYATVDEQGLMAADPDPGYGIQTSQPAGRYYCVFEIESVEPELYPLENEPPNLEKGQRLTEAVVWVDEFTGEIKFDPKKNRDDHRHHAIDAITVALTEQGYLQRLSTHHAKEENAKRGIDSTEKFPEPWNGFAKEVKKAARAMLISHKQNNKVLTKISKTITKNGEKHRSVGFAARGQLHKETIYGKPEKGEGFHIRKEVVALKDKKQINKVVDDTIRRLILDHLRDSCGIDISKDNFAVPKDAFFKDGVYRLFLPNHKGGDPVPIKKVRICENIGNAIQLKSNINQHVNPRNNHHVLIYEDFEGNLQEKVASFIEVVERQRQGDLIYQLPEDGKRIVTTLEINDMFLLGLNDDIEISKAHAALLSRHLYRVQKVSGSYYTFRHHLASTLDNKDEEVYIQSFVAWQKWNPIKVKIDQLGNIKRY

SEQ ID NO: 4729 - protein, 1527 aa, synthetic construct
  REGION 1..1527: note = Synthetic
MSRILGLDLGTNSVGWAVVDTDNKTIEDVGVRIFTEGVEKKTIGSGDKEKTNNATRTENRQKRRHFYRKRLRKIKLLELLVEQNMCPLDLKDLKQWKNWDKQLKAEGKKFPSTEKFVEWIRLDPYDLRAKALSEILTLEEFGRILYHLIQRRGFLSSRKGNDDPTTLFEKGNPNENILPINVTKSEADLSSLGHYLSSVTPQINEPYKTIRDENGVEIRARGRYTTREMYVAEFEQIWQVQAKALGLDTIEVTSKKVRELKGALSGKRNADKLANLQKKYGVNNVEVIEKDDNNSVTRVITYTKQDLKTTLGGHITEVVDGQGQKVMQFKSNESVLFWQRPLRSQKGLIANCRFENELPVIDKSDQLRLNEKGEVIKRSKKPCPISHPEFELFRAYQFINNIKYGSHPRLTDEERSRVLNLLNKKGGDFDKKGGNFDFELIPKELKLTYEQFNYDAKFKVAGNTTIKQLSNLFEAKVWEEHYEDIWHCFYFYDDTEKLYDKLVKDYGLKKTLKDVANVKLKDGYSNVSLKAIRNMLPFLIKGRQYDKAVVLGGVKNAFGNKRWGYFEESHEQIERDILKILSQPNKEGEAIEKVKDYLSDPENHFGFLKDDLHFQHLYHHSQDVQQQEQLSDHLPLIENLRNPIVQQGLHETRRLVNRLMVEYRQRYGNDFHFDRIHVEMGRDLRNSRKQRQEMGFRIAKNEAKNEEARQRLTEFGLQSSRQNIHKYLLYKEIEERNGTARCPYTGKTISITNLLGGINAIQVEHIIPYSISLDDAFGNKTLSEATFNGLKGEKTPYQFYQENSDPKLWGESSWEDVKTRAFRLLPYAKAKRFTAEKNFEKSSFVERQLNDTRYIAKKTVEILSHICDDVRVMPGQLTAELRHLWGLNNVLQQTQNLGDAKFTVETEYATPYYVVTNEAAEVQALYRKVNEKPSSQANELQIPGELKKGTFASKYYNIDITNTDLKDGKYWAKLSVSDKIKLVPKYIDKPESDDNSIIFRGQVEKNVFKNDTTGNRKIVASDGVYWAKFEIVNRSFELPQKDKQPKPKANQLLLFGNVSMGTFKCYIYQCQTNMLDGKYWVLLDINPASIEFVQAINEVPKVASNEICITASVDDDGLLVADCDTDYRKQTEYSSGKYYLTLAIESKNPEFVGIENPAPKIEKGQQLVEGHIWVDKYTGEIKFDPKKNRDDHRHHAIDAITIALTEQSYLNKLSAENARRKNRERNIADSTEHFPEPWNGFNADVQKAVNAILISFKKNNKTLTKNKKGLSVRGQLHKENVFGKHKAPQQKEDAFHRRTKITDIENNKDIEKVVDVTIREHIKKHLSTRYGIDTNAKKYDVPKDAFYKAGEWQLFLKNTKGGEAVPIKKVRIKENIGNAQALKSDVNQYVNPRNNHHVMLYTNLEGKLCESIVSFWTVIERQKQGLPIYQLPPEGAKVVATLEINDLYIIGLSNEDFDANRNNATFLSAYLYRVQKVSSMYYTFRFHLASTVLINKQECSIRSFGAWHTANPIKVMINELGKIKKTI

SEQ ID NO: 4730 - protein, 1524 aa, synthetic construct
  REGION 1..1524: note = Synthetic
MAKILGLDLGTNSIGWAVVDDEKNKILDTGVRIYPEGVTAKTIGLGDKEVSRNATRRDARQLRRQFYRKRLRKIKLLELLIEQDMCPLKRAELFEWKNWDKTKKSEGRVFPNSPEFVDWIKLNPYQLRAKAINKQVSKYELGRIFYHLIQRRGFLSSRKGGADPQTLFERGKPEENILPIKETKEKIKGTSLGYYLNSIANKENEAYKFQELRLRGRYTIREMYIEEFDKIWTEQNKFYDLDSKTTIFTKIRETKGSINNKKNTTRLNYLKEKYGEANVEVVEITDKNNLSNNDETQSVKKETRHKIITKEEISLKYVLAGDIEYITDDDGERKVKFKSNESILYWQRPLRSQKGLLANCRFEDELPVINKNGEFSKDENGEIIKRSKKPCPLSHPEFEEFRAWQFINNIYFGKRNPLSDEQKQIVLDLINKKKKNFNFTEIIKALKLNYEKFNYDEKFTVTANTTISQLSELFEPEVWKEKYDEIWHCFYFYEDDDKLYEKLKKSYAYSGNLETVSKIKLKDGYCNVSLKAIRNILPFLKQGYLYDKAVILGGVKNAFGKRWEYFQDYHYDIINKVVAVLKEDNKEGEAILKIKEVLSSKTNRYGFSVDDPRFFHLYHHSQSVEQKKDLNDRLPVVENLRNPIVQQGVNEMRRLVNALMKKYQIEFGDYFRFDKIKVEMGRDLRNTKSARQDMTIRIRENEKKNDEARSRLQEYGLQPSRNNVQKYLMWKEIADVSGTPRCPYTGKTIAISDLLGSSNTVQIEHIIPYSISLDDSFGNKTICESHFNNLKGELTPYQFYQKNPDVKLWGVSSWDAVADRAFQILPYAKAKKFTIKSELKLDDFIERQLNDTRYIAKKSVELLSNICSDVRVMPGQLTAELRHLWGLNNILQDNIPNLQEELGKVKNIENNNCFLVLNEDNEIIEIVPKQNSRPKTNSDEILLPIIVKGKKLVSDSFNLDIDLENYPDGKYWAKLKVDNDFLIIPRYVQKPLVSEDRIVFRGKIEKQTFKNDTSGNIKVTNKEDGVYWVDIAIKNKEFKNAQTQKSRPDVKPKSKIVLFGNVKDEKFSCYIYNCKTNLPDGKYWLILELDINDVNFTKAVNDKPDLDANNQICLNATVNDLQELVLDIDNLSNFKVNEAAGKYFTKIKIKEINPNLNLIENNPPILKEKTHKILEGVIWADKYSGEIKFDPKKKRDDHRHHAVDAIVIALTEQGFLQKLSTWHASDDIKYKERLDDSEKFPMPWDEFYTDTKKAVNSILVSHKKQNKTLTRNKKGFSVRGQLHKETVFGLRQAPKQEQAHHFRVKVTSIEDEKKYKKIVDEGIKEIIRNYLLAKYGKDIKYAENFKIPKDAFYENNEWTLFLPNKRGDKVPIKKVRIKENLSNTVQLKSDLNQYVNPRNNHHVIIYKDLEGKLQEDVVQFWTAVERKQKGESAYQLPEDGLEIIEILEINDMFLLGLSEEEYEDNKNNKEFLSKYLYRVQKVTSKFYTFRKHNASTLDNSEYEFRIQSMSAWEKANPIRYKISL

SEQ ID NO: 4731 - protein, 1109 aa, synthetic construct
  REGION 1..1109: note = Synthetic
MLSREGRGRKGGFLDMPQIQQTKPDYRLALDLGANSIGWALIALDGDGRGTGFVDGGVRLFSTSELAGRDPKTKTSLAVARRLARSARRRRDRYLDRRGRLLAALVDHGLLPEDTGTRKKLADLDPYRLRAEGLDRPLHPHELGRAIFHINQRRGFKSNRKTDGGDDGQDGKIRAGTRRLRDAMADTGARTLGAYLHARKARGQWVRARPQDLPAGDGKRDSGYDMYPDRSLYIDEFNALWAAQAPHHPGLLSAALKETLFDLIFYQRPLRRVSGGRCPFHTEEERLPRAHPLSQRLRIYQELNALRLQSPDAPERALSLEERDIFAAKLLGGTKLTFDQIRKRLKLPPGSTLNFERGDRDYLKPDETAARLKAAKAWGKGWTALPLDDQIAIVERLDREQDEAALIRWLTDTWGLETAGAVTVARTLLPAGHAGLGPTAARRILAELEAGVHVYSTAAAQAGYHHSDFRTGEIRDALPYYGEVLDRHVAFGSGDADDPPEKRFGRIANPTVHIALGQVRRLVNRLIRRHGRPAEIIIEVARELKLNEKQRRDWERKRREGQARNDRYRETFAQHGIADTGANRMKMRLWEELNPKDPLDRRCVFSGEVIGLSRLFSDAVEVEHLIPFSRSLDDSPANKTVSLRTWNRRKGNMTPHVAFGEKEYWPDIASRARALPPAKRARFAPDAAEKFEESGGFLARHLNDTKYLSRIAREYVGVVCGGGPDAVWVTPGSLVAMLRGKWGLNSLLSDHNLKTRVDHRHHLIDAAVIGAVDRSLLQRMSRAAARAETHQLDALMETVPTPWPTFRADLDALKDRVTVSHRPDHGLSKGAGRGSGKGSGKGTGATTDKLHNDTAYGLARYDAAGDRWTVVTRKALDAFTGAGDVAAVRDPRLRAGLTAATEGLDKKAFAAARDAWGRAAGVRRLRVEETLSGPSLVPVRDADGRAYKAYKGDSNHCIDIWRLPDGRWDSRVVTTFAVNQPGYADRRPHPAAKRMMRLHKDDMVAVDMDGGRAILRVVKFSGKTVVLAPHHEGGALKARDADRDDPFRYVSRTAGGLAKLGARQVRVDETGRVFDPGAFAPARAGRKQAEKLAEGQAKEQAGKQAGQSG

SEQ ID NO: 4732 - protein, 1059 aa, synthetic construct
  REGION 1..1059: note = Synthetic
MTYTLGLDLGTNSIGWCVLDLNSAGQPEGIRDIGVRLFSDGRNPKDKTSLAVARRTARSARRRRDRYLRRRTKLLRLLKEHGLLPHSGSALDAVFDPKQNDPYEIRSRGLKSKLSLHELGRAIFHLNQRRGFKSNRKTDGGGDEESGKIRSGVEKLRQAMTEAGAESLGAYLQQLHAKGGSVRTRLTPQPADPGKKPQSGYDFYPERAMIEEEFDLLWTRQSRHHATVLTDRARDETRDVLFFQRRLKPKEPGKCRFNPEEPRLARAHPLAQRIRIFQEVNNLRIVAPDQSERELTQDERDSCALALLSTPKRTFGQLRRLLKLPPDSRFNLESEIRKDLKGDETAAVLAHKKCFGANWRSFDSEQQESIVERLLEEEDEETLIAWLIAEQNLTEETARFTVRRNLPDGHAGLGITATRGILAQLEASVAVFAEATAAAGYHHSDFSTGEIFDSLPYYGRVLENHVAFGSGNPEDREEERLGKLANPTVHIGLNQIRRVVNALIARHGHPGKIVIEVARELKLNAKQKERISKTIGENTRRAERHREELQSLGLPDSGANRLRLRLWEELNPENPFERRCVYSGEQISLERLFTAAVDIDHILPFSQTLDNSAANKIVCSAAANKIKRNRPPHDAFGTRTDWPDTLARASLLPKNKRWRFAADAMQKFETDRNFLDRQLVDTQYLSRVAREYLTAVCNPNEVWVTPGRLTEMLRGRWGLNELLPDHNLVEQQNKKNRLDHRHHAIDAVVVAVTDRSLLNRISRAAGQAEDQQRERLLADMPTPWPTFRDDLKRALDDIVVSHRADHGSSGGHGRAAGRNTTSGRLHNDTAYGLAGEANAHGAFPVVHRVPLESLKSSKDIEKIRDPELRETLHAATGGLSGKDFAGALARFAQFDAKFAGIRRVRILETLSVLPVRDKSGRIYKAYKGDANERFDVWRLPSGKWVSEIITRFSANQPRPESADSRPHPAAKRMLRLHQNDFLAVEMEGERRLVRVVKFSTSGSMQLVPHNEGGNLKARDADKNDYLKYINTSASGLQKLRARQVRVDEIGRVLDPGPRS

SEQ ID NO: 4733 - protein, 1058 aa, synthetic construct
  REGION 1..1058: note = Synthetic
MDYRLGLDLGTNSIGWCVVDLDGKGRPVDIRDSGVRIFSDGRNPKDKTSLAVARRMARSMRRRRDRYLRRQKKLLSALAAAGLMPDDPVARKALTGLDPYAIRAGALDAAVPLHHLGRALFHLNQRRGFKSNRRTDGAEDDERGKIRQGVNKLRDAMTAQGARTLGEFLHRLQQGGGSVRVRLKPESTDSGKTVMAYELYPDRAMVLEEFEALWDAQAPHHPAILTAQAREKLRDIIFFQRRLKPVRPGKCTFNPEEERLPRAHPLFQRRRIFQDANTLAVIGLDQTSRGLTQDERDKVALALLTTAKRTFGQIRRLLKLPPDSRFNLESETRKDLKGDETAAALAKDDRFGSGWRALPLETQAAVVEHLLEEEEEEPLLAWLTAEQGLSAERAESVVRAALPDGHGELGLTATRKILTELERGVVPYSKAAELAGYHHSDFRDGVIHDALPYYGRVLERHVAFGSSDPGDSEEVRCGRIANPTVHIALNQLRRLINAVIARHGHPAEIIVELARELKLSRRQLDEVEKGIKDNTARAERHREILAGLNLPDRGESRMRLRLWEELNFDDPLDRRCPYTGEPISPQRLFSAEVEIDHILPFSRTLDNSAANKTVGLRRANREKRNRTPFEAFGHQPGWDENLERLAALPRNKRWRFGPDAMERFETQERDFLDRQLTDTQYLSRIAREYMTAVCDPRKVWATPGRLTELLRRSWGLNDLLPDHNIVERQDRKNRLDHRHHAVDAAVVGVTDRALLNAVSRAAARAEEQDLTRLVDGMPLPFEGFRDRLRATLERMTVSHRPDRGTPAVPGSANPRGSSAGRLHNDTAYGLAGAPDARGARLVVHRVPLDSLKDRAAVERVRDAGLRQALLDATEGLSGKDFAAALAAFAARDGIYKGLRRVRVLERLKVIPVCDKAGRPYKAYKGDANYRFDVWELQDGRWKGEAVSMFQAHQPDWRSTVKDESPTARKVLRLHKGDLLATETGKDRVIRRVVKFSANGSIQLAAHNEAGNLKARDVKPPAEDYFKYINTSASGLKKLRARQVRVDATGRLFDPGPRG

SEQ ID NO: 4734 - protein, 1041 aa, synthetic construct
  REGION 1..1041: note = Synthetic
MTMTYKPTRLGLDIGTTSIGWCLYELNENNRPVGILRAGVRIFSDGRRPNKGKASLAVDRRLARSARRRRDRYLRRRQKVMRALTEAGLFPPDWRSRRDLEQLDPYALRARGLDEELHPHHLGRALFHLNQRRGFQSNRKTDSKDSDSGLINQGVKSLKQQLGDPDAPSPEEKPRTLGEWLYQRHKKQQSVRVRRTTHVIDGKEKELYDFYPSRAMYEAEFDALWRAQKKYHPALLTDENYARLKDVIFFQRYLKPVQPGRCVFNSWEERVARAMPLAQEFRIYQELNNLKYTVGHDPTQHELTLEQRDLLAYALKTKAKMTFTQIRKALKLTPDCEFNLEQDNRKYLKGDETAEILRKKDRFGDKWAALPFDRQSEIVDKLLTEQNEAVMIDWLVRDCGLDAEQAEKTSRAFLPDGHASLGPTAMRDIVEVMKKQVITYAQAARSLGYDHSSFDAHEIKPELEYYGKLMERHVGFGSGNPDDPDEVRYGRVPNPTVHIGLNQLRHLVNKICKKYGPPRQIIVELARELKLNKKQKDKINKEQKFNRERNERYEDLLSKEGFPNTGENRLRLKLWEELNRNDPFNRCCTYSGKRINIKNLFSDQVEIEHILPFSRTLDNSIANKTLSFRDANRNKGNQSPHEAFGHRPDWPDILERAAALPHNKRWRFGPDAMERFENEERDFLDRALTDTQYLSRLTREYLTHVCDQVWVIPGRLTALLRGKWGLNDLLSDHNLKDRTDHRHHAIDAAVVGVTDRSMLNSISRQAGQAEIEDLERLVVDMPVPWPTFRDDLKAALDQVIVSHRPDHNVKGALHNDTAYGLASDPDPKGVREVVHRVPLMSLKSLGKIETIRDRVIREQLLTRLYGLSDKEFSAELARYSKDTGCRRVRVVEKLRVIPIKNKNGIPYKGYKGDSNACYDIYELPNGKWKAEVISTFDANQGNFISPLKRQHPTARKIMRLFKKDMVLLKEKNGWKVMQVIKFSKGALIMAEHHESNVDQRHRNKDDPFKMTEMGAETLQKYGIRKAWLDELGLVGYPKDGA

SEQ ID NO: 4735 - protein, 1005 aa, synthetic construct
  REGION 948..1002: note = misc_feature - Xaa can be any naturally occurring amino acid
  REGION 1..1005: note = Synthetic
MQSKKNFGNLTFGFDIGIASVGWAVLNDKRIVDLGVRCFDKAETAKEGESLNLGRRTARLMRRRLRRRAWRLTKLARLLKREGLIHDVNVLKQPPAKGFATPNVWQLRVDALNRKLTSEEWARVIYHLCKHRGFHWVSKAEKLKDEEGASETGKVKKGLAGTTKLMKEKGYRTAAEMVLAEFPDAQRNKQGEYSKALERELLDKEFQTLFEAQRNFGNPHTSPALEEKLLNRKTGLFWAQKPSLSGEALLKMLGKCTFEKSEYRAPKASFTAERHVWLTRLNNLRLVVDGTMRPLSEDERRLVIDLPYNQASDLKYKQLKSVLIKQAGLSESIRFTGLSYPSASQLESGKAKDPEDSILVKMPAFQELRKTFKEGLETEWQGLVNAAMAGDASLLDQIAWVLSIYKEDDEVERELNKLNLPSKDKMVDALLGVRFDKFSNLSLKALYKIVPVMEQGKRYDEACIEAGYHHSKLDKDDEKEIYLPSLYEHFRGKETHNLNKMLLSERLDSKIQGGIPRNPVVLRTLNQARKVCNALIKKYGSPYQVNIEMARDLSKPADERKKIKDLQDEFRIKNEKDRAAFNSEYNSSGELKGRDFEKWQLYREQGGKSIYPAIDERQGICAYSLKPIDLNRLFEKGYVEIDHALPYSRSFDDSKNNRVLVLADENRNKGNQTPYEYLDGKNNSERWRLFVAFVEQNSSYRQAKRNRLLKKDLGENEAKDMRERNLQDTRYICKFFKNYIEHFLKFKDESDVKRCVVVSGSLTSLLRAKWGLPNSKEKREKSDRHHAMDAVVVAACGHYVVKQLSTFVNQNNWAHRPDQGGYVNTETGEFLFTKDFVKLDDVSKLFPTPWKNFRDDLLNRLETDDLALLRNNAEKLEIYNSDQIQSLKPIFVSRAPQRRNSGALHKETIYGSVQSQGQIQPQRIKRKEVASLKETDLGDIVGASEPRXXXXXXXXXXXXXXXXXXXXXXXXXXXXXXXXXXXXXXXXXXXXXXXXXXXXXXXGVN

SEQ ID NO: 4736 - protein, 708 aa, synthetic construct
  REGION 1..708: note = Synthetic
  REGION 674..694: note = misc_feature - Xaa can be any naturally occurring amino acid
MQSKKNFGNLTFGFDIGIASVGWAVLNDKRIVDLGVRCFDKAETAKEGESLNLGRRTARLMRRRLRRRAWRLTKLARLLKREGLIHDVNVLKQPPAKGFATPNVWQLRVDALNRKLTSEEWARVIYHLCKHRGFHWVSKAEKLKDEEGASETGKVKKGLAGTTKLMKEKGYRTAAEMVLAEFPDAQRNKQGEYSKALERELLDKEFQTLFEAQRNFGNPHTSPALEEKLLNRKTGLFWAQKPSLSGEALLKMLGKCTFEKSEYRAPKASFTAERHVWLTRLNNLRLVVDGTMRPLSEDERRLVIDLPYNQASDLKYKQLKSVLIKQAGLSESIRFTGLSYPSASQLESGKAKDPEDSILVKMPAFQELRKTFKEGLETEWQGLVNAAMAGDASLLDQIAWVLSIYKEDDEVERELNKLNLPSKDKMVDALLGVRFDKFSNLSLKALYKIVPVMEQGKRYDEACIEAGYHHSKLDKDDEKEIYLPSLYEHFRGKETHNLNKMLLSERLDSKIQGGIPRNPVVLRTLNQARKVCNALIKKYGSPYQVNIEMARDLSKPADERKKIKDLQDEFRIKNEKDRAAFNSEYNSSGELKGRDFEKWQLYREQGGKSIYPAIDERQGICAYSLKPIDLNRLFEKGYVEIDHALPYSRSFDDSKNNRVLVLADENRNKGNQTXXXXXXXXXXXXXXXXXXXXXQRKMAIICSFCRAK

SEQ ID NO: 4737 - protein, 1142 aa, synthetic construct
  REGION 1..1142: note = Synthetic
MTVKPENINKENPITFGLDIGIASVGWAVLGENRIIDLGVRCFDKAETAKEGESLNLSRRMARLMRRRLRRRAWRLTKLVNLLKREGLIEDVNVLKQQPFKGFQTPNLWQLRVNGLDRKLGNEEWARVIYHLCKHRGFHWISKAEAKAADSDKEGGKVKQGLAGTKRLMQEKSYRTAAEMVLAEFPDAQRNKQGEYSKALSRELLCEEMKELFKQQRAFGNAHADEKLEAAILGNSDKKSGLFWAQKPSLSGEALLKMLGKCTFEKNEYRAAKASFTVERHVLLTRINNLRIVEDGKIRGLTADEQRIALWQPYQQAGDFKYKQLGSALVKAGYLVKDGYKFAGLAYPSEVQKAEKAKDPEDTVLVKLPAWQMLKKTLKDAGLESDWQEMADHALNGKPDLLDQIGWVLSVYKEEDEVERELGKLQLSTQVVEALQTVRFDKFSNLSLAALRKIIPHMENGMRYDEACVEAGYHHSLPDLEDDKAKEKYLPSFYAGRDKEGRLIFNEEMDIPRNPVVLRALNQTRKVVNALIHKFGSPHSVHIEMARDLSKPFDERRKIERDQLEYRSRNESDRATFAGHFNIMGRPKGRDFEKWQLYREQQGKCAYSLDPIDLNRLLEKGYVEVDHALPYSRSFDDSKNNRVLVLTRENRNKGNQTPYEYLDGKGNSDRWLQFESFVKTNKAYRQAKQNRLLKKDFGEKETRDFRERNLNDTRYICRFFKNYVEQYLQLHEESDAKRCVVVSGQLTTLLRVRWGLLKVRGDSDRHHALDAAVVAACSHGMVKRMSDYAQRKELGQVRDRIEKVDTKTGEILDHFPSPWPHFRDELLSRLNLDDPAALHAAVERLETYPPEALESIKPLFVSRAPQRRNSGAAHKETIYAQPEALKEKGSVTQKVAVTNLKPADVDKLVDPERNVKLYSYLRKWLEGKEEREKQAKAIEASAGRGKERRELTAEEKSEIEKLRALPRKPDKQGNPTGPIVRTVTMVIGKLSGIPVRGGIAKNDSMLRVDLFRHKTNGKFHLVPVYVHHTVSKLLPNRAIVQSKDEEEWTEMDDNFEFLYSLHPNDLVQISQKKKESIMGYYSGCDRATGNLAVWSHDRNQQVGKDGLIRGIGIKTAQNVEKFNVDVLGNIYPALPETRRELA

SEQ ID NO: 4738 - protein, 850 aa, synthetic construct
  REGION 1..850: note = Synthetic
  REGION 5..30: note = misc_feature - Xaa can be any naturally occurring amino acid
  REGION 717..751: note = misc_feature - Xaa can be any naturally occurring amino acid
LIRRXXXXXXXXXXXXXXXXXXXXXXXXXXDKAETAKEGESLNLSRRMARLMRRRLRRRAWRLTKLVNLLKREGLIEDVNVLKQQPFKGFQTPNLWQLRVNGLDRKLGNEEWARVIYHLCKHRGFHWISKAEAKAADSDKEGGKVKQGLAGTKRLMQEKSYRTAAEMVLAEFPDAQRNKQGEYSKALSRELLCEEMKELFKQQRAFGNAHADEKLEAAILGNSDKKSGLFWAQKPSLSGEALLKMLGKCTFEKNEYRAAKASFTVERHVLLTRINNLRIVEDGKIRGLTADEQRIALWQPYQQAGDFKYKQLGSALVKAGYLVKDGYKFAGLAYPSEVQKAEKAKDPEDTVLVKLPAWQMLKKTLKDAGLESDWQEMADHALNGKPDLLDQIGWVLSVYKEEDEVERELGKLQLSTQVVEALQTVRFDKFSNLSLAALRKIIPHMENGMRYDEACVEAGYHHSLPDLEDDKAKEKYLPSFYAGRDKEGRLIFNEEMDIPRNPVVLRALNQTRKVVNALIHKFGSPHSVHIEMARDLSKPFDERRKIERDQLEYRSRNESDRATFAGHFNIMGRPKGRDFEKWQLYREQQGKCAYSLDPIDLNRLLEKGYVEVDHALPYSRSFDDSKNNRVLVLTRENRNKGNQTPYEYLDGKGNSDRWLQFESFVKTNKAYRQAKQNRLLKKDFGEKETRDFRERNLNDTRYICRFFKNYVEQYLQXXXXXXXXXXXXXXXXXXXXXXXXXXXXXXXXXXXMKRVMPNGVWWSVVSSPRCFASAGACSKYEVIVTVIMRWMQQWLRHVVMAWLSACQIMLNERSLDRFVIVSKRSIPKPEKFLIIFQAHGRTSAMSFYQD

SEQ ID NO: 4739 - protein, 606 aa, synthetic construct
  REGION 565..597: note = misc_feature - Xaa can be any naturally occurring amino acid
  REGION 1..606: note = Synthetic
MQGNQNLGSFTIGLDIGIASVGWAVLGETRIVDLGVRCFDKAETADRGESLNLARRSARLLRRRLRRRAWRLTKLARLLKREGLIPDVGVLKQPPSLGFNTPDLWKLRTEALDRKLDSEEWARVLYHLAKHRGFHWISKAEEKRADDDKEGGAVKKGLAGTKKLMQEKNYRTAAEMVIHEFPEAYRNKRGDYSKALSRVLLADELTRLFEQQRQLGNPHASEKLQTAMLGNGDRKSGLFWAQKPSLSGEALLKMLGKCTFEKGEYRAPKTSFTAERHVWLTRLNNLRIVVDGKMRPLTSVERKVALPLPYQQATDFSYKQLRKALLKAGLSDEFRFAGLAYPSERQKTEEKAKDPEDEKLLKLPGWQALRKTFKDAGLEAEWQQISVTALDGRPQFLDEIARVLSVYKEDEEVERELSKLDLPNKDRVIAELLTTRFDKFSNLSLKALYNILPHMEAGMRYDEACLQAGYHHSQLHEVGAGEHKYLPPFYSGRDKDGRLKFNEELDIPRNPVVLRALNQARKVVNALVKKYGAPHEVHIEMARDLSRNFDERRDIKKAQDEFREXXXXXXXXXXXXXXXXXXXXXXXXXXXXXXXXXMSSAIKMKS

SEQ ID NO: 4740 - protein, 555 aa, synthetic construct
  REGION 1..555: note = Synthetic
VLSEYPDHQRNKRGDYSQSLPRELLAEELAQLFARQRELGNPFAGEPLQQAILAPETGLFWQQKPALSGAAMLNLIGKCTFEPLEYRAAKHSWSAERFVWLTRLNNLRVSVDGESGPLCPAAREAALPLPYEKAKVSYKQLKTHLVKLGLLPESARFAGLNYRDGGKDPEDAKLIELKGWHELRKTLESAGLSTEWHGLATQADKLDAITTILSVYKTDAEIREQLGQLGLPGAVMEALLGVSFSDFIRLSLKALAGILPHMQVGKRYDEACLLAGYHHSQLTENSASRYLPALDDNAPNNPVVKRALNQARKVVNAIIREYGPPRLVHIEMARDLSRPLDERQKIEKEQKTFGERNEQYRQEFAEEFGRRPTGREFEKWLLYREQDGKCAYSLLPINLNQLIDDATYSEIDHALPYSRSFDDTRNNKVLVLTRENRDKGNRTPYEYLDGASDSPQWRAFEAFVRSNHKYRQAKRDRLLRKHFGKDEAAGFKERNLTDTRYACRYFKNFVERHLALHPDSGAQRCVVVSGQLTSFLRSRWGLAKLREGSDPHHAI

SEQ ID NO: 4741 - protein, 1425 aa, synthetic construct
  REGION 1..1425: note = Synthetic
MTKILAFDPGTNSLGMVCRDTMNDNLMEQITSGVDIIRDNTERDKRGRHSSAASQRRSFRNARTRYRSVKRRKQATLKLLIKHNCCPLDMESLNKWRFDDDEKGYDRTFPVHNEEFMKWINFKFIIDGEEVKSVYRLREILVTKPLDFSRPESWLMLGRAIYSIAVRRGFKSSRLANSEINDEEDEEGVDLQKSEEELFSGLKQYMKEHNCKTVGAAFARMERVDKIRIRANNDYKPIRSKLKEEIEEIFKVQKRDTNSELYKGLMSEKKHEGTIFYKNPLKSQKGKVEYCTLEPRRRRCPKSHPANEFNTAWQLLNNIKIKRNGLWENITLDIRHKIFNELFVSNEKHFDFVKIREMLQNEYQIQLEYKESINYSDNKSIHGCPIIYYLQKILGPSWETERISGTNKHLKHAQRRKKLFNKEDKRSIEEYTETEGHLTEYTYEDIWHICYESDEKQFVKDFAKNVLCLSPSKVISMGALWEDIQDGYAKLSLCALKKINPFLAKGYKYSEAVMLANLPTIMGDTFFQQNEQEIIGLMDKERAAILSKNRIYDITNKLISDYKSLKLEGFAFAERADHDYILQDDDIEDVKKACAENFGKEWDALTDNQQSAIITHVKELYQKFFFSKERDYCKRINLADAVKAALAEKYPFLTKKKLKKLYHHSDNSYYPAAHTNENGILQLGNPARGNLKNPTVLKVLYKIKENVNKLLISGDIDADTIIVIENAREGLNDFNMRWAIEEYGKKREKENKAIEDALTDLATEFQLTLPKGCVSVARLALYQNRDFTPYNPNEPRRLYDKLCENYKLWLRQGFFDFYTGHPITLAQLFSPDNLVEVDHILPVSKSFDDSISNKVLSSTRYNRTIKGTKLPCELPNYNIDTAEGTPIIHRIQDIERKVKYLENKVIYWKSRSSRATNPESKNWAIKQCHLWQMEYDEWNQLLTNLTTREITPSFRHNQLNDTRIISKYAYHYLKSVFGRVVVQRGETTAVFRKIFGFQEVYEKKDRSRHTHHAIDALTLSMIPYGPRRERMMELWYQIQESHRFENYDTERQLKDKLDREVSLCGLGNYSPTEIVKYIEKTTLVRNDATNNALTKNIKRFRVRGKVVPLRDKYGNVIYEKTSKGIKRVKAKYVSQGNSIRGAIHDQSFYGKIEKWKNGKNHEIEEVFVIRKKIEFKSGDKGKGFKSWDDLKAQMVDKKLFDKFEEKEKDFKKACDEGIHICIAENGERRMVRVRRVRCIAKKAQPLKKHIFQPRKDNKERFYYVSSHGEAYGIFEYKSDEGKILYESDSLFTLSTKMKNGEMKEIPCPQHIIRTGKRFIHTRTIRKGDSILIYPEEEKPEDQYKLNTAILSNRLYRVDSIELDKRINLVRHFRGSMPKGKAIKKDADYNNLPEAIRPTLSDKLHFLLFGTDFDILNGKIVPLKND

SEQ ID NO: 4742 - protein, 1065 aa, synthetic construct
  REGION 1..1065: note = Synthetic
MRKKAVRYRLGLDLGSNSLGWCIVQINEADEPVGLVRLGVRLFRDGRNPKDKASLAVARRMARGMRRRRDRWLKRQKRFMAALIQHGLMPADADTRRALAAIDPYALRKRGLSEALTPHELGRALFHLNQRRGFRSNRKVDKADEKESGKIKSALKEVRDRLAAQGARTVGEWLADRHAQRQPVRARLRGQGAKAAYELYVGRDMIADEFDALWSAQVGFNPSALTSAARDELRDILLHQRPLRPVRPGRCTLEPDDERAPLALPSAQRFRILQELNHLRYETGVGEERALTLEQRDLFTRLLEGQTGPGKRDKADARGQLSFDTMRRMMGLPDTVKFSIESDKREGLKGNATSLAMAKADRFGVAWHQLSLAQQDAVVELLLEEERETAIVEWLMKLHGLNEAAALRAANTGLADSHSNLGRKALAKVLPHLAANVVTYDKAVLAAGYASHSQLHTGEYFGHSALPYYGRILQSAVGFGSGNPEDSEEKQCGRIANPTVHIGLNQLRRLVNAVIERYGPPTQIALEVTRELKQSRDQRERIQKEQAENQKQRDADREELQRHGLRDTGENLLRLKLWRELNIRDPLDRRCPYTGRQIGREKLFSEEVEVEHILPFARTLDDSIANKTLAYREANRYKKNSTPFEAFGQSLHGFDWQAIQDRAANMPSNKKWRFADRAMEQFETRHGGDFLARHLTDTAYLSRTAKAYLSYVCHPNDVWVTPGRLTALLRGKWGLNQLLSDSGKKNRTDHRHHALDAATIAVTDRSLLQKVATLSGQERLEREKDRILVPYPWEGFRDALEQALPRIVVSYKPDHGYQAGLHNDTAYGFAEPYEPGRPSQVVHRVPLLSLTKPTDLDDIRDRALRERIKAAVAGTEGKEFAAKLAAFVEQTGISRVRVAETLTVIPMGRGGSHPGRGSEARGAPYKAYKGDGNYCVEIYRDENGRWRDHIVTSFEAAQIARRDPARLRHKTLAQNGMSLVMRLCADDFVAVGSETYRRIYRVAQMTAGKIILAEHHEGGDLRNRDRDKDDSFKYLVRAASALKDAEARRVFVTELGYVLDPGFKP

SEQ ID NO: 4743 - protein, 1065 aa, synthetic construct
  REGION 1..1065: note = Synthetic
MKMKAIRYRLGLDLGANSLGWCMVQLNETHEPTGLIRLGVRLFRDGRNPKDKASLAVARRMARGMRRRRDRWLKRRKNFLAALTQHGLMPADGNARRALAAIDPYALRKRGLSEALAPHELGRALFHLNQRRGFRSNRKVDKADEKESGKIKSALNDVRDRLAAQGARTVGEWLAERHAQRLPVRARLRGQGAKAAYELYVGRDMIADEFDALWSAQASFDPSSFTAATRDELRAILLHQRPLKPIRPGRCTLEPDDERAPLALPSAQRFRILQELNHLRYEVGVGEERTLTLEERDLFARLLEGQSGPGRRDKADARGQLSFDTMRRLLGLPDKVRFSIESDKRDGLKANVTSLAMAKADRFGAAWHDLSLAQQDAVVELLLEEEREAVIVERLMALHGLDEAAALKVANTGLANSHSSLGRNALAKVLPQLAATVTTYNKAVLAAGYASHSQFHTGEYFGHSALPYYGRILQSAVGFGTGNPADPEEKQFGRIANPTVHIGLNQLRKLVNAVIERYGPPTQIALEVTRDLKQSQDQKVRIQKEQAENQKQRDADRDELQRLGLRDTGENLLRLKLWRELNIRDPLDRRCPYTGRQIGREKLFSEEVEIEHILPFARTLDDSIANKTLAFREANRYKKNGTPFDAFGQSLHGFDWQAIQDRAANMPSNKKWRFAANAMDQFEARHGGDFLARHLTDTAYLSRTAKAYLSYVCHPNDVWVTPGRLTALLRGKWGLNQLPSGSTSKDRTDHRHHALDAATIAVTDRSLLQKIATLSGQERLARERDRILVPYPWDGFRDALEQALPRVVVSYKPDHGHQAGLHNDTAYGFVEPHARGKPSRVVHRVPLLSLTKHADLDDIRDCALRERIKSAVAGTEGQAFAAKLAAFVEQTGISRVRVVETLTVIPMGRPASHRGRGREAPDMPYKAYKGDGNYCMEIFRDEAGRWRDHIVTSFEAAQIARRAPERLRHKSLAQNGMPLVMRLCQDDMVALGTDEQRKIYRVIKFTKGRLTLASHEQGGDLKRRDDNSDDPFEYLSKAASWFHEAKARRVFVTELGYVLDPGFKP

SEQ ID NO: 4744 - protein, 1070 aa, synthetic construct
  REGION 1..1070: note = Synthetic
MFYRLGIDIGETSIGWFILQLDKKLEICDIVDGGVYIFPDGREAKSREPLSVSRRTARGIRRNLDRKNNRKRRLIRLLEETGIWPDGIAEQKKLEALDPFVLRQKAVNEKISLPELGRVLFHLNQRRGFKSNRKSDGKESESGKIKLAVQALETQLAEQGCRTYGEYLCRRHEKRISTKVRPMADSKGYEFYPTREMAEHEFDLIMSRQQQYHPELTSEITESLRDVIFFQRSLRPQAVGKCELEPQENRAPVWHPLFQRFRILQEVNNLDLVKSTPDEIGLTAEQKKKILLMLQEGTGLNKQGLLLFTKIKSKLNIPTKRKFNLQSDKRTGLQGDWAAWKLSDDNCLGKGWFKMSPDRQVELLELLHNAEDDGKLKQDLIDLFGLNEEQAENVAKLNLPEGYASLSLKAIKNILLYLEQGKVYSEACTLAGYNHSDRRTGEIYDYLPYYGRILKSAVIGGRFEGEEPDVDEDIGLQEVYFGKINNPTVHVGLNQLRKVVNEIISRYGKPQQVVVELARELKLGVEGVRKLEKRQKENQKDNEKIAEELERAGQPNTYQNRMMYKIWERLAENPSQRCCPFSGRPISVSDLFSGAFEIEHLIPFSRSFDDSINNKVISSRDANRFKAERTPYEAFGNSPGNYKWEEIVARSENLPREMQWRFSADAMEKFAEEDGCLARMLTDTQYFARCALQYLEAICENQSKDRKMAWGIPGQLTAMLRDKWGLNSLINPADRKDRSDHRHHAVDAFVVACTSRSLLKKMADAARLYEKTDEGEYKQIREKREKLIENMPLPFENFDREKLQQWVNGLVIAFKPDHGVQGQLHRDTCYGYIEKGSNKGSSVFAVRKDLRAVVEGSAKDGNKKINEIADVAIRSKLLDLLQNVEDKKQRQQLTEEFMAETGIRRVRCHIEKSDSVMIPVRDNGGQIYKYYESGNNSRADIYCATKGKDAGKWKCEIISTYSANQKDFVPEWRRRDPHAKLIMKLHINDMVAYDELNKGTGQTERVIARVKKMTSGLVFLRGHLIAKEEGDKLSWGASANQMQEKNLRKVYVDAMGKVKDPMFKNERKVS

SEQ ID NO: 4745 - protein, 1071 aa, synthetic construct
  REGION 1..1071: note = Synthetic
MFFYRLGIDIGETSIGWFILKLNERMEVCDIVDGGVYIFPDGREAKSREPLSVSRRMARGIRRNNDRKKSRKRRLIRLLVETGIWPKSVEEQKKLESLDPFVLRQKAVNEKISLPELGRALFHLNQGRGFKSNRKSDGKANENGKIKLAVQALETQLAEQKCQTYGEYLYRRHEKRVSTKVRPTADSKGYEFYPTREMSEAEFDLIMARQQQYYPELTTEVVAALRDTIFFQRSLRPQAVGKCEFELQEYRAPVWHPLFQRFRMLQEVNNLDLVKATKEEVGLTAEQKKKILLMLEDGACLNSKGILLFSKIRKKLDIPSTRKFNLQSDKRDGLQGDWAVWKLADEGCFGKSWFKMLPEKQLEVLELLQGAEDNVELKQKLIEQFGLDDSHAEKVTQVNLPDGYASLSLKAIKNILPYLEQGKVYSEACALAGYNHSDRRTGEIYDYLPYYGRILKSAVIGGRFEGEEPDVDEDIGLQEVYFGKINNPTVHVGLNQLRKVVNEIISRYGKPQQVVVELARELKLGVEGVRKLEKRQKENQKDNERIAEKLELAGQPNTYQNRMMYKIWARLAEDELQRCCPFSGKSISVTDLFSGAFEIEHLIPFSKSFDDSINNKVIAFRDANRFKAEQTPYEAFGSSPGDYKWEEIVARSENLPREMQWRFSPNAMEKFADESGCLARMLTDTQYFARCALQYLEVICEDQSKDRKMVWGVPGQLTAMLRDKWGLNSLINPADRKDRSDHRHHAIDAFVVACTSRSLLKKMADAARLYEKTDEGEYKQIREKREKLIENMPLPFENFNREKLQQWVDGLVIAFKPDHGVQGQLHRDTCYGRIGKGSKKGSSVFAVTKDLLAVVEGSAKDADKKINEIADVVIRGKLLDLLQGVEDKKQRQQLTEKFMAETGIRRVRCHIERSESVMIPVKNNDGLAYKYYESGNNSRADIYCATKGKDAGKWKCEIISTYSANQKDFVPEWRRKDSHAKLIMKLHINDMVAYDILNEETGLVERVIARVKKMTKGLVFLRGHLIAKEEGDKLSWGASANQMQEKNLRKVYVDAMGKVKDPMVKNERKAS

SEQ ID NO: 4746 - protein, 1058 aa, synthetic construct
  REGION 1..1058: note = Synthetic
MRYVLGLDIGIASIGWAIRNLDKDRIEDLGVRIFEKGEADKGKPINAQRRESRSARRTLRRKAMRMLKVRELLVKYGLVNLEDLKSLYIKHPNEMSPWKLRYEALNRVLSGEEMAIVLTHLAKRRGFKSNSKVNKDIDEAGKVTKAIDENRRYMKAQGYRTIGEMFFKDDRYKNHKRNKGKKIKEEGYLCSVSRDLIEDEIKKIFDRQRGLGSKLASEDFEKEYLSTVMFQLPFSNEELLLKMVGECTFERNEKRAPKHSFTAERFTLLDKVNNLTIYNRESGKRFLVKEEKEQIIALCYKKKEVKYTDIRKVLNLEPIDRFSTLTYSSKKNVEESKFISLKGYHEILGKLKNKALINNTELMDKIIEALTLIKDEDKLIVRFKGLGLDEEEARELAELNFSNFSNLSMKALKNVLPYLEEGKPYYEACNLAGYNFNNPRQLDKHRLLPKIDDDIKNPVVLRAITQSRKLINAVIRKHGSPTAVHIEVARDLAKSYEERIKIKRNQDERKSAKDRLSEQLKNEMHVENITSKAFEKYMLASEQDFKCVYSQEAIDVNRLLNDPTYCQIDHILPYSQSFDDSFNNKVVVLTRENQNKGNRIPYDYFKAIGREWSSYEAFIKGLTQLDKEKQNRLLKHSFTKEEMKDFKERNLNDTKYIARYLKNFIESRLVIEKEEGRRAVMVIPGRLTDTMRHRWGLKKDRDKDHLHHAMDACIIACIDEKLVKRIAEYSMNCEVQFVKGEVINPETGEVINKTDQNLIRERFPMPWKSFREEVLARLSSNPVAEIQKIGNNYYDDALINDLEPILISKMAKTKLKGQLHDATIKRVTDATLGRIQVTMPLNKLTLEDIDNMCDKEKKPELYAALREKLISHKGDAAKAFEEPLKYLPSGKKKEVSVEEIKIYRAPINKFFIRNGIAEIGQCIRVDVFRKQDSYYFRNVYGIDILKGKLSEIAKGGSYVYLTDEYEFCFSLYKDNLISINYDGQKKLGYFEYFESDGRVNITSTISEEKIGRISLGKISEIKKYDVDLLGEKKEIKKEAMNNNYKKKKRDKRRERKIV

SEQ ID NO: 4747 - protein, 1072 aa, synthetic construct
  REGION 1..1072: note = Synthetic
VWKLGLDLGTNSIGWCAFTFSEGHDPDWSDWRLTDAGVRIIPDGREPAADGRVGESLAVNRRQARGMRRNRDHGNNRIKALAKALIDYGLLPVESSQRSALLTESPYQLRALAVTTGHPLTAHQLGRVLLHLGVRRGFLSNRKTDKADDDATVFKQKISQLHRVLQYRVLTTADLEALPDDAPPAQTPWTLGEFLWQREQAGLMIRFRGEQGDLYPDRAMYRAEFDRIRAVQAPFHPSLTAADWDRLRDNHILFQHPLRPVKRGACSFYPQHPRTFRDTPIAQQFRISKELSILRVIMPDQSSQRLTAGQYRAIADVLGRQEKATFAGIRKLKGTDGTPLFPKESRFNIEDDRRKHLEGNRVATALRKSSKANILMPLWDTLPDNVLNDIFERLHNPVDSGRIMDDAALVGSLVRDFGLTNAAAHALMELPLGALTTSYSRQAMEDLLPIMATQGLDEYDAAVELLGEDEAKRRLAGFQASETLYERLPYYGEVLRGSLLGADPRKPEDSDPEGHYGKIGNPTVHIALNQVRKLVNELIDRFGEPPATIQVELSRDLKLPKVKREAISSQIAKNEKANKNRIDQWKVMTNGAEPTAADLRKIKLWEELARDEVARRCVFTGRVISAQHLVNGEVEVEHLLPRSRTLDDGMNNLTLSFRNANRLKGNRTPYEAFGLNQHAEQGIVWAEVLERAKGLSPAKAARFGASAMDDWEVGTNFIARQMTDTAFISRAARRYLTAVCEDVMPAPGRLTAMIRSQWRLNGLLSDDNQKNRNDHRHHTVDAFVIGLANRSMLQRVSSAMSHDREQVRLPDLPDPLRQALRDRLNSLAVSFKPDHGGSGAMFKKTAYGFVKTPDGHKPDYNLVTRKRLDDLSLDELDVIRDGQWRAQVREYLEANAQKPLSNDTERRRLLAEFGQKHGVRSIRILAKDQSVEPVKSAPYKGYAKGSYACCDVWSLPDGEPGNWKAGSFKWKGKFWSYGECSKGLPPSVTSGKPHPAAKFITRLFKDDVIALSEGGRDVLYRVVKLLASSKRIHMQPIVIAKSNGRSVTINELQKHHFRKASISPSGVVQVPS

SEQ ID NO: 4748 - protein, 1043 aa, synthetic construct
  REGION 1..1043: note = Synthetic
MGYRLGLDLGTNSIGWTALTIDPSKEGLERFSLLDMGVRIFPDSREPAKGGRVGDSLAVARRMGRGMRRSRDRGKNRMAYMMRYLIDLGLMPTDKAERREMENLNPYQLRAEGLERPLSPFELGRALFQLGLRRGFKSNRKESNEAKEETARAQQISTLREALGNKTLGQFLWQRLQAGEPVRFKEGTDWFPDRAMYAEEFNALKDTQLPHHQLSEEEWDRLRDNCILFQHPLRPVEKGRCTLRPEFRRAHRDTPIAQWFRLYQDVGNLRWIDEKLQGHPLTPEQRDAIIQTLLTQKTVTWGGIRQLKGVDGKSLFHRDYRFNLESEQRKKLDGHKIAIWMKADERLQDLWETISPQTLDDIFEDLHGTLEDDKLVPHLIRKHKITQEQAEAFAALPIGSMTVNLSRQVMEELLPIMRDQGLEYYDAVTQLCDETGNPLHHSASASVEKREKLPYYGEILSQSVMGEDASKDPQVDPEGHFGRIANPTVHVALNQLRVLVNSLIDRFGEAPTEIHVELSRDLKLGPKQRNEINKEIAKNTKRNEKLAELWQEISKGREATARDLKKVKLWEELSTDIMARRCVFTGQNIAGHHLVNGEVEIEHILPFSRTLDDTMANLTLAFKGANRVKGNNSPFEAFGDNRHPDFDWEGILDRASRLPKNKRWRFAADAMEKWEGENDFIARQMTDNAYIARSARKYLNCLTDHVVPAPGRLTAMLRGKWHLNLGEDGRKSRDDHRHHAIDSFVVALSDRSVLQRVSRLSARGADDRIHMEIPELPSQLRQDFREKLDNILISYKQDHGILGRYFNETSYGVLPQSQHGDGYNLVTRKPIASLSPKELDAIRDPLIQANIKEHLYDLGWYGLPKTDQAKKLPEYLSAFGKAHNIHRLRILVKNQSAIAIQSAPHKAYAPDSYVCCDIWALPKGKKGKWKKGEETWQGVFWNYAECAKFGPDLPDKNAQKPHPAARFVMRIFKDDTVSYQEDGQEHIMRVAGFSTTNNRLDLKPHNLADAPRQYFSINSLGDRGLRQVFISPDGRYLNKRRNP

SEQ ID NO: 4749 - protein, 1068 aa, synthetic construct
  REGION 1..1068: note = Synthetic
MWKLGLDLGTNSIGWSVFAYEGTAEPDWASWSLIDSGVRIIPDGREPAAQGRVGDSLAVQRRLARGMRRNRDRGKNRVQALVNALLVRGLLPKEADSRSALISAGSPYALRARAAEPGQVLSAHELGRALLHLGLRRGFLSNRKSDGAEESTEFKRKIGALHHALAHHLLTGDAVAALDEAAEPQGIPWTLGQFLYHREQSALGVRFRGEEGDFYPDRAMYRDEFERIRTVQGPNHPQLTADDWDRLRDQHILFQHPLRPGERGACSFYPDQLRTFRDTPIAQQFRLYKDASILRWLDHQQKSHRLDAEQYQGVIDVLQRQEKATFGGLRRLKRADGSPLFDKNSRFNLEDEKRTHLDGNRVATMMRRMPILTKLWDSRSAGELNDIFDRLHAPVLNGVMMDDAALIASLINDFTLTIADANALAALPLSSITTSYSRKAMEDLFPLMRDSGLDEYDAAVELLGKDEANRRLAGFQQAQEQLPALPYYGEILRGSTLGADPRKSADTHPEGHYGRIGNPTVHIALNQVRKLVNELIGRFDGPPAMIHVELSRDLKLPKVKREALNSENGKNERANKKRAIWWKEMTKGAEPTARDLKKIKLWEELARDETARRCVFTGRVISAAHLVNGEVEIEHLLPRSRTLDDSLSNLTLSFRNANRLKGNRTPFEAFGHDQQAINGIVWADVLERIKGLPPAKAARFAADAMDSWEVGTDFAARQMTDNAHIARAARRYLTAVCPQVFPSPGRLTAMIRSQWRLNGLLSDDNRKNRTDHRHHAIDAFIIGLATRSMLQRVSTAMSHDREQVRLPDLPEPLRESLRQRLDCMVVSFKPDHSGQGGMFNETAYGFVDPETHTLVTRKRIDSLSEKELEAIRDPQWKAKIADFLAAQGPKAHSDTKERQRFLAEFGRQNGVKTLRILVKNSSVTPIASAPYKGYARGAYVCCDVWALPEGKKGKWKRGKWKWEGQFIAYADCHQGQPPQSSASKPHPAARFVTRLFKNDLIAIDDGGKPQILRVAGFSTTDNRLDLRSCVAAESAQKYFSINVLGGQGLRKVSVSPSGVVQMPMRGQA

SEQ ID NO: 4750 - protein, 1084 aa, synthetic construct
  REGION 1..1084: note = Synthetic
MQLTEPQSTAASSYTLGLDLGTASLGWAVVDGLSQRVLDAGVRIFEPAVDATKFERGQEGASKNVARRTARLQRRQFRRRAARHHDLFLELQGAGLLPPTPDPKPADRGEARQAVLGQLDAQLRATWRERLAELQPACPAPEQTLLYALRARALDVRLEPHELGRALYHLAQRRGFKSNRRASKREPGKDGEKEESELKQEMAALEREIQESGSRTLGEFLSRQDPAAARIRGRHAQRRLYEEEFDGIWNRQAEWHAVLTPELRERVHNLIFFQRPIKAPPPGRCELETGCFRAPMASLPAQRFRLLQKVNDLRILDGRGERALTPEQRTTLLAELEKGDVTFGAARKLLGLRGTRFNLESERQDKIEGNRTGAKMLAAFGERWMAFSEAERDRIVELWRQTEDEAELKQVGQQYGLEAEAAEAWARPEAGPEDGYCRLSVEALRKLLPRMEAGAAFKTAETEVYGARFSGGAVRAQLDPVAKVLAHVPNPAVMRSLTELRKVVNAVVRQFGKPHEIRIELARDLKRSARDRDALSRAMSQQQKARGAAKGEIVKELGIQRPSGADIEKALLFEECGGLCPYSGEPIDFRALFETGEFEVEHILPKTRFFDDSFANKTLCHRSMNAQKRDRTPFEAFGHDPEQWEQILERVRKFKRLGAVHRLGKRKGKRAELEPRHPKLGRFLLTSADELESFSNRQLSDTRYASKLAARYLEQLYGGRDVEQADGRKRQAIFASAGPATATLRRAWGLEAILRQPEASANGQSKGKPRTDHRHHAVDAVVIALTSRAAVQQLAASAEASQRQTGVARVSSRTLEAPWPDFVESVRPVIERINVSHRPERKLSGEPHDQTLYGRPRQSGEREWAHVRKSVHTLSEKQIRAADVIVDPRVRDAVRAKLEELGDPKKLEQDPACLVTRRGKRVKILNVRIRVPCEVRKIGAPPRERYVWLRSNHHMGVFAGRDAKGREVWDYIVVSRLDAFERRRSGQPVVQKDLPGQPDFQFLFSLMSGDMVEIEDNDGRRGLFVVRSISKGDFNFARHTCAMLKEDMAKTRHWLRIRSIEKLRQRGCRKVSVDPLGRVREAND

SEQ ID NO: 4751 - protein, 1003 aa, synthetic construct
  REGION 1..1003: note = Synthetic
MSSKMRYRLALDLGTTSIGWAMLRLDQQDRPCAVIRAGVRIFNDGRVPKTGEALAVQRRLARQQRRTRDRSLRRKNKLINMLVRFGFFPENLAERKSLERLNPYELRAKGLEHQLKPEEFARALFHLAQRRGFKSNRKTDRGDAESGVMKSAIVETKQEIETLGCRTIGEYLYKRLQAGLGTRARLRDKPKVKGGATKSYDLYLERSQVETEFDALWDVQSRFAPELFTQEKREALRDTIFHQRDLRPVKPGRCTLFPEEERAPLALPSQQRFRICQEVNNLRKIDEHLCSIELTQTEKAKLVQALSGARKKTFEQLRKVIGYGGQFNLEEAGAGRADLKGNETAVVIGKIIGKDWLKYSLSEQDKLVLMLLNIESESELIGMLQEEFDLSEAVAKKLSGAPLVNGYGSLSRKAIDLILPFLEQGMTYDKAVAAADIPSHSDLTWQVKSDELMDQLPYYGEVLQRHVGFGTGNPEDAPEVRFGKIANPTVHICLNQLRLIVNLIIKRYGNPDGVVIEVARDLKLSREKKNEIVRKQKKNQEKREQVRKEIAAILECDETLVTSEDIEKWLLWEELNPGNALDRRCPYTGRQISAVDLLSKAFEIEHILPRSRTLDDSRANKTVSYWEANRLKSNLTPWEAREIFEAHGWNYEDILKRAENLPPNKRYRFGADGYKTWLREDSDFLARELTDTQYISRIAREYVSLVCPKNTYVIPGRMTAMLRHCLGLNTILSDDDKKNRNDHRHHAVDACVIGITDRSLLNKIAALSARGEEQNERKFQRSVEEPWRGFRESVCRAVERINVSHRPEHSYEGQMHDQTAYPIDKNGQGWKKEVKSNGQTEWKKISVIPIVSQKATQRHGYLSDGTLRPYKGYSGNSNFCIEITVNEKGKWQAEFVTTYDAYQIARKFGKDKLYGKESQSGHKLVMRLMKKDVVAMEDVDGCRRLYLLHKFSTNGVLSFAPINESNVSARVTEGSFKYVSKTAGSLQRAKARQVMLSPLGDRS

SEQ ID NO: 4752 - protein, 1012 aa, synthetic construct
  REGION 1..1012: note = Synthetic
MSENKMVYRLGLDIGSTSIGWAMLRLNAQGDPCAVIKAGVRIFSDSRNPKNGQSLASVRRQARQQRRTQDRTKRRKNRLINDLVQFGFFPQDPQARRKLEILNPYEIRRKALDEKLTPYEFGRAIFHLAQRRGFKSNRRTDQKSSETGLLKDAIKQTKAILEKKGYRTVGEMFADRQLRRLPVRSRIRQVEVQQNGRTKNTKQYDFYLDRELIQNEFCLIWEKQSSLNPTLFSDDKKERLYDTIFFQRDLRPVKPGRCTLLPDEERAPLALPSQQEFRIYQELNNLKKLDVNLRSIPLSLEERNVLAEDLNKSKKRTFEQMRSKIGYEGQFNLEDAGRTELKGNETAAILGSKKLIGSEWFKYDLEKQDEIVDLLLTVESESDLINQLHQKYGFSCELATRLSQVTLPSGYGSLSRKALAQIVPVLKSEVIVYSDAVQKAGFESHSSLDLLHQTGEVMYELPYYGEALTRHVGFGTNDPSDPDEIRYGKIANPTVHVGLNELRKVVNELIRTYGKPAEIVVELARELKMSRDQKLEVQRKQNQNKEKNAAATHAVAEILGCNEALVSREDIEKWLLWEELGDNALDRRCPYTGKQISAASLFSEEIEIEHILPYSRTLDDSMSNKTVSYRFANRIKGNRTPWEARDIFEKNGLSYDDILARAEHLPTSKRFRFAEDGYEVWLRDFKDFTARMLTDTQYLCRISKEYLELICPQKTMVIPGRLTSMLRAKYGLNRILNDTNAKNRDDHRHHAIDACVIAVTDRSLLQKIATRAAQNNEEGQRLLQDIPLPWATYRLSVQRAIERIVVSHKPDHSYEGQMHDATAYGIRKDGNVVYRKDGVRTVQKLQVIPIACAKATWRHGINEDGTPRAYKGFKGNSNYCVEIVLNDKGAWVADVISTFDAYRIVRTKGKDFLREKLSRTGKPLIMRLLKGDVLRLKLDDGYRNYIVQKFRSDGMVELAGINEANVSARVRETDSKDTIDYLRKTVSGLQKLHAQRVTVSPAGQVRIHRLGY

SEQ ID NO: 4753 - protein, 634 aa, synthetic construct
  REGION 1..634: note = Synthetic
MLLNIESESELIGTLQEEFDLSEAVAKKLSGAPLVNGYGSLSRKAIDLILPFLEQGMTYDKAVAAADIPSHSDLTWQVKSDELMDQLPYYGEVLQRHVGFGTGNPEDAPEVRFGKIANPTVHICLNQLRLIVNLIIKRYGNPDGVVIEVARDLKLSREKKNEIVRKQKKNQEKREQVRKEIAAILECDETLVTSEDIEKWLLWEELNPGNALDRRCPYTGRQISAVDLLSKAFEIEHILPRSRTLDDSRANKTVSYWEANRLKSNLTPWEAREIFEAHGWNYEDILKRAENLPPNKRYRFGADGYKTWLREDSDFLARELTDTQYISRIAREYVSLVCPKNTYVIPGRMTAMLRHCLGLNTILSDDDKKNRNDHRHHAVDACVIGITDRSLLNKIAALSARGEEQNDRKFQRSVEEPWRGFRESVCRAVERINVSHRPEHSYEGQMHDQTAYPIDKNGQGWKKEVKSNGQTEWKKISVIPMVSQKAAQRHGYLSDGTLRPYKGYSGNSNFCIEITVNEKGKWQAEFVTTYDAYQIARKFGKDKLYGKESQSGHKLVMRLMKKDVVAMEDVDGCRRLYLLHKFSTNGVLSFAPINESNVSARVTEGSFKYVSKTAGSLQRAKARQVMLSPLGDRS

SEQ ID NO: 4754 - protein, 1122 aa, synthetic construct
  REGION 1..1122: note = Synthetic
MQYRIGLDIGIGSVGYAVLENDPVTEEPVRIVKLGVRTFNPNEVPKTGESVAKNRREKRGIRRRQRRKHFRMKRVKSLISRFLGVDFEKANQNLLNEDVYFLRAKALDEKISNEELSKVILHILKRRGFRSNRIHSTDKEEGKLKTAISENEERMNKGGYRTIGEMLYKDEAYKVECCGKLVYNVRNHGGDYRNCFSRATLANELQIILEKQKELGNEKITDEFIEKVVYIFEKQRNFDEGPGAQSPYHFDEYEVGNCTFIPTEKRAPKASYTFELFNALSKINNLKIGAEFLTQEQRKELYDVVQTKPELKFKQIRKMFSVPNDKLFNLCNYKRSKKEQDISDDELIEKCENKVFVSMKRSYDIRKALGDVENFDADFVDAIALMCSMCKSDEKVDKYIAEKNFALSADQIDKIKALSGIEKFGSLSIKAMKKIIPFLYDGERYDIACKHAGFDDASFEHEKTKYLKGKCVEEALSDVTNNVVKRAVNQSLRVLNKIIEIYGSPQFVNIELARDIAKNSQDRRTIEQNQMGNAENNQRIYDTIKSEFGVKSPSGQDILKYRLYQEQNSKCMYSGKEIEFARLFEPNYVQIDHILPISRSMNDSFSNKVLVLSKENQDKGNRTPFEYFGKDEKRWNEFKARVSLLKNVDKKRFLLKEKFTEEESAEFISRNLNDTRYMSKLLLNMMQKNLLMAPSKINEGTKSRKNIKSVSGSITSYLRKCWGINKIREDGDIHHAIDATIIACAGDSEVQKITKFNKRKELFVSRDDKFINVVTGEVMSASEREEYENQKLDVLKDRLPQPYEWFKKELEIRAKVCYTNFEFSDEEKMQLAKMNYSEEEIAQAKPVFISRMKTVKETGAIHKDTIMSTREFKETGNLIKSVSVQKLKLCNIPEEFELAGDKYPECSIENYYRPTDDRLLYLKLKNYLKEDGKIPDVVYKPRKDGSNGPIVRKVKAYEKASSYIPVSRGGAANDAMYRVDVFEKNNKYYLCPIYYADVYAHKLPNKVIVRDRPWETIDNSFKFKFSLYQNDLVRVESSSKDIVLKKKNKNENSNKPDEIENSEYMLYYNSTGISTASITLLTHDNCYIINSCGVKTLKKFEKLYVDILGNVYNAPKEKRKPI

SEQ ID NO: 4755 - protein, 1118 aa, synthetic construct
  REGION 1..1118: note = Synthetic
MFYRIGLDVGIGSVGYAVLENDSKTGEPIRIERVGVRTFNPNEVAKTGESTAKDRREKRGIRRRKRRREFRMQRVRNLIKRTLGEDAVTNLQKLNNEDIYKLRYNALDNLVKDEEVAKIILNILKRRGFKSSRLSPSKEDGVLVKAISDNENKLRKNGYRTVGEMIFKDSSFKTEICGHITYNVRNHYKDYRNSFSRNLLKDELNTILKTQQQLGNKKITDEFIERVIYIFEKQRNFDEGPGVQSPYHKESFEVGNCTFIPSEKRAPKASYTFEYFTALSKINNLKCDDEPLTQSQKEQLYNELKTRSEITYKQVRSLFNVDADKLFNLCNYRVKKKEHKTEEEVKEQAEKTVFVSMKNSYAIRKSLNILNDEKTDIELIDNIALMLSLCKSNEKIDNFIEEYKINLNEEQINNIKQLNFDKFGSLSFVAMKKITPFLLQGERYDKACKLAGFDDESFEHPKTKYLKGESVTEALKDVTNNVVKRAVNQTIRIVNEIIKEYGSPQYISIELARDIAKNPKERKDIKTMQDKNAATNQELYEKIQKEHNITKPSGQDILKYKLYIEQEAKCMYSGKTIDINRLFEPNYTQIDHILPISRSMNDSYNNKVLVLSYENQNKGNRTPYEFFGNDEKKWHEFVMRVSLLKNTEKQKLLLKKNFSEEESKDFISRNLNDTRYISKLLLNLFQKNLQMADYSNKDKNRKTVRSINGVITSYLRKCWGINKLRDDGDIHHAIDATIIACASDSQVQKITKFNKFKEIFKNKDDVFVNCETGEQMTLQEKQEYEAQNLNLLARILPLPYETFLKELKIRTKSCYENFYFTEEEKDELQKIGYTQEQISKIKPIFVSKMKNVKTTGAIHEETIMSAREYEETGYLIKSKKVQEIKLVDVREKIALKDDKYPDCSIESYYRPQDDRLLYLRLKNYLKEEGKIPNIVYKPRKDGTDGPKVNTVKVYEKCQNIVKTSNGAAKNDTMFRVDVFEKDKQYYLCPVYMADVYAKKLPNKLIAINKPWITIDNSFKFKFSLYKNDLVKITSAKGISLKKNIKNDKSLKADVITNNEFLLYYNSTGISVASIKLNTHDNCYGVDSCGVKNLLSIEKYYVDIMGNIYKANKEERKPL

SEQ ID NO: 4756 - protein, 1227 aa, synthetic construct
  REGION 1..1227: note = Synthetic
MKKTLGLDLGSNSLGWAILDDITGDILDKGVIVFPEGVDLDAKSSADTPAAIRRAARMARRMKFRRKLRKWHLLNILIDVGMCPLTHAELDEWKKTGRYPLGNKAFLEWLKATDTSNPYCDRAAAASGKVPPLTLGRALYHIAQRRGFKSSRKDEADLADETAGQEKQLDKELGAVKTDIETLTKEIEAAGCKTLGQYFFKLLQNEKGKLDKTRIRCRYTGRIEHYEKEFAVIMDVQGYSSGDELRTKLYKAIFSQRPLRSQAHLVGPCPLEPRNPRVQIGHPAFEEFRMLAFVNNLSLEDADGNCRDEQGNILYPLSAKDCEVICSAFMKAAPSIKFGDIIKLFKKDPRFKSQGLRFHYYRADDSVATCQTRHKIRSAFGSVPYDEQKVFDALTFFDDNDKLSSWFRKHFPALDDAAVKKLVSIHPKEGNASYSLKAINKMLPFLRKGFELSQARFLAKLPDVIPDFAANEQAILQGLEEKRWAFREERRRYGEMDSAERRKAQAPQLFDFYQRYLLDNWNVTDEKWKRLYLHGEGTYVKETEYKCNGTKVQLARPRLPPVKLGMIRNPLVQRAMTTLRRLVNYLGDHGKLEETDTIRIELARTVNDFATRKAWQEWQKSHQRMRAEAAAEIAKLGISVTEDAVDRYVLWKEQDGICLYTHRTINVADLFAGNKFDIEHTIPRSLSGDDSLANKTICEAAYNRQTKQGRIPRECPNWEEIDTMLRPWREKVEQLEKTYRSQTRSARVKTDPSQRSQARVKSLTTKFELAYWRDKLRRFEITSDKLQSPESGLGGFKKRQLVDTGIMCSHAVELLRSVYPATFSVNGAATAFARKAWGIQGDEAKDRTEHTHHAKDAMVIAALTPARFTAICTALKDDGAERRRECDVCPPPYEGFADKVRHACEEILVKHVMRQTTLRQSSKRNVLAKAHPPKGNPEGPLVKAVLSRGDTVRGALHKETFYGCIQTPGQKDRQFVVRKPLLGPVKDAQAIVSKIIDPAIRDIVDRRLKEMVASGVKNVSAGDIRMPSGVPINKVRIAAKTTNPSTLRDHVMPSVQAYKTPYYVTSAEGSNFRLGLFSEAGRMFAIPDNSLDWAQNHKRSDYRPLDLRPGFIGYVKPGTMALAYHEGHLEELEAMSSADLRKRLYKVVKFESSGRITLRFHCEARTSTVLEGELAAAGFNKKGESRINYDVPNRLLLLSPGTYTKQVLFEGIHFRMMLDGSIQFIKK

SEQ ID NO: 4757 - protein, 1191 aa, synthetic construct
  REGION 1..1191: note = Synthetic
MKNTLGIDLGTNSLGWAILDNITGDILDKGVVVFPEGIDAANDTLETPAAIRRAARMGRRMKFRRKMRKWVLLKILIANGMCPMSEEELESWRKRGIYPVANKHFIEWLKSTDTANPYMDRATAARGKVAPLVLGRALYHIAQRRGFKSSRKDAQEDSDSAKSLGNVKSDILALTKEISDAGCKTLGQYFAKRIEEEKGSVVKTRVRKRYTGRVEHYMTEFAVIMAAQGIAHDSKLYKDLYNAIFFQRPLRSQKHLVGKCPLEHQSARAQIGHPLFEEFRMRSFVNNLSFETADGEKILLTNEEREMACTAFLKESPTMKFSAISKLFKKKMRDERLEFHYYSGDDSVSTCCTRAKIKNGFGSLAYDEQMVFDALTFFDDDEKLRAWFTRHYPELPKENVEKLCKIHPKEGNAQYSLKAIKKILRFLRKGHDLFTARLLAKMPDVIPQFAEHEDEIVLHLKEMQIKCNELRDAARSMRTETPPPRLIDMYRDYFLTHWGVVDEEWNKLYLRGDAAYSADRKYPYRLPKVALGMIRNPLVQRSLTTLRRVVNYLRDHGKIDGETTIRIELARGVNDFATRHAIQLWQKDREAERAKARAELGDAATEEMIDRYILWEEQGRQCLYTGKAISFRELKEGNAFDVEHTIPRSMSGDDSMANKTLCDAVYNRQVKRGMVPSDCPNYESEIYARLAPWREKVEDLAKLSRSRNNSAKMATDPQAKANARIKAIRVKLELSYWRDKLKRFEIASDRLAEPAEGLSGFKRRQLVDTGIMCSHAVDLLRSVYPSVYSVNGAAVAFARKAWGIQTDGAKDRNEHTHHAKDAMVIAALTPGRFNAICAALKDDGALSGIRPCDVCKPPYEGFSEKVRKATEEILVKHVLRQTTLRQSSKRNALAKAHPQKGDPAKVVKYVNSRGDTIRGPLHKDTFYGCIARPESGEKAFVVRKPLVGPVATIEGFADKIVDPAIRDIVNVAIETLKSSGVKNVEPGYIKMPSGVPINKVRIYAHTTSPKELRSHAMVSDKPYKTPYYVTAAEGSNFRLGVFLSNGKLLVRPDNSLDWAQNHKKPNYVPLDRQDGFVGYIVPGAMAIAADNGDIESVRKLGRAELSKRLYKVVKFDSTGRITFRRHLEARASVVLAKDLTIAGKHKAGESQIDFEKPHELLLLSPGVYFAKMLFEGIHFKMQLDGSIMFLK

SEQ ID NO: 4758 - protein, 1194 aa, synthetic construct
  REGION 1..1194: note = Synthetic
MKTTLGLDLGTNSLGWAVLDDITGDIINKGVVVFPEGIDAASDTLETPAAVRRAARMARRMKFRRKLRKWKLLEILSRNGMSPISGQELETWKKSGIYPIENKEFVSWLKSTDSSNPYADRAAAASGKVSPLILGRALYHIAQRRGFKSSRKDAQADGTEDKDLGAVKGDIIALTNEIADAGCRTLGQYFAKRIESERDNICKTRIRKRYTGRIEHYMAEFAVIMEAQGIAHDSPLYKDLYKAIFLQRPLRSQKHLVGPCPLEHGNPRAQIGHPAFEEFRMRAFVNNLSFRNTVTDERVPLTAEDRELACSAFMKESSTIKFSAISKLFKKKFKSEPLKFHHYASDDTVAACSTRCKIKSGFGDIPYEEQKVFDALTFFDDDEKLAGWFRRHYPALTDEQVERLVKIHPKEGNAQYSLKAINKILPFLRKGHNLFTARLLAKMPDVIPQFAEHEDEIVLHIKEMESKCRAAREAMRNETIRQEGNPPRLMDLLREYFLTEWNVDDNAWNKLYLHGDSQYEVDPQHPDRIPAVALGMIRNPLVQRSMTALRRLVNYLRDHGKIDGDTTIRIELARGVNDYATRHAIQLWQKDRAALRDKARTELGAKATEDLVDRYILWEEQGRMCLYTGKSISLTELLAGNSFDIEHTIPRSMSGDDSLANKTLCDAKYNREVKKGMVPTDCPNYESEIYSRLAPWREKVEELERAYRSRNNAARSATDPQQRANARIKAIRTRLELTYWKDKLKRFETTSEKLADPTNGLSGFKRRQLVDTGIMSSHAVELLRSVYPSVYSVNGAATAFARKAWGIQGDEAKDRSEHTHHAKDAMVIAALTPSRFNAICTALKDDGRSADMRPCDVCKPPYDGFAEKVRKATEEILVKHVLRQTTMRQSSKQNALAKAHPLKSNPSKTVKFVKSQGDTVRGALHKDTFYGCIAKPESGEKAFVVRKPLVGPIAAIEALSDKIVDPAIKSIVGSSLADLKTKGVKTLEPGMIKMPSGVPINKVRIFAHTTSPMQLKNHASPSNKEYKTPYYVTASEGSNFRLGVFEIDGKLSVKPDNVLDWAQNHKLPDYVPLDKQKGFIGYIFPGAMAIAAENADIDKVKHLDSTELSKRLYKVVKFRSDGLITFRRHLEARASVVLAKDLANAGKHKAGESSIDFVTPHELLLLSPGIYFNNMIFEGIHFKMMLDGTIVFLK

SEQ ID NO: 4759 - protein, 1225 aa, synthetic construct
  REGION 1..1225: note = Synthetic
MSDKTLGIDLGTNSLGWAILDDITGDIKDKGVLIFPEGIDPNNDTLETPAALRRAARMGRRMKFRRKIRKWILLKILIENKMTPLTEEELARWRKEGVFPLNNKAYIEWLHSSDLSNPYADRAAAASGKVDPMTLGRALYHLAQRRGFKSSRKDADAQGEETDKDLGKVKGDIARLTDEIAAAGCKTLGQYFNKILETNKSKKVKERIRARYTGRIEHYEAEFAAIMDAQGFVPGDDFREKVHEAIFYQRPLRSQKHLVGSCPLEPDHPRCRIAHPAFEEFRTLAFVNNLRLVQTNGEGEKLPLPKEYRPAVLDCFCRKSNFKFGTIMKKLGKELKKTGMEFYYHTAEEVMTANTVSCSLNETFGNKKYDAQALFDALSFFDDEAKLRQWMLKHFNKKANEGIDKEIRPRLLVDGDLTEEECDKLAKIKIKDGYAKYSLKAINKILPFLRMGRNLRHALLLAKLPDLMENWARDGEAVMRRLDEIGFEYRQEKERYEGHKLPDDFINLSDREENCLRFEFGVDDAMWSKLYTNCESKYIGQKTYKNGKGEIVKPVTPRIPEVKLGMIRNPLVQRSMTMLRRLVNHLSGLGKIDKKTTIRIELARGVNNLAKRNAIKKWNIERAKLREEAREEIAKLSIKPTEEAIDRYVLWKEQDGKCLYTGRQIRITQLFNGNEFDIEHTIPRSLSGDDSLANKTICDAVYNRQVKRGQVPSQCPNFNEVSAQWGSAIKVNLKPWEEKVELLKAAYQKQRGRAKGCVDAVSHNKAQEKANLIELELDYWRDKLNRFLVKPEKLSSEEGKLNGFKRRQLVDTGIMSSHVVELLESVYDEVYAVNGAATAFARKAWGLQGDEAKDRTNHTHHAKDAMVIAALTPSRFNAICSALKDDGTIHPRPCDVCPAPYENFAEKVRKAAEDILVKHVLRQTTLKQSSKRNVLAKSHVNSKDPSKVVSAVLSRGDTVRGQLHKETFYGCIMKPGSEDKAFVVRKSLIGPVKNAKALIDKIVDPAINAIVADAIARLEQSGKTNVEPGDIRMSSGVPVNKARIYAHKDTCNELRNHTMPSTKPYKNPYYVESGTGSNFRLAIFDNPPDAKLDNSLYWAQNHKKADYMPCNKKPGFVGYVYPGTMAFTHDGDKRGHLYKVVKFNYIGKYPYITLRLHSEARAAKDLEKELPAIGKNKKGESKIDFENPHEMLLIGPKVYLKQIWFEGIHFNMELDGTVRFRQSIK

SEQ ID NO: 4760 - protein, 1235 aa, synthetic construct
  REGION 1..1235: note = Synthetic
MMKKTLGLDLGSNSLGWAILDDITGDILDKGVIVFPEGVDLDAKSSTDTPAAIRRAARMARRMKFRRKLRKWYLLKTLIDDAEKLIGTKMCPLTLQELDEWKTHGKYPVGNKAFLEWLKATDASNPYCDRATAASGKVPPLTLGRALYHIAQRRGFKGSRKDEADLADETAGQEKQLDKELGAVKTDIETLTKEIEAAGCKTLGQYFFKRLQDEKGKLDKTRIRCRYTGRIEHYEKEFAVIMDVQGYSSGDELRTKLYKAIFSQRPLRSQAHLVGPCPLEPHNPRVQIGHPAFEEFRMLAFVNNLSLEDGDGNCRDEQGNLLYPLSAKDRETICSVFMKAAPSIKFGDVVKLFKKDPRFKSQGLKFHYYRPDDSVATCQTRHKIMSAFGSTPYDEQKVFDALTFFDDNDMLGAWFRKHFPTLDEAAVKKLVSIHPKEGNASYSLKAINKMLPFLRKGFELSQARFLAKLPDVIPDFATNEQSILQGLEEARWAFREARRRYGEMDSADRRQSKSPVLFDFYREYLLNNWNVTEEKWNQLYLHGEGTYVAETEYDCKGKKVRLAHPRLPPVQLGMIRNPLVQRSMTTLRRLVNYLGDHGKLEPSDTVRIELARSVNDFATRKAWQDWQKARQRLRAEAATEIAKLGVAVTEDAVDRYILWKEQDGICIYTHRTINVADLFAGNKFDIEHTIPRSLSGDDSLANKTICEAAYNRQTKQGRIPRECPNWEEIDTMLRPWREKVEQLEKTYRSQTRSARAKTDPAQRSLARVKALTTKFELSYWRDKLRRFEITSDKLQSPESGLGGFKKRQLVDTGIMCSHAVELLRCVYPATFSVNGAATAFARKAWGIQDDEAKDRTEHTHHAKDAMVIAALTPARFTAICTALKDDGAESHRECDVSPPPYEGFAEKVRHACEEILVKHVMRQTTLRQSSKRNVLAKAHPPKGNPEGPLVKAVLSRGDTVRGALHKETFYGCIQTPGQNDRKFVVRKSLVGPIKDAQTIVGKIVDPAIRDIVDKRLKELLASGAKNVAAGDIRMSSGVPINKVRIVAKTTNPSALRDHAMPSNQTYKTPYYVTSAEGSNFRLGLFDEAGRVFAVPDNSLAWAQNHKRADFLPLDKREGFVGYVRPGTMALAYHEGHEEELETMPSAELRKRLYKVVKFESNGRITFRLHIEARASTVLESELTAAGYNKKGESRISYDAPHRLLLLSPGTYTKQMLFEGIHFRMMLDGSIQFIKK

SEQ ID NO: 4761 - protein, 1208 aa, synthetic construct
  REGION 1..1208: note = Synthetic
MNKTLGIDLGSNSLGWAVLDETLKLVSAQGVVIFPECIGIDNKPTETPAATRRKYRMARRLKFRRKARKWKLLGILIREKMCPLTLAELDAWKTKGIYPLANKAFLGWLKATDTSNPYCDRARAAEVKVPLETLGRALYHIAQRRGFKSSRKEAPPDTGDEDENKKLMEKAQGVVESGIAELSAAIEKSGAKTLGQYFFRLLEEDRNSPEKRRVRKHYTHRVEHYEKEFAVIMDCQGIPSGSTLRKDLYSALFMQRPLRSQRHLVGMCPLEPQSPRTFAGHPLFEEFRMWAFVNNLKFESPTGEEMPLTPEDRARVAGAFDYGKTTFKFKRITDFFKKDDRFKDYGWNKPEGWHFHHYKDAETLPSRSVGYRLRKYFGSIPYDEQQVVNALMFYEDVDRLIGWLKKHYPALDDAAAKLLASIRPSEATAQYSLKAIKRIVPFLRKGYQLYDATLLAKLPDFIADFDSHEDEICRNLLEIRHRQKEAREAAYSTGEKVVPFLDVFQDYLLTHWGVTEDQFKQLYVLRDSPYKTGKEGRIPAVQLGMLRNPLVQRALTTLRRLVNYLHDHGTIDEDTAIHVEMARSVNNYATRVAWQLWQKKRQEAREEARKTIEEHGCKVTEDAIERCLLWREQDGKCLYTGKSIGIEELLGGNAFDIEHTIPRSKSGDDSLANKTICEARYNRDVKKGRIPQECPNYAEIETRLRPWRENASRLEKDFLSQKAKSKGNPEARAKALAVKFELDYWRDKLRRFEITADKLTDPREGLSKFKNRQLVDTGIMTKHAKALLETVYPRVLMVNGAATAFARKAWGLQPADEAKDRTNHVHHAKDAMVIAALTRARFNAICTALKDDAHAPKRECDVCPAPWDGFADDVRTAAETILVKHVLRRTTLKQSSKQTVLAKPHPDQKHPGRIVKYVHAKGDTVRGPLHKETFYGCIQKPGEDKKSYVVRKSLIGSLKAALKTDKDIVDPAVRDLVKEQLAALESQNETNVEPGMIKMPSGVPVNKVRVIKGDVKNPQRLRVHAMSSRHDYKTFYYVTVAERSNFRMGVYDNDGKLSVVPDNSLEWAQNHKKTGYKTLDKRPGFIGFVYPGSLALTHATGNAEELHNLPPSELAKRLYKVRNIEGSGRLTLCLHTEARASTQLSADIKEANNHLAPGEMKKSPTGESKIDLKHPHELLRVSSGTYLKQMMFEGIHFKMMLDGTIRFL

SEQ ID NO: 4762 - protein, 1225 aa, synthetic construct
  REGION 1..1225: note = Synthetic
LYHYFQWDATASGQWRFEERISIKMNTVLGLDLGSNSLGWSVIDELTKKIVKSGVVIFPEGIEREKGNDTTQTPAATRRIYRAARRLKFRRKLRKWKLLETLIDEGMCPLTKEELASWKLDGIYPLQNKEFIKWLKSTDKTNPYRDRANAAAMAVDKQTLGRALYHICQRRGFKSSRKDAGEDTGDEVENKKQLEKNTGLVKSSISELTTAMENANCKTLGEYFCQIIDSEKDSLGKTRIRKRYTGRIEHYEKEFAIIMQAQSIDKDSALWKKLYQAIFMQRPLRSQRFLVGKCPLEPKQSKTFAGHPDFEEFRMLSFVNNLSFVDGDGNKQPLTAEDKELVKSAFMRASAIFQFKAISKLFKTDKRFKTQGWRFHYYRDEETLPSCSVSHRLSENFGDTPYDRDMVVNALMFFEDLDKLEAWFRKHFPSLSEEQVHKLAAIRPSEATCKYSLKAIRKILPHLRAGLQLYDATLLAKLPDIIPDYDAKKDSVKLAIEEARYLYREEKRHAAENRMQRVMPFLDRLQDLLLNRFGVTEQAWKKLYVITDSPYKVEKEGRIPEVQLGMLRNPLVQRSLKVLRRLVNHLHDDGLIDCNTAIRIELARSVNSYAERKAWQNWQDERRKKREDAKRQLVDEFHVKPTEDAIERWILWKEQNEKCLYTGETIDVCDLFSKNTPWDIAHTIPRSRSGDDSYANKTICASHYYREIKKGRLPAECPNRDEIEIRLRPWREKLKALRKQYFSQKKIKGNPDARAKALATKHELDYWRDKVKRFEITADKLKAPENGISGFKKRQLVDTGIMSTKAVELLKSVYAKVYAVNGNATSFARKAWGLQEIDEAKDRSNHVHHAKDAMVIAALSPKRFNMICSALKDDGRQYAKECKLCAQPWENFSDNVRSATADILVRHIFNRRTTKQSSKQTALAHPHPQKDNPGKIVKYVNGRGDTVRGQLHKETFYGCIKNPETGAKAYVVRKPLEGKISEIKNITPKIVDPVIRKIVEDAIAEMENNDITAVKPGDIKMPSGVPVNKVRIYAKVRNPNELKPHLIPSEKDYKTPYYVVTGRGANFRMAVFEKNGIRSVEHDSALDWAQNHQKKDYVPFDKQPGFIGYIYPGTMALTCKDGNVAELKSLPGSELSKHLYKVVRYAGTANQITFTLHNEARAGVELDKALLEAGKNKSGSSKIDFENPHERLYVYPGVYLRQMIFEGIDFNMKIDGTIVFKPERK

SEQ ID NO: 4763 - protein, 1199 aa, synthetic construct
  REGION 1..1199: note = Synthetic
MKFILGLDPGIASIGWALILEAENDNEKSRIIDSNVVKVDFDNFAYMNAKGKISEGKPIDMFRKGLTVSPNLVRRQKRGAHRNLQHFKLRREALIALLHDNGFINNDTLLCEDGKGTTYETLMLRAKAASEEISLTELARVLLMINKKRGYKSSRKGETDTDIEDLGAYIAAITGRSQSLVENHLTVGQYLMNQLNLHPLKGIKRQTFYRKDYEDEFEQIWKTQMAFHPELTRKLKKEIKNRIIFYQRPIESKKQELNFCELESHQIEIEKNGKKQLVTTGSRVSPVSSPLFQQFRMWQRLNDVVLTNTTTLEQYYLTQEQKEMLATELSIRKELTKTAAIRLLVGKQTKTYDLNFDTLIGNETQARLVNAYLKILELTGHDKLDIKKMRAQDVLDAICKVFEGLGYKTEALNAEVIIGSEIYMQPHYKLWHLLYSFPGDNSRSGSSKLVQRVKEFFGFDNDEYAKVIADIKFPDGYGRLSAKAIQKILPFLKEGYQYNEACEKAGYNHSKRSITKEENESRVLQQYLQPIPHNSLRNPLVERVLNQMVSVVNGLIDEYGEEYGQFSEIRIELARDLSKNAESRKRMTQDIENNKNERAKCRQELIDQLNERGYHVTYVSENDILKYRLYKELAPFGYKTLYSKTKVDLIDLIIHRKFDKEHIIPKAKSPSNAFSALTIELSSINEEKGDMTALDYVKWKYGEAEAQQYIARVNDLFKLKSISKAKKDNLLRTAADIQDEPLTRDLGLTQYINRKAYELLGTITRKVVPTTGSITCRLRDDWQLVDVLQELVWDKYEKLDLIDTYEDKDGKTVRKINEDAWTKRTDHRNHAMDAITVAFTKPAFIFYLNSLNSQGETRNQLLKMRHDYLHRDKKGNWRFNEPMPLGELRAEVKNQLERINVYQKPATSAVTPNLNISKSKKKKEGNRQVQLTPRGKLHDDNPFGSIKEKGVQVFTKRVEVNESLNIDDVVDKGVQRILQERLREYGNKPKEAFANLEENPIWFNREKGICIKRVIVRTKLKDARAIHKKRNNKGELLLDKDGKPQSTDYVRTNNNHHVAIYEDAQHELHEVVVSFFDAVDNAIQGNPVINKTYNADKGWRFLFSLQMNDCFVFPDEVSGFNPADIDLTAKENYALISPHLFKVQTISEGDYRFRHQYDATKGEYTKLKNMTWKRIRNPNGLKGAVKVRITKIGHIEYAE

SEQ ID NO: 4764 - protein, 1220 aa, synthetic construct
  REGION 1..1220: note = Synthetic
MKKILGLDPGIASVGWVVVQMAEEASEKSGILDAGVVKVDFDNFAYQKPDGKISSTGKIDELYRKGVTVSPNLVRRQARQARRRLQHYQQRREQLVKLLMANGFITADTPLNEEGKDTTYQTHALRAKAVTEVVTLEELAKVLLMINKSRGYKSTRKGENDGEDGKYLAAITERSQVLLERDLTVGQYLYEMLTQHPLKGIKNQTFYRKDYEDEFEKIWSCQMKFHKELTKKLKKQIRDKVIFFQRPIESKKGDVGFCQLESREVVVNGKTYTTGSRVIPTSSPLYQEFRMWQRLNDTVIKNIMTGEVRHLTQEEKERLAAELSIRKELTKTAVVRLLYGKAIKSVELNFDSLIGNDTAARIYKACLEVIKLSGHELDTKKMSSAAIIAAVQDIFGMLGYRTVVLTDAGEFAKLWHLIYSFPGDSSRSGHDTLTAHIKQLFNFDSADQAEKLANIIFADGYGNLSSKAIKKILPKMKEGLQYSDACLAAGYNHSVRSVTKEDNENRVLSATVTPIPHNSLRNPLVERILNKMVYTINALMAKHGQFDEIHIELPRELCSNAEKRAKDTAAIDRNTKEKEKAKQELKEKLAEMGFPVTYVSPNDVLKYQLYNELAGNGYKTLYSDTLIDLKELILGRGFDKEHIIPKALRLDNGFSNLTIEKTDINLKKSKQTALDFVQEEYGDAAAEQYRQRVIDLLEKKAISKAKHDNLLRTVAEIPANPLDRDLNLTRYITKKAVELLEPVTRKVLVTTGAVTVKLREDWKLVDVLKEMVFEKYQELGLTEKFTDKEGKVVERIREDVWSKRNDHRNHAMDAITVAFTTQSMIHYINSLSSQGEGREQIFHMRQKYLHKDGKGNWIFNSPMPIDEMRKVAKQVLENIFVIHPTPKVAPVTRNKGTLVPRGKLHDATFYGRKKKEVVFFEKVDKSFTEEKISTVTNPKYKTALMARLQEFGGDAKLAFTGKNSLEKNPIWLDKFHSAAVPLKVKCMTTKHVYTKRVTVNENLNVEKVLDEGIKAILKARLQAFNGKTKEAFANLEENPIWMNEEKGIAIKSVIVETDLKDLTPLHRKEDGTAKDFVKPNCNNHADIYVDGQGELHDNVVSFFDAVKENKLPVNENWRYFFSIKRNEYFVMPGKDFNPLEIDLEDSRNRSLVAKHLFVVQKMSSGDYLLRLHNDTSSGTVKELKDITSMRITSLSKFIGCVKVSIDKSGDLNVLQKIVVE

SEQ ID NO: 4765 - protein, 1276 aa, synthetic construct
  REGION 1..1276: note = Synthetic
MKYILGLDPGIASIGWAIVLEAENNQETSRIISSGVIKANFDNFTYLNSKGIPKEGNPVEMFRKGFSVSPNLVRRQSRSARRNLQHYKLRRADLIKLLKENHLVNDDTILYEEGKNTTHQTYELRAKAAMEEISLEELAKVLLMINKKRGYKSSRKEDFDSDEQQGEYLSAIVGRSKTLADNHQTVGQYLMNQLEQHPLKSIKNQTFYRKDYEDEFEQIWKTQIKFHPELTRKLKKELKNRVIFYQRPIESKKQDLSFCELESRQIEIEKNGKKRLVTTGSKVCPISSPLFQEFRMWHRLNDTVVINLNTLEKRSLTLGEKELLASELSIRKELSKKDVIKLLLGKGGKNFDLNFEKLLGNETQARLVNAYLKILELTGHDKLDIKKMKAHEVIDAICTVFANFGYSSEALKGQIENGLDVCQQPYYRLWHLLYSFPGDNTRSGNAKLIQRVKDLFQFDSDEFAKEIAEVRFPDGHGSLSAKAIQKILPKLKEGYQYSDACELVGYKHSKRSITKKENKQRVLQQHLKLIPHNSLRNPLVERILNQMVMLVNYLVDEYGKTYGTFDEIRIELPRELSSNAEKRQRDSKGIDDNQKEKETCREELITILKKHGIKVTYVSENDLLKYRLYKELEKNDFKTLYSNSKVDLIDLIMGRGFDKEHIIPRALRFDNSFSNLTIERTDINLDKSKSTAIDFIRDTYGEEATRQYIAKVNELFRQKAISKTKKENLLRTYDEIPSESLNRDLGLTAYINKKAMEILEPVTRKVVPTTGKITSQLRREWQIETVLKELIWDKYKKLGLINSYVDKNGEIVERINQNVWTKRSDHRNHAMDAITVAFTNPVFIFYLNSLNSRGEAREQLIKMRHKYMHRDEQGNWIFNPPMQIDILRAEVKQQLEQMLIFHQSSSKVSTPNVNITKSKKKKAGNMQQTLTPRGKLHDDTYYGCIQYPECEIVAVGKSFDECKIATVTKASYKIALLERLNQYGGNPKDAFTGKNALDKNPIWLDEMHTKSVPQKVKCLQIKTVYTKRVAVNENLNLENVVNEGIKRILKARLEAYNGKTKDAFTNLEENPIWFNKEKGICIKSVIVKATDVKDPIPLHKEKDRSGKHVIDDEGKSKSVDFVKPNKNHHADIYVDANGDLHEKFVTFFEAVQKANKNQPIVDLNYHADEGWRHLFSIQRFDYLVVPDKVSGFDPSAIDVCNPANYPIVSPHLFRVQKMSSKNYVLRQHLDTSNKTPEELKGVTSIEIRSLSNFLGCMKVSVNRLGRITSAQPIMIL

SEQ ID NO: 4766 - protein, 1275 aa, synthetic construct
  REGION 1..1275: note = Synthetic
MKYILGLDPGVASIGWALVREAENNTEESEIIDSGVIKANFDNFTYLNSKGVPKEGNPVEMFRKGFTVSPNLVRRISRGARRRLQHYKQRRADLIRLFKENGLMDDDTLLYEDGKDTTHETYRLRAKAASEEVSLNDLARVFLMINKKRGYKSTGADNFESEEEKGEYLSAIVGRSKMLTDSHQTVGQYLMSRLEQHPLHSIKNQTFYRKDYEDEFEQIWRTQIQFHPELTRKLKMELKNRVIFYQRPIESKKEELSFCELESHQIEVDKNGKKQLVTTGSKVCPTSSPLFQEYRMWQRLNDAILINQITLEKRQLTLEECNLLATELSIRKEMTKRDAIKLIKGKEAKNFDLNFEKLIGNDTHARLVNAYLKILELTGHDKLEVKKMRALDVIDAICKVFANLGYRTDAINGEVDLNQEVCFQPYYKLWHLLYSFPGDNTRSGNAKLIQKIKEFFDFDDDECAKIIADVKFADGYGNLSAKAIQKILPKLKEGYQYSKACELVGYNHSKRSVSKEDNDNRVLQQRLKLIPHNSLRNPLVERILNQMVLLVNELIEEYGETYGDFDEIRIELPRELSSNADKRQRDTKNIDDNQKTKDACRDELIAILKEHNINATYVSENDVLKYRLYKELAKNGYKTLYSNSKVDLIALIMGRGFDKEHIIPKALRFDNSFSNLTIEKTDVNLAKSKTTAIDFVRDTYGEDAVQHYIARVNDLYKSGAFSKTKRDNLLRTAAEIPEEPLNRDLGLTGYINKKAMELLLPVTRKVVATTGKITSQLRDDWQLVNVLQELVWDKYKQLGKVNTYVDKNQKTVERIDREAWTKRTDHRNHAMDAITVAFTKPAIIFYLNSLNSLGEARDQIVKMRHHYMHRNEQGNWVFNPPMQIGKLRAEVKRQLEQMLIFHQTSHKVATPNVNVTKSKNKKEGNKQTVLTPRGKLHDDTFLGCIKLPQSEILAVDKSFDEQKIATVTKEKYREALLERLHLFDNNPKNAFTGKNALDKNPVWLNEEHTQAVPMKVKCLQMKTVYTKRVAVNEDLNVENVVNEEIKQILKKRLAKYGGKAKEAFSDLEENPIWFNEEKGICIKSVIVKAADVKDPVPLHKQRDRRGRIISDANGESVSVDYVKPNKNHHADIYVDANGELHERLVTFFEAVQKANRLQPLVDTDYNANEGWRHLFTIQRYDYLIVPDIEKGFDPLTIDVCDVANFPVISSHLFRVQKMSSKNYVLRLHHDTSNKTPDGLKGITSIEIRSLNSFIGCVKVSIDRLGRISSPQPIVL

SEQ ID NO: 4767 - protein, 1117 aa, synthetic construct
  REGION 1..1117: note = Synthetic
LPWLPFRFPILIEAAWPQRVNRLLWRSWSFEGTKFMRVLGLDAGIASLGWALIEIEESNRGELSQGTIIGAGTWMFDAPEEKTQAGAKLKSEQRRTFRGQRRVVRRRRQRMNEVRRILHSHGLLPSSDRDALKQPGLDPWRIRAEALDRLLGPVELAVALGHIARHRGFKSNSKGAKTNDPADDTSKMKRAVNETREKLARFGSAAKMLVEDESFVLRQTPTKNGASEIVRRFRNREGDYSRSLLRDDLAAEMRALFTAQARFQSAIATADLQTAFTKAAFFQRPLQDSEKLVGPCPFEVDEKRAPKRGYSFELFRFLSRLNHVTLRDGKQERTLTRDELALAAADFGAAAKVSFTALRKKLKLPETTVFVGVKADEESKLDVVARSGKAAEGTARLRSVIVDALGELAWGALLCSPEKLDKIAEVISFRSDIGRISEGLAQAGCNAPLVDALTAAASDGRFDPFTGAGHISSKAARNILSGLRQGMTYDKACCAADYDHTASRERGAFDVGGHGREALKRILQEERISRELVGSPTARKALIESIKQVKAIVERYGVPDRIHVELARDVGKSIEEREEITRGIEKRNRQKDKLRGLFEKEVGRPPQDGARGKEELLRFELWSEQMGRCLYTDDYISPSQLVATDDAVQVDHILPWSRFADDSYANKTLCMAKANQDKKGRTPYEWFKAEKTDTEWDAFIVRVEALADMKGFKKRNYKLRNAEEAAAKFRNRNLNDTRWACRLLAEALKQLYPKGEKDKDGKERRRVFSRPGALTDRLRRAWGLQWMKKSTKGDRIPDDRHHALDAIVIAATTESLLQRATREVQEIEDKGLHYDLVKNVTPPWPGFREQAVEAVEKVFVARAERRRARGKAHDATIRHIAVREGEQRVYERRKVAELKLADLDRVKDAERNARLIEKLRNWIEAGSPKDDPPLSPKGDPIFKVRLVTKSKVNIALDTGNPKRPGTVDRGEMARVDVFRKASKKGKYEYYLVPIYPHDIATMKTPPIRAVQAYKPEDEWPEMDSSYEFCWSLVPMTYLQVISSKGEIFEGYYRGMNRSVGAIQLSAHSNSSDVVQGIGARTLTEFKKFNVDRFGRKHEVERELRTWRGETWRGKAYI

SEQ ID NO: 4768 - protein, 1080 aa, synthetic construct
  REGION 1..1080: note = Synthetic
MRVLGLDGGIASIGWALIEIFEDHEPSDGRIIDTGAWMFDAPEEKSQTGTKLKSELRRIFRGQRRVIRRRRQRMNEVRRILHRHGLLSSDNRDALKQPGLDPWKIRAEGIDRLLSPIEFAVALGHIARHRGFKSNSKGAKTSDLDAESSRMKKAVGETREKLARFGSPAKLLVEDEGFVLRQTKLKSGALETVRRFRNRDGDYSRSLLRDDLAAEVRALFRAQARLQSTFAKVELEAEFTQAAFFQRPLQDSERLVGPCPFEPAEKRSPKRGYSFELFRFLSRLNHLTLREGSEERTLTVEELRTAAADFGGVAKFTFSTLRKRLALPDIAIFVGIKADDEKKLDVVARSGEAATGTARLRRVVIDALGELAWGALISAPERLDKITEIITFRSDLDRIRAGLIEAGFDTPLIEAIVRAAADGKLDAFTGVGHISAKAARNIIPGLMRGMTYDKACAAAGYDHTASRERDAFDVGMHGKEALKKILQEERISRELVGSPSARKALIEAVKQVKAIIEKYGVPDRIHVELARDVGKSIEERRDIHFGIEKRSRQKDKLRELFGKEVGHLPQDGERGKEELLRFELWNEQMGRCLYTDEYINPKQLVASDNSVQVDHILPWSRFGDDSYLNKTLCTAKANQDKKGRTPYEWFRADKPEAEWDAFVARVESIQFMKGLKKRNYKLKNAEEAAEKFRSRNLNDTRWTCRLLAEALKQLYPKGEKDKDGKERRRVFTRPGALTNRLRRAWSLQRRKKSEKGERIADDRHHALDAIIVAATTESLLIRATREVQDIERKGLHYDLTKNITQPWPGFADEALDAVEKVFVARAERRRARGKAHDATIRHIAVRDDEAKVYERKKVGDIKLGDLIRVKDAERNAPLIENLRKWIEAGSPRDNPPLSPKGDPVSKVRLVTKNKVNITLDTGNPERLATVDRGEMARVDVFRKANRKGKYEYYLVPIYPHEIATMETPPMRAVQGGGDDDKWPEIDSTFEFLWSINQLSLLELTKPDGEVIRSYFRSLDRNTGALTVSGIANSTATRKGIGTRTLIDFKKLHVDRLGQIFEVERELRTWRGETWRGKDCI

SEQ ID NO: 4769 - protein, 1147 aa, synthetic construct
  REGION 1..1147: note = Synthetic
MKIPDRNLPDTVSNIGDNPSVEYHFAVASLPISRNHLAISPRACQSNSTDFCKLGVPVRVLGLDVGIASVGWSIIDIVSDSRSGTVVAAGVWMFEPPEEKGQTGSKLKTEIRRIARGQRRVIKRRRQRMNDVRRIFADAGLLPDAGKHALAIPGADPWKLRRRGLDHALTAAEFAIALGHIARHRGFKSNAKGEKKNTSGEDGKMKAASEKTEEKLARYATPAVMLAEDGGYILRETPRKDGSCEQVRRFRNREGDYSRSLLRDDLVSETRQLLKAQRRLGRDFATEALEKAFCDIAFFQRPLQDSEILLGDCPFERDEKRVARRAPSFELFRFLSRLNTLSLIEGSRQSRRLSVEEIGKAAADFGATGKVSFASLRSKIGLSQDVRFNGVKPDEESKRDVVARSGDAAAGTAKLRKLIAGHHGEMTWQALWQKPELLDRIVQVVTFRDDMDRIRLGLAEIDLDPAIRETLIEAADDGEFDGFSGAGHISAKAARAIIPGLLQGLTYDKACALVGYDHTASRERHAFDLKDADGKPVFGKQALGRILKEERVSTSLIGSPTARKAIIEALKQVKALVEAFGPPDRIHIEMARDVGKSIEERGKIDRGIEKRNRQREKIREDFAEKLGRLPLDSARGVEELLRFELWCQQNGRCLYTDEYISPERLLDGNNTVQVDHILPWGRFGDDSFHNKTLCTAKANQDKRGRTPFEWFLEEKTPAAWDAFEARLRELPYMKGLKRRNYSLRNAAEVQERFRNSNLNDTRWACRVLAEALKQVLPDERDDKGDLRRRVFARPGALTDRLRRAWGLQWVKKDKDGNRLPDDRHHALDAIVVAATTESLLNRATREIQELERQGNKNGDLLKNINSPWPGFRDETLERVGGAFVARAPRHRARGKAHDATILQVVEKNGEKVTYARKDIDKLTMADLDKVKDPERNAANIASLRDWIVAGKPKEAEHLPKSPKGDPIGKIRVQSKAKVNVLLYRGGHNNPPGTVDRGDMVRVDVFRKANAKGIWQYYLVPIYPHDIAMLDSPPMRAVTANKPEEEWPIIDPTYEFMWPLVPMTLLKVIDKNGTIFFPDQMDGNLGYFRGLDRNTGAIILSSIVDQTNIRKGIGARTLDTLQKMTVDRLGRTFEVAKETRTWRGKACI

SEQ ID NO: 4770 - protein, 1079 aa, synthetic construct
  REGION 1..1079: note = Synthetic
MRVLGLDGGIASIGWALIEISAADGASDGRIIDAGTWMFDAPEEKSQTGTKLKSELRRQFRGQRRVVRRRRQRMNEVRRILHNHGLLQTADRDALKQPGLDPWKIRADGLDRLLTPVELAVALGHIARHRGFKSNSKGEKSNEADDTSKMKKAVGETREKLARYGSAAKMLVEDEAYIMRKTTMKTGKQDVVRRFRNREGDYSRSLLRDDLAAEVRMLFSAQARLQSPVATPGLEKAFTETAFFQRPLQDSENLVGSCSFEPTEKRAPKRGYSFELFRLLSRLNHLTLRDGSDERTLTVDELANATAEFGVTAKFSFSALRKKLALPVSTNFVGVKAEEEGKLDVVARSGETAAGTARLRRVVIEALGDLAWGALVNHPDRLDKIAEIISFRNDLNRIREGLTEASFEPAIVDALVLAATNSKLDVFTGAGHISSKAARNIIPGLLTGMTYDKACAAASYDHTSSRERDAFDVGVYGKEALKRILAEERIDRTLVGSPTVRKALIEALKQVKAIVDKYGKPDRIHVELARDVGKSIEERREIETGIEKRNKQKDRLRDLFAKEVGRHPQDGNRGKEELLRFELWNEQMGRCLYTDVYISPTQLVATDNSIQVDHILPWSRFGDDSYLNKTLCTTKANQEKKGRTPYEWFKADKSEADWDAFLARVEAVQYMKGLKRRNYKLKNAVEAAERFRNRNLNDTRWTCRLLAEALKQLYPKGEKNDRGVEARRIFTRPGALTDRLRRAWGLQGFKKNEKGERIPDDRHHALDAIVLAATTEALLHRATGEVQEIERKGLPYDLTKNITPPWPNFRQDALEMVERVFVARAERRRARGKAHDATVRHIAVREGEKKVYERKKVTDLKLADLTRVKDQERNAPLIESLRKWIIAGNPKDSPPLSPKGDPISKVRLVTKSKVNITFDTGNPDRLATVDRGEMARVDVFRKANKRGKFEFYLVPIYPHEIAMMEAPPMRAAASSSPEENWPYLDNSFEFLWSITPMSYIEVIKKSGEIVEGYYRSMNRWTASVSVSQHANATSIVEGIGVKTLTSLKKFTVDRLGRKFEVEKELRTWRGETWLGKDCT

SEQ ID NO: 4771 - protein, 1076 aa, synthetic construct
  REGION 1..1076: note = Synthetic
MGFTETSGGVLMRVLGLDVGIASIGWALIEIDDIGGEEGARGEILAAGVWKFDSPEEKTQNGSRLKSEIRRNFRGQRRVLRRRRQRMNEIRRVFARHELLPRDDRDALKQPGLDPWKLRTEAFERALRPVEFAVALGHIARHRGFKSNAKDVKSAQAANANSAMSKAFAATKDKLARFRTPAHMLCADESFLVSGTSVRRLRNRDGDHSRTQLREDLLSEAAALFRAQARLRADHATTAFEQEFIKAAFFQRPLQDSEHMVGRCPFELDQKRSPKRGYSYERFRCLCRLRNLTLVEGSETRALSASEMNVAMLDFGADAKFTYAVLREKLALPASISFAGVAIGEEKRLDFVVRSGAAAAGTHKLRSLIGAALGETTWRDLLATPERLDRIAEVVSFRNRYDLIRQDLLASGFDEALTRTLVTAAKDGGLDLFAGAGHVSAKAARNIIPALMQGLTYDRACARAGYDHTASRARHAFDVGVFGKEALARILSEKRVSRELVDSPTARKALIEALKQVKAIVETYGVPDYIHVELARDVGKSIDERREIARRGEARGRRRDELIERFTREMGRAPRGGGHEELTRFELWLEQDGRCIYSNVRIEASQLVAGDNSVQIDHILPWSRFGDDSYSNKTLCLTRANQHKKGRTPFEWFHVERGPKEWEAFIARVDSLRIDGFKKRNYKLRDAEAAADKFRARNLNDTRWTSRLLAEALKQLYPGVEKNAEGDGMRRVFTRPGALTDRLRKAFGLQWIKKNEKGERIRDDRHHALDAIIVAATTESLLNRATRQIQKKEREGRPFELTEICAPWTGFREACLDALEMVFVACAERRRARGKAHDATFRQIAIRDGERRAYERKMVADIKIADLERIKDPDRNMATVRALRAWIEAGKPAGEPPRSPKGDPIRKIRLAAKSKVNILLNTGNPNRAAAVDRGDMARVDVFRKPNAKGVFQYFLVPIYPHEIAMLAAPPMRAVQGGTEEENWPRIDSSYEFMWSMTSMTLLEVSRSDSEIIRCYFRSLDRNTGALTVSTVSSALPVKMRIGTRTLFGLRKLHVDRLGQVHKVEREQRTWRGKVCD

SEQ ID NO: 4772 - protein, 1087 aa, synthetic construct
  REGION 1..1087: note = Synthetic
MSKGNELVWSFDLGTGSIGECARRGKEILHLHSLLLPNDFAALKDARERRRQIRTREAHRKRENWWRQQAKKVGIEVLETGHRADDGTFIKPDARMSRQFPENGDKTIYASCLLRIALLQGVQLDGWQIYKAIWSAIQRRGYDADLPWKREVSRNIADKETSEKPASGKKLASHKEAKKEDGAGEKDEKENLDAVQNYQKELERVFKDEKYRLPCYYEAYKLGVWNPRKPDTLDGKFGANPEPARNKDNRTSLIPPRALVAKELLVMLTQASKQYPKLKDKVRYVLYGPAEQEYASYKDEKYAHYRGTEWDSQGLISQKIPRFDNRIISKCALMPRFNVCSAKIRKDKAGNIIPESMLPSEVTFLLKLKNIRYTDTTTGEMEKPLSPAALKELFNAYNDKKHITQKQLEKYIKTNLSGLPPANLVEIEEPKTSGRSRFCRPALRIIKEIILSGKSPHAYHEEWLAANKNKDLQKGLVADDVKFLLDMPAEWEKLHIPDRRIEESELKKSEREKRIVEILGGITNPVVRHRLELFIQRLKVLKNKCRAEGEPAKIILEFAREGEESFQGQKNKNRQKWEKLQKENRAKKDEAYKSLQTAEIHGKQSLLKMMLFKEQVGYDFYSMTPLVASRLESYEIDHIVPREGGGSDAYINKILTTPDKNREKGKHTPFEWRSSDKAKWLDFIKAVGSSKLHDKKKALLTSENPLELINKYTDLASTAYISKLAQKIIHLFFGWPQLIEGSTRKVVVANGGLTAKLRRQYKLDRLLHPGIPDEQFSELAQSGELDKKNRANPRHHALDALVISMTPELKLDPRSKKDILPDWFHKEYCRPIIETVYPERIRFEKPKLAKTIYGLRKNLEDNREFYVFTTRFGTGTRIEQFREIEKARKYTDGIFDEHIRNDFNKMLASKPAQQEWEKFLDEYEVAGSKPKKFVQIASGEIDKETGEKLERGELTTYGEHVRGKMAGQYFKNDVSLGYFVYQNEKDRWEREPIYAFESLYKKIEALKKDPAVKNPVFFRSGMLVEIKNDCNLQNPKQKVTRGFWYLNTIKDGGEVKLTSIDHSLERKAQLNALMTDGKMAPPQENIR

SEQ ID NO: 4773 - protein, 1026 aa, synthetic construct
  REGION 1..1026: note = Synthetic
MSMITLGLDLGISSIGWAILSENSKERELIAWGSRIFEPGVEGTTNEISAGKGVSRCAERRLKKALRKQYLRRRTRKKALLDILVSNGFLPENVNSDFFTKIDQTLLMQLPKTERNRLGHVLPYLFRKMALDRLLDKYELGRALYHLAQRRGYLSNRKQELKDQENAGKVKSGIDELKQAIADVGARTLGEYFSMVDPEVERIRCRYTERAMFQDEFRKICQAQREHISEQLEAELFQAIFFQRKLKSCKGLVGKCRIYPERRRCAMATMEAQLFRIYTTVSNLRIACNSQIRSLTEDERQKIIEILNSYSSLFNKSGKMALSKLQKAAGLGKGEKFTLGEGAKEIYGNELHNILYRAFGDKAADMTDGEREKFFNDLRSVEKSGVLVKRLTGYWQLPPEKAAEISAIPLPDGYCAYSLRALQEMLPDLQGGVSLSDWLKNNNHSLSAGQELDRLPLLDECGFELRNPIVHRTLTEMRRVVNRIVERYGKPDRIHVELARDLKATNKEREQITIRNRMREKEREAIAKRIVEDVGLEKASRNDILKVMLADECGLTCPYSGERFSMTELLHGGCVQIEHIIPYSRSFDDSFANKTLCINKFNAKKSNRTPYEAFGSSPEYCEMLERVKHFKGAYAERKLELFKQENVETAEFLERNLNDTRYASKLAMQYLAMLYGGIVDKTDKRRVFAIAGGCTALIRRAWGGNYLLGEGEKVRSDHRHHAVDAMTIALTTPGLVQEIAKMTPERRKKFNDATPKFIDSKFYSQAYSMLNHCAVSHHVVNKLRGALHKETIYSKDYSDGQSLRHERVALNSLSAADIKQIVDPVIKNIILDRLGVASDCEVTDAMLKVFKDEANYPQMLDRSGKAVNTIKKVRIARTVNTRTIGKGDGKREVANGANYVLAIFAKLNERREEVAWEGEIISLMDAIQRKQRSQPLFEKERSGMRFKFSLQKGDIVKFTKDGQENLCIIRGISLPQFSCCSILDARQKKDIQVAKCWFQPTVSAAFKWNMQKYNMNVFGELQIAND

SEQ ID NO: 4774 - protein, 1026 aa, synthetic construct
  REGION 1..1026: note = Synthetic
MPYTTLGLDLGVASIGWALISEDGDREFHLKAWGSRIFEQGLDSGSGLDGISAGKGTSRATERRQKRALRTQYKRRRERKNELKHILTENGMLPEPFTPEFFVELDRKLVQTLPEAEREHAAHIAPYLYRKLALDRPLTKEEFGRAIYHLAQRRGYRSNRKLDLTDKDVGVVKERIAGLKSKMEQVHARTLAEYFCTIDPNKERIRARYTDRAMYEDEFRKICEAQRAIVSPELEKQLHKAIFFQRKLKSCKGLVGKCEIYPELRRCSMAKEEAQLFRIYTTVSNLRVQKGDTVRPLTDEEHDNAVAFLNGYSDDIKKGKVSLATLGKVIGLAKGEKFTLSDESKEIHGNELHAALVRVFGTEKAAAMSATEQGTFFHDLKSIEKDAILKKRLSGYWKLASPQVEAAMTVMPPESYCAYSLRALREMLPSLESGESLPTIKKLLYPKQVGAEHDFLPVFDSKECNIDIRNPLVHRVITELRAVVNAIIARYGKPNEIHIELARDLKTSNKEKEKITSQNRKREKERHEIAERILAEAGIEKPSRNDILKVMLADECNYVCPYTGKDLRPLKRILYGKDIHIEHIIPLSRSGDDSFRNKTLCDASANSAKNNRTPFEAYSGEQYRQILARVAQFKGHYAADKLKLFKMEELENDFIERNLNDTRYASRIAMQYLGLLYGGINDKNHKQRIFATNGRTTALIRSGWGGNDLLGEGEKVRTDHRHHAIDALTIALTTPGMVQKLASMPSEQRRKLNDAGIPQIDPNLRNEAKQALNSAAVSHHVRNRLRGELHKDTLYSKDYGGTERHVRVSLDAMEPGDVAKIVDPVIRALVLEKLGRSNPEDVTKTDFKLFCDPANLPILRDTKGNPVNVIKKVRVRQNLKTVTVGSGDGIREVKTGSNYVLPIFAKLNEKGEETKWEGKIVTLLDAIQRQKHGLPIFEKDNPGYKFKFSLKKDDIVKWTKDGKEYLCVVRGISLPQFYLVPVEEARRKGDIQKGGCWFPLTISRAFNGKLQKYRMNIFGELRDAND

SEQ ID NO: 4775 - protein, 1021 aa, synthetic construct
  REGION 1..1021: note = Synthetic
MKQRILGLDLGINSVGWAIVDDDNDAQVDLLDWGSRIFAPGLAATTEEIVSGKGESRCAERRLKRAQRIAYRRRRQHKDELTRVLSGSGLLPEQVSPEFFLQIDRAFLAGLPEDEQKRAAHVVPYLLRAAALDRPLEPMQLGRALYHLGQRRGYKSNRKQEAKDSEAGVVLSQIAELKEAIRNSGARTLGEYFSTLDPEQRRIRTRYTERGMFEEEFRKICAAQRPLISEALERALYHAIFFQRKLKSCKHLIGFCRLEPEERRCSFQDPLAQRFRILQEVNHLRVDGRGVLRPLTEEERQKVLTVLDGLSGELNAQGTIALSALGRLAGLRRGEKFTLGDEDKKVYGNELHAILFRVFGARAAAMKEEERQAFFHHLACMEKDDALRRILRTRWGLSEEAAEKAAHISLPDDYCGFSRKALKQLLPDLESGIALSTVIKLKYPEQFQASERVLEFLPPLDETGLQLRNPVVHRTLTEMRQVVNAVIRKYGKPDLIRLELARDLKNSSKDRENIARRNRLREKERERIAREIAQEAGVEKPSRRDILKVMLAEECDYTCPYTGRRFSMRDLLHGGLVHIEHIVPYSRSMDDSFINKTLSCRDANAEKGNRLPFEAFSPEAYREILERVRRFKGPFAEAKLERFKLQKAESRDFIERNLNDTRYASKLATEYLALLYGGRWDRNGVLRLQCSAGGCTAVVRRAWGGNYLLGEGEKERGDFRHHAIDALTVAVVSPAIVKAVAEMPKETVRKAIEEKQPLIVNSLYTQARAKLDAAGISHHTINRARGAFHKETIYSKSHGGDLRHVRRRLDTLEPKTVAEIVDVAIRRAVEEKLAELKMTDPRKAFKDGGNLPVLRDRQGRFVNTIRSVRVRQNVKTRSIGEGDRKREVANGANLVLAIYARHDADGREIGWDGEVVTVLDARLRLQRNEPVFPKVKEGNPLKFTLRKGDVVRWSKDGQEYLCVIRGISLPQFSCMPINDARDVKTLKAAGLWFTPTLSAAFRGKMEKFHTTPLGELRRAND

SEQ ID NO: 4776 - protein, 1027 aa, synthetic construct
  REGION 1..1027: note = Synthetic
MPYTTLGLDLGVASIGWALISEDGDREFHLKAWGSRIFEQGLDSGSGLDGISAGKGTSRAAERRQKRALRTQYKRRRKRKEDLKHILTENGMLPEPFTPDFFVELDRKLVQTLPEAEREHAAHIAPYLYRKLALDRPLTKEEFGRAIYHLAQRRGYRSNRKLDMKDKDTGVVKEGIAELKSKMEQAHARTLAEYFCTVDPNEERIRAHYTDRAMYEDEFRKICEAQRAIVSPELEKQLHKAIFFQLKLKSAKGLVGKCEIYPELRRCSMAKDEAQLFRIFTTVSNLRVQKGDTVRPLTDEERGNAVAFLNGYSDKFTVRGTITLNNLGKVIGLAKGEKFTLGDESKEIHGNELHAALVRVFGAEKAAAMSAAEQDAFFHDLNSIEKDAVLEKRLSGYWKLAPPQVEAAMKVMPPDSYCAYSLRALREMLPDLEAGIPLATLKKNLYPKQVGAEHDFLPVFDGDECGIEIRNPLVHRVITELRAVVNAIIARYGKPNAIHIELARDLKTSNKQKEAITNQNRQREKERQKIAERILARAGIEKPSRNDILKVMLADECNFECPYTGKRFSMHDLLYGKDIHIEHIIPLSRSGDDSFRNKTLCDASANSAKNNRTPFEAYSGEQYRQILARVAQFKGHYAADKLALFKKNELENDFIERNLNDTRYASRIAMQYLGLLYGGMVDKNGKRRIFATNGGATALIRRGWGGNDLLGEGEKVRTDHRHHAIDALTIALTTPGMVQKLASMPPEQRRKLHEAGKSLIDDSGLFNEAKQALDSAAVSHHVRNRLRGALHEETIYSRDFGGTERHVRVSLNAMEPSHVAKIVDPAVRKLVLEKLGKSKPEDVTTNDLKLFRDDANLPVFRDSKGNPVNTIKKVRVARNLKTVTIGSGDGVREIMTGSNYVLPIFAKLNEKGEETEWEGEIVTLLDAIQRQKHGLPIFEKDKPGYKFKFSLKKGDIVKWTKDGKEYLCVVRGFSLPQFYLVPINEARKKEDLKAAKLWFVLYLSTAFKGNLRKYRMNIFGELQRAND

SEQ ID NO: 4777 - protein, 1033 aa, synthetic construct
  REGION 1..1033: note = Synthetic
MQEGWCFMSRTILGLDLGITSIGWAVITEEASGTTLNGWGSRIFEAGMEDDIESGKGVSRCATRRLNRALRIQYRRSRERREKLIAVLQAHHLLPEPLTPDFFVKIDNRLLLSFPVPLRSQVAQVLPYLYRKKALDCPLAPEELGRTFYHLAQRRGYKSNRKQDLKDEESTGVVKSGIQALKTAIVQAGARTLGEYFCGIDPEQTRIRGRYTDREMYQEEFHRICRAQRHLVSEALEKELFDTIFFQRKLKSCKHLIGQCRLVPEAKRCSFAREEAQLFRIYSTVNHLRVSSRGAIRTLTPEERSRTIAVLNGFSSVLTKSGKITLNSLGKQLPLAKGEKFTLSDDEKEVYGNVLHAILFRVFGARAEELSAAERDAFFQDLNSIEKEPILRKRLTGHWGLSEEQAAEALNAALPDEYCAFSLKALKTLLPDLEAGIPLNTVLLHQYPEQYHSRTAPVDLLPLVDDCGLELRNPVVHRTLTELRRVVNAIIARYGKPDVIRIELARDLKSSNQERARFTRTIRDREKARAAIVRKIIEEAGIKDPSRNDILKVMLAEECDFTCPYTGTRFSMRDLLYGKEIHIEHIIPYSRSFDDSFRNKTLCVAEANARKGNQTPYEAFTGDEYRLILQRVKHFNGPFAEAKSDLFAMKEVDSDAFLERNLNDTRYSSKLAVRYLALLFGGIVDAGGTRRIQASAGGCTALVRRAWGGNYLLGEGEKVRDDHRHHAIDALTVAVTSPELVKKIASMPSELRRRLSREKQPLVEATLYEQAHGLLDSAAVSHHVVNKIRGAFHKETIYGKDFGNTERHVRVALGALTGKDLAGIVDPAIRNIIEQSLENNGVDLAAVSGKDTPLKTFSDQANLPSLTDRAGNPVNTIRYVRVKRNVNARTIGEGDRQRAVANGENHLLAVFAELDERGGEVKWVGEIVSLLDARLRLQRGEPPVRLDRPGLKFKFTLKKGDIVSWEKDGREQLCIIRGVSLPQFSMVPVCDARMKNELRAAHVWFAPTLSGAFKGGLKKFRMNLFGELRRAND

SEQ ID NO: 4778 - protein, 956 aa, synthetic construct
  REGION 1..956: note = Synthetic
LQYFRRRERKRELVETLIAGGLLKSAPDQAFFQEIDRRLLRLFPSEEFRRKAHLIPYFYRKLALDQPLEPDELARALFHLAQRRGYLSNRKQEAKDEKEAGAVKSGIHRPKEALRNSGARTLGEYFCGVDPEAERVRCRYTERAMYQDEFRRICRAQRHLIPEELENALYRAIFYQRPLKSCRHLIGRCRLYPDLPRCSFAREEAQLFRIYTTVRNLRVESGGVIRSLTEEESRAAVKLLNSFSPQFRKNGRITLAKLQKAVGLTRGEKFTLADEEKEVCGNELKNILFRAFGEKAATLPPEERERFFNDLASIRKEEVLRKRLRDHWKLPEERIDEVAGLAMPEGYCAFSLKALRELLPELEAGIDLSTVLKCTHPTECGEEKAELDLVDRSGIDLRNPVVHRVLTELRRTVNALIGRYGKPDRIRVELSRDLKSTGRERELALKRNRDREKLRAAAAARIAEEAGIQNPSRNDILKLLLAEECNFECPYSGEHFEIGDLFSGRLEVEHIIPYSRSFDDSFLNKTLCLREYNARKGNRTPYEAFGGSDEYEAMLERVARFKGSAAERKLELFEMTEVQPEEFLARNLNDTRYASKLAVQYLGQLYGGVVDRTGKQRIFATSGTCTALIRRAWGGNHLLGEGEKVRDDHRHHAIDALTIALTTPEMVRWAAGLSPEERRRMLESKEFADNELFRQAKSRLDQIAVSHHVVNKLRGALHQETFYSRDFRPGTGERHIRIALDALPVKELGNIVDAAVKRAVLSKLGVTDPGAATEAMLKQFKDPANLPVMRDRAGNVVNMIRKVRVRRSQQTRTIGRGDGRREVANGENYVLAIFARLDDRGNEVAWEGEIVSLLDAVLRHQRGLPPFERERPGMKFKFSLQKGDIVSWKRDGRELLCVIRGVSLPQFHCVAVNDARMKKDIQAAQAWYAPTVTAAFNGGMKKYNMNLFGELQRAND

SEQ ID NO: 4779 - protein, 1611 aa, synthetic construct
  REGION 1..1611: note = Synthetic
MSQEKKHILGLDLGTNSIGWALVEIDNINFIVRIKCIGSRIIPMSPAEISKFEEGKHLTSAAATRREARRPRRMNERFILRRDRLNYVLNVYSMLPQHYRLELDIDTPQGLRCGHFKKGKEPKIAYKLSEKREGKRDKYAFIFDDAYNEMREDLKRSHGILPTDKIPKDWTLYYLRRKALTEPISMEQLSWILHSFNKKRGYMKVEGADVEKNDVEKRVCKVTSITKENDCLFAIHLEDASNSSWTFDYKEDSSMQITNIEDLKQLEIKNVYDEEGNLNKEKSEIAIKEIRQLNVLAVKHEGKKSFFTIDNGWKLEKSDKQSATMQEGKTYSFICSCIYSIDGKLKKRDLLLALEKDKENNRPYIKLDTEMKIAKYNVSNGTKGVGAYIYANLLGNGKDRLHTKIIGGLVESIEREYYHDEIIAILKKQIELHDNLNDKSLYAQAVNALYPHNESHRRQLMQQGLEQLIADDILHYQRELKSKKSEIDDCRFESYRYTTQNGREVVRPVKAAHTANPYFQEFRIWKFINQLRILEEANEEHASQIDVTEEYLDFDVRASLFEYMQTHKGITNSVLRQSFMHLPNKGKGYVWNYESDHEEKGNETRYDLMVRLKRVKALDWQAFLAATHIDNGKLVTNEYMLWHFFYSVKQRKQRDKGLCTLIERLLAYADMNVSLANEIVKQLTTLPAYKSSYCAYSEKALLKLLPLMRCGKYWNEEEVSKLTGVLNDMECQGLMEHDAVKIVYNDLLMAVNKERWLTPHDIRQYLKKGFRHNALKNPVVEKVVREMLMTVHDIWECQLRNDENFHFDEIHVELGRELQKSPKQKQSDINHMKDNRAANKRARMILSEMGLEANSPFMREKYRIYEECVLDKIRFDNKETEYNFEDVHGNMQTITKAEIMAIQTSEDVDAEDIRLYRLWLDKRFSSPYTGKEICFSDIFNGQYQRDHILPRERVTLNSFQNLVMCEAKINKAKSAMTGMEFIKKYGGRKIAGFRIQTETEYRKWVHDNVNDPQRREIYLSEKVPERFTNNQLNNTRFISRLAMSLLSHIVRDKDEQGAISKNMLSVNGSVTATLRRDWHLSEVWNELITPRFRRMNKVVETETGLPSTLFGMEREIKGRKVFVPDVPEKYRDTFEKKRIDHRHHALDALVVALTERAHIQYLNNVAAEKDTRDAVSVRKALKAKYTKSIKKEDGTKDVFFLPPMQYNEGGKTHKYRYAYQNEVRNGFETITLKALQDMLVSFKSDTKFTSPRKNLYLHWNEEQQRIVPTSERGLESEQKYGIRQKMTTKDTFYGRRIINGDTYISTRWSHTLDMFAKPLPDKLKTVEDKLKELDARFSTIADKAIAQILKNYAQYCDFDLERAFSPDGIAYMNANISQFTPNKKAHAPIYKVALLKRSVKAYALSSSGVKSRQFYEENSNIRFFMYPDKSSKVQTMDMYLRGVEMKSGYSFSLVKNDLVYLPTARQQKMVDAYKGEEPMSLKTLASDAFSPDRFYRVKSFDPGANKATLYCMPATMAQMILENKNCLDPKDMLLHINVFNHFELKKTNVSEWDERFKGKIKSEISWSNDKEKSTKPLFSNDIFICDICWKVKLSRLGEIEEMITQQGVVIK

SEQ ID NO: 4780 - protein, 1504 aa, synthetic construct
  REGION 1..1504: note = Synthetic
MNKKIIGLDLGTNSIGWALIERNTEQSEGKIVDAGSRIIPMPQDAISKYETGNLQSAASVRTDYRGMRRLYERAELRRSRLLRVLNILGFLPEHYREAIDFTNHLGQFKDHGEPLLPYKRNEEGKNEFIFKDAFHEMLEDMRTHHPELVANGKKIPYDWTIYYLRKKALSQSISKEELAWIILNFNTKRGYYQLRGKEEETATNDNQVYDVLEVSNVEETGPNNKKKGYNWYLIHFTNGKVQNRTWKEAPCHIGDKVECIITYQVKKDGSPKLDENGEQLYKITAPAPNDWTLRKKRTESIINNEHVTVGAYIYDHLMEHPEDKIRGKYVHTIERKYYKEELRIILDKQKEYIPELRDRHLLSQCISELYHHNEAHRKALNDQDFTHLFVDDIIFYQRPLKSKKSLIADCPLEFYPYRDKDGVWKHRPIKCTPRSNPLFQEFRLWQFIQNLRIFLREQKEEDGKLKLDVDVTNQFLSTPEDYCDLFDWMKQKSDITQKQLLAYPAFHLGKKTKDYRWNYVDDDKHTYPLCCTHHDICQALKNVDGAPSLSTGQEENLWHILYSVDDRYELEKALCHFAEKYGLDSESFVNAFMTFKPFDNSYASYSEKAIKKMLPLMRTGRYWNVEGIDSRTLQRIEHLITGEADDNISNSVREKCQGLDQIEKYQFLPVWKVCYVVYNRHSEAIDTGRWSSPEDIDNYLKSELRQSSLRNPVVESVLTESLRVVRDVWKQYGKPEEVHIEMGRDLKQNKAQRQKANSAMLANQQTNLRIRCMLQEFADPEFHIDNVRPQSPSQQELLKIYEQGVLDSTDNIPDDIQTIIDHIGDKNKGASRSDMLRYKLWLEQKYQSPYTGQPISLSRLFTSEYEIEHVIPQARYFDDSLNNKVICETEVNREKGSMLAYEFIKSKGGMIVKGTGGRQYKILDTVQYEEFVKSHYSSNKRKMRNLLLDDIPDSFISKQLNDTRYMARKALDIFSHLVREEFKDDSAVSKNVIACNGAITDRLKKDWGLNDVWNDIVAPRFERMNAITHSTDYGQWVCKEGKRYFQINIPLALSKGFSKKRIDHRHHAMDAIVIACTTRNIVNYLNNASGADTEARYDLRNAVCFKDKNVDGSGNYQWTIKKPWCTFTQDAHTTLDHTVVSFKQNNRIITQTSNRYWHYSNGKKVLDRQAKGDHWAIRKSLHKATVSGALYMPEKKKVKLKLALEDINAICNAKARKVIRHIINETYHGHVDNATLLKYFKARDYLINGINFNTLEMRIVPAQPNYTASRVSLDSTFTEENIEKKITDTGIQTILKRHLKHYVDDKGKCDCAAAFSPEGIAEMNEHLTELNGGKPHKPIYKVREKETIGLKFNIGTAGFKNKKFVEADKGTNLFYAVYADNEGKRSFESIPLNMAIERKKNKMDVAPAMNAKGDKLLFVLSPGDLVYLPQEGEHVALPLDENRIYKMVSCSVARSYFVPYCSACMISDKIEYGPLNKMERSLDGIMIKTTCIKLKVDRLGHISV

SEQ ID NO: 4781 - protein, 1495 aa, synthetic construct
  REGION 1..1495: note = Synthetic
MSKILGLDLGTNSIGWALIDSKEQKIIKAGSRIIPMDAATMGDYEKGNLKSAASERTDFRGARRLYERAILRRERLLRVLHTIGFLPKSFEKQIDFTEHPGKFLNHGEPLLPYYKDEQGKNTFLFKDSFNEMLSDFKKHHPDLVSDGKLIPYDWTIYYLRKKALSQPITKEELAWIILNFNTKRGYYQLRGMEDTEETDKTKIEVYKVLEVASVENIGPNKKKEGYNWYLITYDNHATQRASSPTPPQKVGNLVEVVVTTTLDKDGNIKKDKDGFPMIKLRTPKEDDWTLMKKRTEKNLANSHQTVGSFIYEHILSTPNIKVRGKLIHTIERKFYKEELCQILEKQKEFIPELKNIELYKKCVHELYKNNEAHVESLMNEDFTNLFVNDIIFYQRPLKSKKSLIANCPFESYHYKDKNGNIQSHPIKCIPKSHPLYEEFRLWQFLSNLRIYKKNVEINGKIVTDYDVTSQFLQTPNDYCDLFEWLQNKKEIKQDQLLKYKSFGINKEVSNYRWNYVEDKTYPCCSTRFEINKRLQSLNLQDLDNNDYTHLWHILYSVDDPIMCQKALHKFAIKHDFQEEEFVNKFKQYSPDSKDYGAYSEKAIKRLLALMRTGRHWDEKNIDTKTLSRINNLIDGVVDDEISDRVREKLANKQHISDFQGLPLWAASYVIYNRHSEASETIKWQKPEDIDTYLQNNLKQHSLRNPVVEKIICETLRVVRDIWKNFGDIDEIHVEMGRELKQDAKSRNKDSQRIIENERTNLRIRALLQEFANHNYMIENVRPYSPSQIETLKIYENCVLSDSSIERPDDIQKIMNDLGNAKTIHIKQSDVLRYKMWLEQNYKSPYTGQIIPLSKLFTPAYEIEHIIPQSRYFDDSLSNKVICESEVNKAKDRMLAYEFISQKGGSIIKGNFGQDFKILDKKQYEDFVQHHYANNRTKMKKLLLDDIPEGFIQRQLNDSRYMSKKMLSILSCLVREEGEQETTSKHVIPTNGAITDRLKKEWGINDIWNQLVTPRFERLNDKTGTQAYGQWINKDGNRFFQTNIPLDLSVGFSKKRIDHRHHAMDAIIIACTNRDIVNYLNNIAALSNKEKERYDLKHKLCTKVKTDNNGNYIWQFKKPWETFTQDVSGVLDGIIVSFKQNLRIITKMSNYYTHYVDGKKVVDKQIKGDSWAIRKSMHEATVSGLISLQKCKQVKLSVALEQWQNIADKELRKEIANLIKLYHKFDKKLFIKYFKDRDNKLNGRDISNVRIYYYTGTCGKESVTATRVAIDESFDTKKIESISDSGIQKIMLAHLKKYNDEKGNSHPEVAFSPKGIVDMNQNIKELNGGKEHKPIYKVRKTKTLGMKFAIGEVGNKNQKFVETDKGTNLFFAIYVNEEGERSFESIPLNIAIERLKNHLKVAEEIKEDGRKLLFTLSPNDLVYLPDAKDGKNIYKMVSCYGNRVFFIPETWATPINNGYELGSLNKVEMSLEGINIKQECEKIEVDRLGRIIKTYK

SEQ ID NO: 4782 - protein, 1486 aa, synthetic construct
  REGION 1..1486: note = Synthetic
MKNILGLDLGTNSIGWALIDDEKKKIIKSGSRIIPMDAATLGAYEAGNMESATKARTGFRGTRRLYERAILRRERLLRVLNILNFLPNHYKVQIDFDNHPGKFINDSEPLLPYRKDLNGKNEFLFIDSFREMLSDFSTHQPQLVANGKKVPYDWTIYFLRKKALTKPIKREELAWIILNFNTKRGYYQLRGEENQTDTPKNEEYKLLEVTNVVQTDSDKKRSGVYWYEITYNNGAVQRKSGIVPPKRVGDKVEIIVTTTIDKKGNVVLKLRDPKPDDWTLMKKRTENAIQVSGKHVGEFIYDALLSQPNIKIKGKLIRVIERQYYRDELSAILKKQAEFIPELKDKFLYEQCIHELYRNNEAHIDSIKNKSFEDLFIDDIIFYQRPLKSKKSEISNCPYESYQYVNKETGEVIRKPIKCIPKSNPLYQEFRLWQFIQNLRIYERELKIDGKLKLDEDVTNEFIRNEGTIVELFEWLNQKKDINQEQLLKFKPFGLGKDISRYRWNYVEDKSYPCNETHYEITKRLGNVIGSPTLTPEQEQSLWHILYSVDDIIELRKALTSYSISNNLDTESFVDNFIKMEPFTNDYGAYSEKAIKKLLPLMRTGKYWEKSNIHQQTLERINNIIDGIADESIAHRVREKAINLQTLDDFKYLPLWLSCYIVYNRHSESSNLERWQSPEDIDRYLENNFKQHSLRNPIVESILGEMMRLARDIWKTYGKINEVHVEMGRDLKANAGERKKRYENIARNERTNLRIKLLLQEFIDPEYHIDDVRPQSPSQQEILKIFEEGALNSGENVPDDILLIADNLGNPGKHVSKQEILKYRLWLEQKYKSPYTGQPIPLSKLFTPSYEIEHIIPQSRYFDDSLSNKVICESEVNKLKDRMLGFEFISKHGGSIIEGNLGRQIKILDKIQYEDFVKQNYSGNRSKMRKLLMDEIPKSFILRQLNDSRYIARKTIEILSCLVREEGETEATSKNVIATNGNITDRLKKDWGLKDVWNSIIAPRFERLNEKTGTNSYGQMVNKDGNEYFQINVPLSISKGFSTKRIDHRHHALDAIVIACSTRSHVNYLNNESALSSEKDKRYDLQHKLCDKKRLDHQGNYIWQFKKPWGTFTQDARNEILSIIVSFKQNLRVINRMSNFFWHYEERKKILCKQIHGDGWAIRKSLHKATVSGAVRLQQIKKVRLVEALDDWHQIKDKEIRNAIKEVISLYKKFDKKTILKYFKDRKYLINGKDISRVEIYCLPKEPNLSASRVSLDESFDKKKIESITDSGIRKILLRHLEINHNDPKLAFSLDGIEEMNKNIKELNDGKYHQPIIKVRKSEAFGLKFPIGQRGRKSMKFVEADKGTNLFFAIYSDKEGNREFESIPLNVAVERLKNHLPIAPESLENGKRLLFTLSPNDLVYMPEKDENIGNITELNKLYKMVSATGNRSFYIPMAIAYPIEDTTELGPNNKAERDKNGNMIKSRCVKIEVNRLGIITKIHHGL

SEQ ID NO: 4783 - protein, 1483 aa, synthetic construct
  REGION 1..1483: note = Synthetic
MRNILGLDIGTNSIGWALIDGDNNRIIKVGSRIIPMDAATLGSFEAGNLQSQASVRTGFRGTRRLYERAELRRERLLRVLNVLGFLPEHFKNQIDFVEHLGQFKNHAEPLLAYRKNQEGKNEFIFHDSFCEMLADFSAHHPSLVSGGKKIPYDWTIYYLRKKALSKPIRREELAWIILNFNTKRGYYQLRGEENELETPVNEEYRVLEVRSVEPTGEDKKRHGIYWFDITYDNGAVQRKSGPVAPRKVGDKVELIVTTSTDKKGNVTAKLRDPKPDDWTLMKKRSENAILQSGKQVGEFIYDSMLSQPDTKVRGKLVRVIERDLYKKELEAILNKQREFIPELSNRKLYNECIRELYRSNVAHVQSIQDKDFTSLFVDDIIFYQRPLKSKKSEIADCPYEHYQYIDKSTGEHFYKPIKCISKSHPLYQEFRLWQFVQNLRIFQKEKDVDGKLKLNVDVTHVFLKTEAEIVELFDWLYEHKEISQEQLLKYKPFGIGKSLSNYRWNYVEDKSYPCNETHYYICKCLQKVEGTPVLDKQQELALWHILYSVDDIVELRKALGSFAEANQLEPTSFVESFIKMKPFPSDYGAYSEKAIKKLLALMRAGKYWDAQSIDANTCSRIANIIDGVADESIANRVREKSIRLHQTEDFRYLPLWLACYIVYNRHSESNDAQRWESPDDIDNYLRNIFKQHSLRNPIVEMVLREMLRVVRDIWKTYGKIAEVHVEMGRDMKANANERKRRSESISRSERTNQRIRLLLQEFANPEYAIEDVRPYSPSQQEILKIYEETALNNGEDVPDDILLIADNLGNSSKSVSKSDMQRYRLWLEQKYKSPYTGQTIPLSKLFTPSYEIEHVIPQSRYFDDSLSNKVICESEVNKLKDRMLGYEFILKEGGRIIDGNLGGQIKIFTKSQYEEFVKQNYAHNRPKMQKLLMEDIPDKFIERQLNDSRYIARKTIEILSKMVREENETEATSKNVIATNGSITDRLKKDWGLNDVWNDIVAPRFERLNRITGTNDYGQWVNQYGKRYFQANVPVGMAQGFSKKRIDHRHHAMDAIVIACATRDHVNYLNNKSALSSERETRYDLQHKLCEKVKTDAYGNYVWQFSKPWDGFTKDAKDQLLSVIVSFKQNLRVVTKMTNRYWHYVGGQKVLEQQQAADGWAIRKSLHKATVSGAVRLQQVKKVRLAEALKDWHHIKDKGVRKAIQQVLDMYGHYDEKTILRYFKDRKYLVDGKDISRVEVYYLPEKADLSATRVTLDIGFDKKKIEKVTDSGIRTILLRHLQEYNGDPKIAFTPDGIAEMNRNIRRLNNGHDHKPILKVRVAEAFGMKFPVGYTGNKAKKFVEADKGTNLFFAIYADADGNRTYRSIPFNEAVERMKNRMPVAPVEDENGNNLLFTLSPGDLVYIPEEGEHVDGIKDLSRIYKMVSSSGNQCFFIPASLAAPIVDTKELGANNKAEKAWTGRMIKQCCLKLSVDRLGTITKIY

SEQ ID NO: 4784 - protein, 1483 aa, synthetic construct
  REGION 1..1483: note = Synthetic
MSNILGLDLGTNSIGWAVVDNEQKTIVNAGSRIIPMDEATLGQYETGNLKSQASVRTDFRSIRRLYERAKLRRERLLRVLHVMGFLPEHFDNQIDFINHLGQFKSHSEPLLPYRKNADGRNEFIFNDSFREMVDEFNSIHSNDKFTGKRIPYDWTIYYLRHKALSMPIRREELAWIILQFNTKRGYYQLRGEEEETKTSKNETYEILTVKNVEKLNADSKRRGIFWYEITYNNGISQRKSGPVAPRKIGDQVELIVTTTLDKNGNVAKDKEGNPKIKLRDPKPDDWTLMKKRTERAISDSGTTVGDYIYNYLMNHPEAKIRGKQVRTIERKYYKDELKKILDKQAELIPELKDNSLLEKCVLELYRNNEAHVASLQGKTFTDFIVDDIIFYQRPLKSKKSLIANCPFEEYCWIDKSTGEIHHEPIKVIPKSHPLYQEFRIRQFLQNLKVIRKEKEIDGKLKTDVDVTCDYLKDDNDWQKLYNYLSSIPSIDNKKFCKYLGLSDNDYRWNYVTNDKSYPCAETHCLININGDLNKSQETELWHIMYSVSDPIELRKALTTFADKNGLDEHDFIESHIHIKPFDSDFGAFSEKALKKILPLMRRGIDWHEEDLPCQARERIHDIINGNVDEKIRKQIVKSGLVLNTIADFNNLPLWFAEYLVYGQKDDITVWNTPDDIDKYLQSEFRQHSLRNPIVETVLSETLRVVRDIWKAYGKPDEIHIEMGRDLKQPKDKRARATQRILENERTNLRIRQLLQEFAEDSDVENVRPNSPSQMELFKIFENDVLNQYDRVADPDNIMDIVDSLANPTKHVSHNDIVRYKCWLEQRYQSPYTGDIIPLSRLFTTDYEIEHVIPQSRYFDDSLNNKVICESGINKLKGNRLGYEFIFKEHGHIVDGHKVFEKEAYEQFVKDHYSNNPRKARILLLEDIPDSFIRRQLNDSRYIARQTTSILSAAVRSTDDKGHVAANDRGSVSVNIIATNGSITDRLKKEWGITQIWNHIIAPRFIRLNEKTHSEQFGKWVEKNGERYFQINIPLEISSGFSKKRIDHRHHAMDAIVIACTTRSHINYLNNSTAAASRKDERHDLRNKLCFKDKTDSNGNYSWRFIKPWTTFTEDTKAALDSIIVSFKQNLRVINKTSNFYWHYENGKKVLKKQTKGDGWALRKSLHKATVSGAVRLQSQKTVRLKDALANWHLIVDKTIRAGIKHVIKDIYHGKIDQKTLLKYFKDRDYKLDGKDISKLNIWFTPAVPEATASRTKLNETFDKKNIEKITDSGIRKILLRHLENCGGNPKVAFSPDGIAMMNDNIKSLNNGKDHKPILSVRKYDAIGNKFRIGEYGSKSKGYVVADKGTNIFFAIYNSNKGIRTYESIPYNVEVERQKQGLPIAPEENSKGDKLLFVLSPGDLVYMPNENEHVDKNLDKGRIWKFVSTSLGRAQFVPERLAVPIADNMEYAKNKTEFDDYHRSIKAFCRKIIVDRLGRITKIE

SEQ ID NO: 4785 - protein, 1479 aa, synthetic construct
  REGION 1..1479: note = Synthetic
MRHILGLDLGTNSIGWALIDQEENKIIHAGSRIIPMDAGMIKDYGAGNLQSPASNRTNFRGTRRLYERAVLRRERLLRVLNVLHFLPNHFAKAINFTDHPGQFIDHQEPLLPYRKDNNGHNEFIFKDSFYEMLEDFGEKHPDMIANGKKIPYDWTLYYLRKKALSHAIRREELAWIILNFNTKRGYYQLRGEEEETATSKNEEYKVLKVTEVTQMDEDKKHKGNFWYEIRYENGATQRKLSARPPHQIGDKIELIVTTNFDKNGNIATDKEGNAKIKLRAPKEDDWTLMKKRTEHELDESNKTVGAFIYDSLLTDPTLKVRGKLVRTIERAYYKKELIAILNKQKEFIPELQDHAIYMDCVRELYRSNEAHVKSVEDKDICDFIINDIIFYQRPLKSKKGEIANCPHEYYHYIDKDTGEIVPKPIKVIAKSNPLYQEFRLWQFLQNLKIIQREKIIDGRLRTDVDVTAEYLNSAEKRENLFQIINQRKDINQTVILKALHLSSDQYRWNYVEDKSLPGNETHMLINPDNLLNTQQEYELWHILYSVDDLLVLRKALTTFAKKNNLDEQAFVENHIHTKPFDSDYGAFSEKAIRKLLALMRTGKYYDAAAIDSNTQCRIQNIIEGKADANIYKQAHKAGIDLKDKNAYQFLPLWLAEYVIYDKKEDFLVWKKPEEIDKYLKFNFKQGTLRNPIVEMVLGETLRVVRDIWAKYGKIDEVHVEMGRDLKQPSDKRKKDQKRMAENERTNHRIRTLLQEFAADDCKINNVRPNSPSQLEILKIFEDGILHDETIEIDDDIQHIINDLGDTSTHVSHKDVIKYRLWLEQQYRSPYTGDVIRLTDLFTPAYEIEHIIPQSRYFDDSLSNKVVCESAINKLKSNQLGYEFILKEHGHIEDGHKVFDKVQYEEFVKKHYANNKGKMRKLLMEDIPDAFIQRQLNDSRYIARKTIEMLSPLVRITTEDGKIADNDKGPVSINVIATNGAITDRLKKDWGINQIWNDIIAPRFERLNQMTQSENYGQWVNKDGKNYFQINIPLSLRGFSKKRIDHRHHAMDAIVIACATRDHVNYLSNAAACSNQADLRYDLQHKLCSKEKTDDKGNYVWRFIKPWETFTQDTRQTLMNIVVSFKQNLRVINKMTNFYDHFENGKRVKVKQENGDGWAIRKSLHKATVSGAVRIQRKKKVKLADALDHLNLIVDKEVKKDIKGVIAQYHKFDQKTILKYYKDRKYLIGKKDIKQVEIWDTPEKADYSAVRVNLDSSFTKEKIASITDTGIQKILLAHLANCNDKANEAFSAEGIAAMNKNIKALNGGKDHKPILKVRKMESFGLKYPISETGNKSKKYVEADKGTNLFYAVYENENGERIFESIPLITAIERMKQNETVSPYQDENGNKLLFVLSPGDLVYVADEGEHVHDIKDCSKIYKMVSSSTNRSFYVPHSFATPIVDKLELGSLNKIEKIQDGPAIKNICYKLKVDRLGNVELI

SEQ ID NO: 4786 - protein, 1485 aa, synthetic construct
  REGION 1..1485: note = Synthetic
MKNILGLDLGTNSIGWALIDSESHRIIKAGSRIIPMDARTQGEFEAGTLQSQASVRTGFRGTRRLYERAELRRERLLRVLNILGFLPSHFSEQIDFIVHPGKFKNNAEPLLPYRKAVNGKNDFIFKDSFNEMLADFAKTQPVLVSEGKKVPYDWTIYYLRKKALTHPIRREELAWILLNFNTKRGYYQLRGEEDELATPQNEEYKVLEVKEVKQTDEDKKRRGVFWYEITYENGAVQRKSGSVAPRKVGDKVELIVTTNIDKKGNESLKLRDPKPDDWTLMKKRSENAIQTSGKQVGEFIYDMLLAQPDVKIRGKLVRVIERDLYKKELIAILDKQKEYIPELTNPDIYNKCIRELYQNNEAHVDSIIDRDFTDFFVNDIIFYQRPLKSKKSEIADCPLESYHFVDKESGEVIKKAIKCISKSHPLYQEFRLWQFVQNLRLYQREKVVNGKLKMDVDVTSEFIKTEEDVCQLFDWLNERDAVNQDQFLKYKPFGIGKDTARYRWNYVEDKVYPCNETHHAILKCLAKVDGHPQLDGSQELALWHILYSVDDVIELRKALTSFADQNNLDVNSFVEGFSKMKPFPSDYGAYSEKAIKKLLPLMRTGIYWNAEAINPKTLERIDNLIEGVVDDNISNRVREKAIHLQQLEDFKYLPLWLTTYIVYGRHSESSEIARWEKPEDIDDYLRNVFKQHSLRNPVVETVIGEMLRVVRDIWKTYGKISEVHVEMGRDMKANANERKKRSENISRNERTNQRIRLLLQEFANPEYGIEDVRPQSPSQQEILKIYEENALNGNEDIPDDILLIADNLGNPTKHVSKSDMQRYRLWLEQKYKSPYTGRPISLSKLFSPAYEIEHVIPQSRYFDDSLSNKVICESEVNKLKDRMLGYEFIVKEGGRIIDGNLGGQMKIFTKEQYEEFVRQHYGNNRTKMRKLLMEDIPDGFIERQLNDSRYIARKTIEILSNMVREENETEATSKNVITTNGTITDRLKKDWGLYDVWNDIVAPRFERLNQLTGSNDYGRWVNQGGKQYFQINVPLAIAQGFSKKRIDHRHHAMDAIVIACATRDHVNYLNNKSALSSEKETRYDLQHKLCIKVKTDANGNYAWQFKKPWDTFTQDSRTALQSIIVSFKQNLRVITRMTNHYWHYADGKKVMEKQKGGDGWAIRKSLHKATVSGAVRLQQVKKVRLAEALKDWHQIKDKDTRRAIKDVIALYNGFDEKTILRYFKDRKYMANGKDISKVEVYYLPQEADLSATRTTLDISFDLKRIDKITDSGIKAILLRHLENNGNDPKIAFTPEGIETMNRNIKVLNNGKDHKPIFKVRLAESLGLKFAVGQTGNKKKKFVEADKGTNLFFAVYEDTEGTRDFRTIPFNEAVERMKNRLPVAEAETEEGKKLLFILSPNDLVYIPEEGEHVDEITDLSRIYKMVSSTGKDCHFIPQAIAYPIVQTTELGANNKAERTWEGITIKKACKKLNVNRLGIITKIHNR

SEQ ID NO: 4787 - protein, 1496 aa, synthetic construct
  REGION 1..1496: note = Synthetic
MKKILGLDLGTNSIGWALIEADGHKIIKAGSRIIPMDAATIGDYEKGNLKSAASERTGFRGTRRLYERAILRRERLLRVLNTMGFLPDSFARQIDFVEHPGKFKNHGEPLLAYCKNEQGKNEFLFKNAFQEMLTDFKQHHPKLVSNGKLIPYDWTIYYLRKKALTQAITKEELAWIILNFNTKRGYYQLRGMEDNETTNTENTKLEEYKILKVVSVENIGINNKKKGYNWYQITYDNGASQKASSPVPPQQIGNLVEVVVTSTLDKDGNVKKDKEGTPMIKLRTPKEEDWTLVKKRTEKNLSDSHQTVGNYIYEHILSNPSIKVRGKLIHTIERSFYKEELKLILAKQKEFIPELNDIQLYKKCIHELYHHNEAHVESLMSGDFTDLFINDIIFYQRPLKSKKSLIADCPLESYFYRDKKDDTIKSCSIKCIPKSHPLYEEFRLWQFIANLRIYKRKSEVNGMLVTDYDVTSEYFKDFQSYSSLYDWLQGKKEIKQEQLLKYKPFGIGKNSGEYRWNYVEDKIYPCCPTRYEINKRLLSLNTKELDEDSYLHLWHILYSVDDPIMCQKALRKFAIAHKYPTEEFVNTFKQCSVGSKDYGSFSEKAIKRLLPLMRMGKYWNEDDIDSKTRSRINNILDGVVDANISDRVREKTTHMQAITDFQGLPLWMASYIVYNRHSEASEIIKWEKPEDIDIYLHTHLKLHSLRNPIVEKVITETLKVVRDIWKNYGTIDEVHVEMGRELKKDAKSRSQDVLRMAENERTNLRIRALLQEFVNPDYHIDNVRPYSPSQHETLKIFENGILSDPTLEIEDDIKNIIDSLGNTKTVHVKSSDIMKYKMWLEQKYKSPYTGQIIPLSKLFTPAYEIEHVIPQSRYFDDSLTNKVICESEVNKEKDRMLAYEFISKKGGSIIKGNFGKDIKILDKKQYEDFVQQHYANNRTKMKKLLMDDIPDGFIQRQLNDSRYMSRKMLSILSCLVREDGEQEAISKHVIPTNGAITDRLKKEWGINNVWNQLIAPRFERLNSISGTQDYGQWVNKNGKKIFQINVPLELSAGFSKKRIDHRHHAMDAIIIACSSRELVNYLNNVAALSSKTKERVDLKHKLCTKVKTDDKGNYIWQFNKPWDSFTQDVASELGSIIVSFKQNLRIITKMSNYYTHYVDGKKVLDKQTKGDSWAIRKSMHKATVSGLISLQQKKLVKLSDAISQWEQIADKDLRNEIVSLIKQYHQFDKKTLVKYFKDRGNKLNGRDISKVHIFHYSGIKDGIAATRVSIDETFDTKKIESISDSGIKKIMLAHLKKYDDEKGSSHPEIAFSPKGIASMNQNIKDLNDGKDHKPIYKVRKTETLGMKFNIGEVGNKTKKYVEADKGTNLFFAVYINEQEERSYESIPLNIAIERMKNHLKVAEEIKEDGRRLLFILSPNDLVYLPDSESRNSIYKMVSCTGNRVFFIPETWATVINNGYELGSLNKIEMSLEELNIKQRCEKIEVDRLGRIIKTYK

SEQ ID NO: 4788 - protein, 1494 aa, synthetic construct
  REGION 1..1494: note = Synthetic
MKRILGLDLGANSIGWAVIDNEEKKIINAGSRIIPMDAAALGDFEKGTLQSQASVRTGYRSTRRLYQRATLRRERLLRVLNILGFLPEHFREQIDFTEHPGQFKSHGEPLLPYRLNSLTNKREFIFMDSFNEMLDDFKTHQPQLVADNKKVPYDWTIYYLRKKALSQPISKEELAWIILNFNTKRGYYQLRGEEDILTTQKNEEYKVLKVISVDETGEDKKRPGYKWYDVTYENGAIQHKASPIPPRKPGDIVELIVSTELDKDGNVRLTKDGKPKISLRDPKEDDWTLMKKRTESILNNRQGTVGSYIYDAILQNPKVKVRGKLIHTIERNYYRDELRQILSAQSKFIPELKDNSLYMQCVNDLYPQNETKRNMLAKKGMSDLIIDDIIFYQRPLKSKKSEIADCPFEYDVFQDPQTHEWKHQYKKCMPKSNPYFQEFRLWQFIKNLHIFERQREENGRLLTDVDVTNSILKTEEDITDLFDWLNQRKDVNEDQLLKAPVIGLGKRYTNYRWNYVETKSYPCNETHYEISHSMSNVKGKPKLTFSQEMDLWHILYSVKDLTELNKALTHFAQKNGIDEDSFVDAFIHFKPFEKDYGAYSEKAVKKLLALMRCGKYWDENSIDSKTHIRIEHIITGEEDNSISTRVREKCATFQNIRQFQGLTLSLACYVVYNRHSEVDDMSVWESPDDINKYLREFHRKGLKNPVVESVLSEALRLTRDIWIQYGKIDEVHIEMARDLKQNNKQRKKATDSMLKNQSTNLRIRLLLQEFASNEYKVENVRPHSPSQQELLKIYEEYALNDNNEIPVDIKLIIDNLGNPSKHVSSNEIMRYRLWLEQRYLSPYTGQPIPLSKLFTTDYQIEHVIPRARYYDDSLSNKVICESEVNKDKDRMLGYEYILKNGGKIITGSGGQLFKILDHVQYEDFVKKHYANNRGKMKKLLMEDIPDSFIQRQLNDSRYIARKALEIFSHLVREQGEDAAVSKHVIATNGNITDRLKKDWGINDVWNDIVAPRFERMNRITGTQDYGGWVNRDGKRFFQTNVPLNIAKGFNKKRIDHRHHAMDALVIACATRDHVNLLNNQAALSGETNRFDLQHKLCEKVWTDDRDNYSWRFVKPWESFTADVKDCLSNIIVSFKNNIRIITKTSNHYWHYENGVKVLAKQRGGNDWAIRQPLHKETVSGSIRLQKKYSVKLADALENINYICDKQIRHSIKEVLKLYHGKADLKTLVKYFKDRNYIIEGKNIKKVDVWKLTPEGALSATRVTLTDKFTRKDINAITDTGIQKILLRHLDNYKEGDKDHPELAFSPEGISYMNSHLRELNNGKDHQPILKVRKYERLGEKFNVGTLGNKDKKFVEAAKGTNLFFAVYKNSEGKRSYSTIPLNVVVEQMKNGLGAAPNVNAEGDKLLFTLSPGDLVYMPEEGEHISVDKLDRNKIYKFVSTSQGRACFIPYNVAIPIYDGHEYGSHNKIELDDDKRSIKGYCIKLKVDRIGNVTL

SEQ ID NO: 4789 - protein, 1493 aa, synthetic construct
  REGION 1..1493: note = Synthetic
MSKILGLDLGTNSIGWCLVDDTDKKIIKAGSRIIPMDAAAMSDYERGNLQSQASVRTGFRGTRRLYQRAELRRERLLRVLHVLGWLPKHFDERIDWVEHPGQFKDKGEPLLPYRKGSDGKNDFIFNDSFQEMLDDFNEHHPELLTNGRRVPYDWTIYYLRDKALRQPIRRDELAWILLNFNTKRGYYQLRGKDEFVTEDEPKDKREEYARLRVKEVNFLEPDQKKKGYNWYNIVYEGDITQRAHSINEPHSVGDEVELIITTKLDKKGGVKLSKEGLPMITVRSPKEDDWQLMKKRSENAITKSGFTVGSYIYKAILADPAIKVRGKLVRVIERDFYRKELIAILSKQMEFIPELASKDAMAKCVAELYHNNEAHVASLADKTLASLFVDDIIFYQRPLKSKKSEIANCPLEHYHYINRDTGEIVEKPIKCIPKSHPLFQEFRLWQFVRNVSILQREKYINGKLRTDVDVTGDFITSPEDMAWLFGELNELGSIRQKSFLGLFGLKPDQYRWNYPEDKELPCNETHHDIVAALHKTAGEPTLTYEQELKLWHILYSVDDIIELRKALARFAGAAGIDTVSFVDSFLHFKSYESDFGAYSERAISRLLPLMRVGKYWSADRIDAKTRQRIDKLITGIDDETIAKQVRENAIALTSVEDFQGLPLWLASYVVYNRHSEAIDTTVWKSPKDIDYYLKFNFRNHALRNPIVEKILGEMLRVVRDIWDAFGKIDEVHVEMGRDLKSPAKKRAAESLRMADNERTNMRIRVLLQEFVNPEYNISNVRPMSPSQHEILKIYEDYALTNGEEVPDDIETIKDAIGNTSKPVAKSDIMRYRLWLEQRYRSPYTGDIIPLSKLFTPAYEIEHVIPQARYFDNSLSNKVICESEVNKLKDCMLGYEFILNKGGSVIKGSFGKEIHIFTKTEYEEFVRENYRKNPIKMRKLLSEDIPKSFIQRQMNDTRYIARKTIELLSHLVREEGEKEATSKNVIVTSGSITDRLKKEWGLNDVWNDIVAPRFERLNTITGSSDFGEWVNMDGKRFFRTNVPLAISLGFSKKRIDHRHHAMDAMVIACTTRNHVNYLNNSSAAEKNEDHRFDLRNKLCYKDKALGSNNYTWRFVKPWDNFTADAKRELQSIIVSFKQNLRVVTRTTNSYWHYENGRKVLAKQKDGDGWAVRKSLHKATVFGAIRLQEKKKVRLADALLVPNLICDEEVRKVVSRTIGMYKRFDQKAILKYIKDNFANKVNGQDIRKVEIWHIPEQPTMSATRVPLDDSFDKKKIESVSDSGIRKILLAHLGNYNGDSKAAFSPEGIAAMNRDIKVLNGGMDHKPILKVRKTETLGEKFPVGYVGSKSTKFVEADKGTNLFFAIYINEEGKRSFESIPFRVAVERRKEGLPVAPERNGKNEKLLFVLSPNDLVYVPEEGEHVDSHLNLKRIYKMVSCSGNHCCFVPERVAFPILAGKEFGSLNKVEIALSGENIKVVCKKIIVNRLGLIKKIEQ

SEQ ID NO: 4790 - protein, 1502 aa, synthetic construct
  REGION 1..1502: note = Synthetic
MNKKIIGLDLGTNSIGWALVEKDTEQNDGKIVDAGSRIIPMSQDAISKYGTGNLQSAASVRTGFRGMRRLYERAELRRSRLLRVLNIMGFLPKHFSDAIDFTDHLGQFKDQGEPLLPYEKNEKCKNEFIFKDAFHEMLEDMHTHHPELVADGKKLPYDWTIYYLRKKALSHPISKEELAWIILNFNTKRGYYQMRGKEEETATNDNQVYDVLEVSGVEETGPNNKKKGYNWYLIHFTNGKKQIRTWKDAPCHVGDKIECIITYQVKKDGTPKLDENREQLYKITAPDPNDWTLRKKRTESIINHDHVTVGEYIYDHLMAHPEDKIRGKFVHTIERKYYKDELRIILDMQKEYIPELRDKNLLTQCINELYHHNEAHRKSLQGQDFTRLFVDDIIFYQRPLKSKKSLVADCPLEFYPYRDKNGVWKHRPIKCTPRSNPFFQEFRLWQFIQNLRIFHREEERDGRLLLDVDVTDQFLSSSEDYCALFDWLKEKGDITQKQLLAYPAFQLGKKAKSYRWNYVDDDKHAYPLCTTHHDICQALKNVEEAPTLSAIQEENLWHILDSVDDRYELEKALCHFAEKQKLDKESFVNAFIKFKPFDNNYASYSEKAIKKMLPLMRIGRYWKADNIDTHTLQRINHLITGEADERISNSVREKCSGLERLEQYQFLPVWKVCYVVYNRHSEATDTGHWSSPEDIDNYLKSELQQGSLRNPVVESVLAESLRVVRDVWKQYGKPNEVHIEMGRDLKQNKAQRQKTNSAMLANQQTNLRIRFMLQEFADPEFHIDNVRPQSPSQQEILKIYEQGVLDSTNNIPDDIQTIIDHIGDKNKGASKNDLLRYKLWLEQKYLSPYTGQPISLSRLFTSEYEIEHVIPQARYFDDSMSNKVICETEINRDKGSMLAYEFIKSRGGMIVKGTGGRQYKILDTVQYEEFVKSHYSSNKRKMRNLLLDDVPDSFISKQLNDSRYMARRALDIFSHLVREEQNDEGAVSKNVVACNGAITDRLKKDWGLNDVWNDIVAPRFERMNSITQSNSYGQWVNKDGKRYFQINIPLAISKGFSKKRIDHRHHAMDAIVIACANRSIVNYLNNASGADMEVRHDLRNAVCFKDKNVDGCGNYQWTIRKPWCTFTLDAHNTLNHIVVSFKQNNRIITQTVNRYWHYRDGKKVMDRQVKGDHWAIRKSLHKATVSGALYIPEKKMVSLKVALGDLNAICDAKAKKEIRHIINDVYQGHADNATLLKYFRARKYQINGINFNKLEVRMVPVKPNYSASRVLLDSTFTEKDIEKVTDTGIQAILKHHLEHYVDDKGKHDCAAAFSPEGLAEMNEHLTELNGGKPHKPIFKVRKKETFGLKFNVGNVGSKNKKFVEADKGTNLFYAVYADNEGKRSFESIPLNMVIERKKNKMEIAPAANAKGEKLLFVLSPGDLVYLPQEGEHVSLPLDGRRIYKMVSCSEGRSYFIPYSAASVICDKAEYGPNNKMERSLEGDMVKTTCVKLKVDRLGHVSV

SEQ ID NO: 4791 - protein, 1120 aa, synthetic construct
  REGION 1..1120: note = Synthetic
MAVYRIGLDVGTNSIGWSVLELNGAGEPCTVTAAGVRIFSDGRADKSKATLKADRRKARSARRRRDRFKQRQTFLLDVLKRVGLFPKDESKRKALQLLNPLELRTKALSEKLEPYHMGRALFHLNQRRGFKSNRKDRSEETTSGKVSNSVRMLLEQMHLIDPPMPAEEYKGLSKTDKKQVRQEEAENRNLALKNLAMQSKLTYGSFLWQRQQEGKQTRARPGAGDNGKLYDVYPTRELYEDEFKKIWNAQTKHHPALMTDEVRERIRHIIFTQRPLKPQQRGQCQFLPEEKRTFRAMPSFQRYRIYQEINNLDWIGSSGKCFLKDYPAARDAIIGITERPTLKEKPTAQNAQVSFHKMKKLLKQMDLAEGNFAFNFETPKRNGLDGNQTSNIMQHEDYVGEAWHDWTLEQQDDFIALILDDTKTDEDVRCELINRYKLSEHAATSCMNAPLIEGMASLSLKAAGLLLQKMRDGYHIQSDAIIAVAKEVEKFVNPFIRAGKGEMLSELPYYGEAFSDGRHIIPGDRQEADRHDDLKYYGGVTNPTVHIALNQIRHVVNELIHRYGHPKSIAIELARDLPAGKEGRAAINKEQADNQEKNEKLDEILRDLGQTINSGNRLRLRLWQELDENDPNGRCCPFTGKKICKADLFGDSIEIEHLIPFSISLDDSRANKVLCTRQANRDKGNRAPFDAFGNSPDGYSWGDILERAKQLPKPKQWRFQEDALKIWKRDYSDFTERHLNDTRYIGRLAKEYLENICLFNKIDVLTGRLTALLRGYWGLNGILGDHNQAQETKKNRNDHRHHAVDAIVIGMTSRSMLQKVATAANRAEELHLDRLFERSANGKNPIDPWPGFRNHVKEIVNKILVSYKPKRKTLGKNTTDGQLHNDTAYGIISGPDKQGRYNVVVRCPIQEFKKRQHVEAVRDTQLRAEFLQAFDAEGPTGVARLAGDKKIRRLRRTETLSVIPIRDKFGKGYKAYKGDSNWGMEIYEYPKGHKKASQWQGVVISRYEANQDSFRLGYTQKPHPAARLVMRLQIDDCVEIEQGGLKQIMRVQKLSRNGSLDLAPHNEANVDARNRDNDDPFKYLNITASKLKESNGRKVHVSPAGRVSYEQRRKPRRKNE

SEQ ID NO: 4792 - protein, 1110 aa, synthetic construct
  REGION 1..1110: note = Synthetic
MSEKYRLGLDVGTNSLGWAVIGLKEDVPSSVLATGVRIFSEGRDAKTKSTLKASRTEKRSARRRRDRFLQRQTFLISEMVKSGLFPKDIVEQKNLELLDPYEIRFKALTEQVPLHHLGRALFHINQRRGFKSSRKDKSEETTSGVVSKSVRALYEEMQLINPAPVIDDPKALSKEERREIRVQEASSREEALVTLAEQKGVTFGAFLYRRLQSGKSVRARKDADSQLYDVYPTRELLKDEYSKLMQHQAQYYPNVINEALISRLHDVIFFQRKLKEQERGFCTYYPSERRTFRCMPSFQQYRMVQELNALEWVDAAGKHCLRDYPESRDLILSELENISTKAGEFTFGNMKKILKKMGVIDGEVSFNFEGPKRKGFQGNVTSREMRHEDCFGTRWDELSLDEKDDIIDKINDDHLDDEDMERYLIDTYGLSSFSVGNAINARLLEGTANVSRKAARTLYETMLSANCLQSDAVIAVSEQDDTFVNPYSRTGRGELLSELPYYGEAFQDGRHIIPGKREPKVSHDQLKFYGGVSNPTVHIALNQIRLVVNEIIKRYGLPSSISIELARNLPEGQDGRRKIEKMQSENQKNNERYDQILTENGQSPNRDNRLRLALWEELGEGPTDRLCVFTGKLIELADLFNGSVEIEHLIPFSVSLDDSKANKTVCWKEANRFKGNKTPYEAFANNSGDYSWEEIMERVRALPNSKQWRFQEDALKIWNSDHSDFSGRHLNDTRYISRLAREYLENICPFNKIDVVTGRLTALLRGHWGLNNILRGHNEPETATPKKMRDDHRHHAIDAVVIAMTSLTILQKVSSAAGKAEELDVGKLFAKDESGRSVIDPWDGFRDEVAEKVRNIIVSHKTKRKTIGNSGKSTDRALHNETAYGLIDGPDEKGLYSVVTTKPISYFDNRDKIEKIRDEKLRDDFLTAWDGEGDNKASQLAVLDKASGLNVKKCRYVERKKVIPINGPDGQPYKAYDGNSNWGMEIYEFPNGHPKEKKWNGVVISTYDANKSEFKPGETFRPHPAAKLVMRLHINDIVEVQNDGEPILYRVQLISAGTLTVSPLHEANVDSRNRDKHDEFKYKSLSVTPMQKMGAKKVNISPTGLKNYSR

SEQ ID NO: 4793 - protein, 1104 aa, synthetic construct
  REGION 1..1104: note = Synthetic
MAAYRMGLDVGTNSLGWSVLELNEAGEPCAVTDTGVRIFNDGRVDKSKATLKANRRVARSARRRHDRYKQRRTFLLDELIKAGLFPKNPEERHKLQTRDPLKLRAKALTEKLEPHEIGRALFHLNQRRGFKSNRKDRSKETTSGMVSNSVTALLQAMGLMEKGYSTEAFNGLSKEDKKFAREQERQQKKEALKKLGKQDTLTFGLFLWKRREKGKPTRARQNSNSKIYDAYPTRDMLEHEFEVIWRAQAKYAPELLTKQKRERIRTVIFTQRPLKPQKIGKCAYLPSEDRTFQAMPSFQRYRIYQEVNNLEWTASQGKNRLIDHPEARNAIVDMLEHPTNKRGNVPFNKMKKVLKNKGLVNGDFQFNFETSKRTGFDGNHTSNLMQDERCVGPEWHNWSLEKQDQFISVILNDELDDQKVHDILMQNYDLSDMAATECTEAPLKDGTASLSGKAALLILAKMRDDRLIQSDAVMAVAKEEANFVNPFKRAGNDTLLDRLPYYGVAVQGHIIPGNGDERDEQTRIGMVTNPTVHIALNQIRHVVNELIDHYGHPASIAIELGRELPAGQKGRAEITKEQRENQDNNQRLDGILHENRQTATPDNRLRLRLWEELDGDPNGRRCPFSGQKIGISDLFNGQTEIEHLIPFSASLDDSRANKVLCTRQANRDKGNRTPFDAFGNSPDGYPWNEILERSKQLPKRKQWRFQKDALEIWKRDYSDFTERHLNDTRYIGRLAKEYLENICPFNKIDVLTGRLTALLRGHWGLNNILQNREEEAKKNRDDHRHHAVDAIVIGMTSRAMLQKVSTAANRAEELNLPRLFEKKSNGKSTIDPWPGFRDHVKTAVDNIVVSHKPKRKSLNKNSTDGQLHNDTAYGIISGPDRNGTSEVVVRKPIKDFKNRPDVEAIRDKQLRHEFLEAFDADGTVGVTRLAGDKKIGRLRQTETLSVIPIRDKFGKAYKAYKGDSNWGMEIYEYPNGHQKAGSWDGKVISRYEANQKDFRLGQTQKPHPAARLVMRVQINDCVEIEQDGVKQIMRVQKLSKNGGLDLAPHNEANVDARNRDNNDPFRYLNTAASKLKKLNARKVHISPAGRTSYEQRRKPQQKNE

SEQ ID NO: 4794 - protein, 707 aa, synthetic construct
  REGION 1..707: note = Synthetic
MKAVSGQFVSVIMNDELDDQNVHDDLMRNYGLSDAAATACVEAPLKDGTASLSSKAARLLLAKMRDDKLVQTDAVQTVAKEETDFVNPFKRAGAGTLLDRLPYYGMAVQGHIILGKGDEKDEQARIGMVANPTVHIALNQIRHVVNELIARYGHPASIAIELGRELPAGQEGRAEINKEQKANQDNNERLDKILHEQVQASTPDNRLRLRLWEELDGDPNGRCCPFSGQKIGIADLFNGQAEIEHLIPFSKSLDDSRANKVICTRQANRDKGNQTPYQAFGFSPDGYNWDKIFERRTKLPQSKQWRFQKDALEIWYRKHADFTERHLNDTRYIGRLAREYLENICPFNKIDVLTGRLTALLRGHWGLNSVLGDHNQTQGTKKNRNDHRHHAVDAIVIGMTSRSMLQKVAAAANRAEKLHLGRLFERSANGKNPIDPWSGFRNHVKEIVNKIVVSHKPKRKTLGKNTTDGQLHNDTAYGIISGPDNQGCYRVVVRCPIKEFEKRSDVEAIRDKHLQHEFLQAFDAERTAGVARLARDKKIRRLRRTETLSVIPIRDKFGRTYKAYKGDSNWGMEIYEYPKGHEKAGKWRGEVISRYEANQEGFRTGQTQKPHPAARLVMRVQKEDCVEIEQNGIKQIMLVHKLSKPGRLDLAPHNEANVAARHRDKNDPFKYLNIPASGLKSSNARKVHISPAGRLSYENRRNPRRKQ

SEQ ID NO: 4795 - protein, 1169 aa, synthetic construct
  REGION 1..1169: note = Synthetic
MNWNELRMDKKKYRLGLDVGTNSLGWSVLELDSDSQPRAIVAAGSRIFAEGREAKTKATLAATRREARSARRRRDRFKQRQTFLLSELVNAGLFPEAPGDRQELQKRNPLQLRSDALKRQLQPWEVGRALFHLNQRRGFKSNRKDQSEETKNGVVSRSARLLLEEMGLIGPELDNEEYKKLSPAEKKRIRGDEARTRKEALEKLNERKDLSYGSFLYQRQLRGERTRARPGAARDDKLYDVYPTRELYEDEFQKIWQSQAAFHPELMTVAAKERIHRAIFHQRPLKPQKRGICAYMQDEHRTFRALPSFQRYRIHQEVNSLEWWYLGEIKKVRDYPEARDEIVHLLENVSTANGQVTFGIMKNVLKRLRIAEGVFKFNFETEKRKGFDGNSTSKLMSHEDRIGPTWHDWPLEKQDEFIDTILNGTPQHQERDRNRLAGIEPTSSPDGAKDDVEVRAYLCERFKLPEHIADNCVNSRLKDDTASISLRAATLMLAKMRDGLIDAETGEVFLPLQSEAASAVAREEQNFVDPFRSKGDDGKYRLLEKLPYYGEAFRDGRHIIPGTGNPEDDDKTRWGGVTNPTVHIALNQIRLVVNELIERFGRPESIAIELGRNLPLGAQKRREIEKEQSDNQARNESFDKKLRELGQKPNAENRLRLFLWHELSDDPNGRCCPFSGQTIGIADLFGGNVEIEHLIPFSRSLDDSRANKIVCTRDANRFKGNRTPFEAFGDSPAGYDWSEIAARAEALPSSKGWRFKPDAWEIWRQGADGDFTNRHLNDTRYIGRLTREYLETICHVDRIDIVTGRLTSLLRRHWGLNSVLDDGSDRKNRDDHRHHAVDAIVVGMTSQPLLQTVAAKAKELESCEIDPASNLNRFFAPVDGHRNAIDPWSGFRNDVAEVVSRIVVSHKVRRKSLYQRTTDGQLHNDTAYGLVLNEDGLWTGEVVSRKPIADFKKLKDIKSIRDSRLKEIFKARFEAAEKNDPGSGPKAVQDLAKKKKLNIQRLRHIEKLSVIKITDRFDNAYKAYKGDSNWGIEIFSWPTGQKKAGKWEGVMVSRFDAHQNRFKPGETFRPHPAARLIMRLRINDCVEMLVAKEREERRIYRLQKVSKGRMTFAEVHEANVDSRNRDKEEQFNYTTIATGSLQSRKARKVHISPTGLVSFEQRHPTRQTG

SEQ ID NO: 4796 - protein, 1123 aa, synthetic construct
  REGION 1..1123: note = Synthetic
MDYRLGLDVGTNSLGWAVLELDENGEPCAIADAGSRIFNDGRNAKSKATLAATRQEKRSARRRRDRFKQRQTFLLSELTKAGLFPEDESEREALKGLDPLELRASALTEPLAPHEIGRAFFHINQRRGFKSNRKDTSEETTSGKVADSIHKLLADMELMEQKLSKEEYKELSKEEKKEVRGQIILGKKQALEYLQKNDLLTFGSFLWQRRRNKQPTRARTGNDKLYEFYPTRELLEDEFHKIWRAQARHHPNLLTEEAKERIHHAIFSQRPLKSQEIGLCTYMSMSGQKRAHRALPGFQRYRIYSEVNNLNWRTSQGLSEVKAYPEARDAIVEMLERVSTRNGQVSFNKIKNVLKQQGLAEGNIELNLESDKRKGLDGNATSRLMQQEDCVGEQWHEWPPDQQDAFVTLLLSDKEDEEVLAVMQSEYGLDDVDAQTCLEASSRLPEGTGNLSLKAAQLLEEKMRDDCLIQPDAVCAVAKDREEQGDFRNPLNRTAGSEELLDELPYYGEAFQETGHIIPGDNKLQEYESHGDKRKYYGGVSNVTVHIALNQIRALVNELIRRYGRPASIAIEMARELPMGVEKKREEEKRQRENQEQNERFDRILREHGRSPNRENRLRLRLWEELDEDPSGRMCPFSGSRIGIADLFNGNTEIEHLLPFSRSLDDSRANKVLCTRQANRDKGQQGPYEAFHNRAGYNWGEIIERAQRLPKAKQWRFYEDAWNKYDEQEGFLKRHLNDTAYIGRLAKEYLENICLFNKINVLTGSHTALLRRYWGLNSLLRDSNQPEQQKKNRDDHRHHALDAMVVAMTTFSMLQKMSKESSRAEEVDLEHLFPKDHNGRSPIDPWDGFRSDAKKRLDRVVVSHRVRRKRAVLAESGKSVSNRTTGQLHNETAYGIISGPDKTGKYKVVSRWPIDKLKKKDHLKNIRDPYQNKRFLEVWERAEEAGKKGKDAIKQFAVKEGIRSLRCTKSLSGVVVKNRQGKAYKFLEGDSNWAAEIYEYPPGHSKAGKWYGEVITTHEANQPGFRPGQTYRPHPGARLVMRLQINDCVRLDDQIMRLQKISKGFRLVFVPALEANVDARHNDPQDDFSFKETGIRRLQDQQAQKVHISPSGRINSEVRLRKP

SEQ ID NO: 4797 - protein, 1109 aa, synthetic construct
  REGION 1..1109: note = Synthetic
LKYRLGLDIGTNSIGWAVLELDDHGELLSIVATGVRIFADGREPTSKSTLKATRRDARSMRRRRDRYLQRRTFLLDELTKCELFPEGSNERLKLQKLNPLKLRAMALNTKLPLHHIGRALFHLNQRRGFKSNRKDKSEEVTTGKISQSSLNLLKQMDLIEVQDDSNTDQERSSAEKKAIGEKAAHDRLYALEQLKERRNLSYGSFLWERHQTGLPTRARPNSDSNLYDVYPTRELLEDEFYKIWNAQAKYYPHQLSDTVRDRLFHVIFHQRKLKPQPLGKCVYFPDEYRVHRAMPSFQRYRICHEVNNLEWRHGLDKVRLIDDRIDRDRLIEMLERPSKKKNPSDRNAQVSFNAIRKELKKREAMIGDCKFNLESERRKGIDGNQTSNVMQHDNYVGSKWHDWSLDKQDKFISIILDDQLDDQEVCDKLICEFGLTPISAEWCKNAKLVNGTAHISVRATRILTKFMFQDMLIESKAVQKACNLNPDFRNPNTSRLTGKLLNRLPYYGEAVQGHIISGTGDEDDYQARIGMVSNPTVHIAMNQLRLVVNELISRFGHPESISIELARDLPVGKDGRSEITKGQSKNQKRNEDFNKTLDELGQKKNRENRLRMRLWEEQGKRCVFTGKIIGLNNLFSAEIEIEHLIPFSKSQDVSVPNKVVCFRQANRDKANRTPFEAFSNSPSNYNWDEIYNRVAELPKSKRWRFDEDALEKWHKNSEGDFSARHLNDTRYIGRMAKEYLENICAFNKIDVVTGSLTSLLRTFWGLNSVLYEIRNEANTQKIKNRDDHRHHAIDAIVVGMTSRSIIQRVSTEANCAEELFDFSRLFPKRNHRSAIEPWDGFRRDVINAVNKIVVSHKVRRKDTQPRSAQRETRLVTDGQLHNETAYGIIDGPDKQGLNKVVVRKPIEYFTTKSRLEKIRDEYLKRKFLAVFARDSKQGVIDLARQKRIRSLRMTESQTVISINDHDGKPYKAYKGDSNWGIEIFSFPKGHGKFGKWEGVVISRFKANQRNFRPGFSCRPHPAAKLVMRLQIDECIEIEDKGQINIMRLQKLNKNGQMVFTPANEANVDARNRDKDDSFRYRSTSANVLQKQRARKIHISPTGLFSPPRV

SEQ ID NO: 4798 - protein, 1129 aa, synthetic construct
  REGION 1..1129: note = Synthetic
MFSYRLGLDVGANSLGWSVLELNEQGDPCAVRDAGARIFSDGRVEKSKATLKADRRAARSARRRHDRYKQRRTFLLAELTKAGLFPESQGERRELQKKDPLELRARALKEKLEPYEIGRALFHLNQRRGFQSNRKDRSKETTSGMVSNSVTALLRAMQLMEEGYSAEAFKALPKEAKKEAREKEQQQKKDALGKLQQQHALTFGSFLWERRARKETTRARPNSDSKIYDCYPTRDMLKHEFDAIWKAQAGHHPELLTDPRRDRIRTVIFTQRPLKPAKVGKCMYLPDEDRMFRAMPSFQRYRIYQEVNNLEWTTNRGKHRLIDHPEARDEIVDMLERPGTQKGNVTFSKMKNVLQKRKLATNDCRFNFETPKRNGFDGNLTSNLMQDESRVGKQWHTWSLEKQDSFIEVILDGTPEQKQRRAEDERRGLRVIRDGTRDDEEVQAYLRRTYNLSDTSAEQCMSANFVQGTASLSKKAAAVLIEKMRDDRLIQPNAVREAKDKEVFPCDEEVTRKDQLPYYGKAFLDGRHIIPGDRHPADKDDDLKYYGGVTNPTVHIALNQIRHVVNELIDRYGRPASIAIELGRELPAGQEGRAEINKAQKANQDNNERLDNRLREQGQSTIPDNRLRLQLWEELDKDPNGRCCPFSGQKIGIADLFNGQAEIEHLIPFSQSLDDSRANKVLCTRQANRDKGNQTPYQAFGHSPGDYNWNEILRRSKSLPQNKQWRFQKDALEIWHRDHDFTERHLNDTRYIGRLAKEYLCNICQSNRIDVLTGRLTALLRGHWGLNSVLNERNQTQEKKKNRNDHRHHAVDAIVIGMTSRSMLQKVATAANHAEELDLGRLFYKSQIDPWDGFRDDVKKVMNGITVSHKPKRKPLDKNATDGQLHNDTAYGIISGPDDQGHFMKNAKVVVRKPIEAFEKRDDVASIRDKHLQCEFLQAFDDEVAAGGKGSDGVARLAKDRNIRHLRRTETLSVIPIRDKSGKVYKAYKGDSNWGIEIYEWPKDHKKAGKWEGVVHSRYEANQKNFLPGQTRKPHPAARLVMRLHVNDCIEIEQDGLKPIMRLQTLSQSLGFVPHNEANVDTRNRDKNDPFKYLYKTADTLRQCSARKVHVSPTGRVSYAKRPKPRRKK

SEQ ID NO: 4799 - protein, 1299 aa, synthetic construct
  REGION 1..1299: note = Synthetic
LQHRFERQGKARRRARCATARASPPGDDGRPDQPRTRRAAEPGQGRSGGAAGAFLQRRPGQLPAKQRRACRPPQPARANRRRSKTRLPLAASKSRFPGRCMNRSAPSTPIASKLTQSAQNSAIMHAGTEREAGERMNRRKYRWGFDVGTNSLGWSVLGLDEKGEPCEIVAAGSRIFAEGRDAKTKATLAATRRQARSARRRRDRFKQRQRFLLSTLTQAGLFPESEADRKNLQEQDPLRLRAKALTQRLEPWKVGRALFHINQRRGFKSNRKDQSEEGKSGGKVSKSARLLLEQMGLIDPEISSEEYKKLSSDGKRQVRQQEATARIEALKKLEEEKELSYGSFLYQRQNEGKPTRARPESAGDKGELYDIYPTRELYEDEFSKIWQAQERHHPGLMTEAVKERVRRAIFHQRPLKPQKRGKCTYMPEEDRAFRAMPSLQRYRIYQEVNSLEWSDESGEKKLLRDFPPARNAIVNLLEKPSAKEGRVTFGTMKKEIKKLNIAEGNFKFNFETEKRKGLDGNLASKLMQGEDRIGKEWHNWPLEKQDELIDIILNGTPAQQQRDREWLEGGGKSPQGTGALDDEEVCGYLMQHFELDRTVAESCLNASLEDGTANISLRAAKFMLEKMQGGIVDCETGELSLPLQNEAASAVAQEVAKFIDPMRARGDDGGYKTLDKLPYYGEAFRDGRHIIPGTGCQEDDDKTRWGGVTNPTVHIALNQIRLVVNELIERFGHPQSIAIELGREFPLGAEKRREIEKEQSANQKKNEELDNTLRKYKQKENAGNRLKLFLWQQLDEGPTGRCCPFSGDSIGICDLFSGNIEVEHLIPFSRSLDDSRANKVVCTRQANREKGNQTPHEAFGHSPDGYDWQQIFARAESLPDSKRWRFKPEAMEIWNREEGGDFTSRHLNDTRYIGRLAREYLENICDIDRIDVVTGRLTSLLRRHWGLNSVLDDRTDRKNRDDHRHHAVDAIVVAMTNRSLLQKMAKKARELEKIDQDPARNLDRYFPPVDGKKSAIDPWESFRSDVADVVERMVVSHKRCRKELRGESTDGQLHNDTAYGIVRELKGDKYEVVSRKPVNKFKNLKTIESIRDARLREKFMSAFEIAEENEEGAGEKAVKKLGEYLKIKRLRCMETLSVIPISGQDSENPYKAYKGDSNWGVEIYSLPSGHKNAGDWKAVTISRFDANKKDFKPGETFRPHPAARLIMRLQINDCVEMLDPKTREERKLYRLQLASSSMIFAEIHEANVDKRNRDRDEKFKYTRVRASSMQSRRARKIHISPTGRISYEQRRSGRRRQQE

SEQ ID NO: 4800 - protein, 1157 aa, synthetic construct
  REGION 1..1157: note = Synthetic
MKKYRFGLDVGTNSLGWSVLELDEGVTPCAIAAAGSRIFSEGRDSKSKATLAATRREKRSARRRRDRFKQRQRFLLHELTRAGLFPKSKERRKELQVLNPLALRAKALTEPLKPHEVGRALFHLNQRRGFKSNRKDRSEQALGGVISVSARLLLQQMGLIEPEMPLDEYRKLSREEKKKIRRVEAEARKQALRKLADNDELTYGFFLYGRQLQRNPTRARPGAGHDGKFYDVYPTRELYEDEFNKIWQSQSRHHGELMTEEVRQRVHRAIFHQRPLRPQKRGKCTYVPSEDRTFRAMPSFQRYRICQEVNSLEWWDGYANRRIRDYPEARDAILRLLERVATKNGLVTFGKMKRVLKTFDCAEGDFKFNFETQKRRGFDGNLTSNLMQHEDCIGEDWHTWPLERQDELIDVILNGTPEQQERDRKRLEGAGNLPPPDGARDDKDLRRYLTKRFGLSEYAAGNCLGAPLKDDTAHISCEAARLILATMRDGLADSETGEFALPLQSEAAAAVAQKVSGFVDPFRRKGDDGRYELLDRLPYYGEAFRDGRHIIPGTGKEEDDDKTRWGGVTNPTVHIALNQIRLVVNELIDRFGHPHSIAVELGRELPAGEEKRREIEREQKNNQDRNQGFNERLRELGQTPNASNRLRLLLWEELSDDPNGRCCPFSGNKIGIADLFSGRAEIEHLIPFSQSLDDSRANKVICTREANRDKGNRTPHEAFGDSPNGYDWGEIVARAEQFTDSKRWRFQKDARKIWQQGDAADFTSRHLNDTRYIGRLTREYLESICPVDRIDVLTGRLTGLLRGHWGLNSVLRGGGEGAGRKNRDDHRHHAVDAIVIGMTSRSMLQKVASEARKLEEIEQVSSQSLGKLFPRIDGGKNAIDPWDGFRAEVANTVRNIVVSHKIRRKRLRPGTTDGQLHNETAYGIIEKMERGNLYEVVTRKPASAFKTLKDIERIRDPRLRQDFRDAFEAADAGQEAKALRDLAHRKGIRHLRQTETWSVIPILDAAGKPYKAYKGDSNWGIEIYAFPPGNGKADKWEGVVISRFEANREDFKPGETRRPHPAARLVMRLQINDCVEMEEGDGQKLFRLQLVSQRGEMSFAELHEANVDSRARSKESPFKYLRINANPLKKRKARKVHISPTGRISYEQRRPPRRHHA

SEQ ID NO: 4801 - protein, 1549 aa, synthetic construct
  REGION 1..1549: note = Synthetic
MKTILGLDIGTNSIGGALIKLDTENFGTNGKIIWLGSRIVPMQGDYVNTKTGSASKDPMSDFTKGIGISKAAFRTKKRGSRRLKHRYKLRRTRLIETLKILSWIPENFPVEFKEAKRKGIEFKMKDFLPFLESTLKEASKAFKIDQNKKGEINVPEDWVVYYLRKKALTEKIELSELARILYMLNQRRGFKSSRKDLKDETTVISYDEFDLMTKNGEFTDAEGRTLETKFVEVTKIKSVQWLEDEGQDKKGNHTYEITVDSNRIHSWNEKRKKKPQWEGEELRFLVTQKTDKKKQIVTQPNKPKIPEDNDWNLAMVSLDNELQQIGKQVGEFFFDKLVKNKNYRIRQQVVKRNRYQQELKAIWNKQSEFHNELKSKDKLEEIARMLYPLQAENKLAKWTKITNGSLYKTISEDIIYYLRDLKSQKNLIDECRYEKKPAYSNKNGEEITPGYKVAPKSCPDFQEFRIWQDIHNLRVLLKEDEETGKVDIPLADELFSIKIKAELFDLFNRQEEVSRQQILKVIDGSFSSKTHGINLFTNREKLKGNETKALFRKVFKKYDFDGEALLNDKDKFQLLWHILYSIRGKDHEKGIRRALTNPKNEFGNLPEDVVSHLAEKTKEFPHQYASFSRKAINKLLPLMRCGSHWNSNAVINAVSHFLKWKETDAFLNLGLKIQNQLESFEALEDFEGLETSTACYVAYGRHSERESDFKYKTWEKIDPMKIIPANSLRNPIVEQVVRETMQVVKEVWKQYGRPDEIHIEMGRDLKRNIKEREKTAKSQRDNYNEKQRIKKLLQELKVGNPDSPIDIEKFRTWKGNGGWEANNRFNELFDSKNLFVKNADIKKYRLWTEQKHRSPYTGAQINLSDLFTEKYEKEHIIPRSKLKYDAMANLVICEAAVNDFKGNRLAQVMINGDGGREHTHKGTTFTLLSKDKYLQNCKLFDKRKRKNLTADKVPEGFIERQINDTRHITRKLNELLWPVTKDKEGLVFTIGSITADLKQQWGINTIWKDLIKYRFERLGKILDKELIVKDEKDKNKFHFNKPDDKVDLKRIDHRHHAMDALVIAATTRAHINYLNALSSHKEREKWKYVAKERVREFYLPWQDFAKDGKDKLSKVIISHKYNNRVLNKPHNRYWKWEQQPDGNWKKVLKKQKANVSWKTVKKAMFNENPQGAIYLKEPKSERVIEAIKVQIERAKGVKDENGKPRDYIYDKQAREQIIKLVEQFNGDENAIKKHLKKNPVTDKQGKSTDKVQVAIFKEYAAKRITVDNTFDEKKIKGLPYAARTIERCEQRFKSDQEKDKKFVRTPSMWPIPFLLKKHLDEYDGKGIEAFAGEGLELLFKKAGRPIKKVTKYEKKSNPIKFNNGIWETAAGGNIYFVIQENSDTNERDYYSVPLFSTDDAKGPEQYGAINRLLNDDPIAEDRDGYKNIILKVGDLVYVPTPEELESPHHIKDIDWNGKDKKRVFDSTYIAKSFNKKQAFFIPHNVASSLESEGKELGSNNKAEKAWDASILKDGTMIKDVCIPIQVDRLGNIVKVHGRGITTIGQTEKL

SEQ ID NO: 4802 - protein, 1198 aa, synthetic construct
  REGION 1..1198: note = Synthetic
MFINRKLVLGLDLGVGSIGWCLVSKDLQDNPLEIVAIGSRVVPLSTTEINDFKVGKSKSPSQQKRLAKSFRRNIDRYQMRRYKLVSILKYLNMMPNVELMKAPLIELWSLRSRAANVGEKLSLEEIGRVLFHINQKRGPQFRIDDESTDTVYKEAVNHRHKVIRESKQTVGQYFYCKLQNSRITNPKGKSFYTYRIKDNVLPREAYEEEFMQIMDVQMKFYPEVLTPSIISRLFDIIFFQRELKSCKKLVSVCDIEKREYPIPDKEGQYRIVGPKVAPKSSPLFQVFKIWQSISNISFTDIDGQRLYIKKDVRNKLFNHILTKGKLNARDCYNIVGVSDKEFSLDKLTLDGIKGNLTLNQISKALSLLPVTKRNELLEFDLKVEEQVDTVTGEIHNVISNDMLSEPLYKLWHTLYSLNKADERRKCLQNNFGISDEQTIDELCKLNFKKDGYCKLSSKAIRRILPYLQEGYDYAQSCLLAGFRHSDYVTTEENEGRPLQTHLPILKKNELHQPVVEKVLNQMIGIVNRLIEKYGEIDETRIELARELQRSKKEREDMDKQNRENLKRNEEIAEKLKKENGINKPTHRMLMKYRQFEETGGKCMYCGVDIDLKTFMYGIDTEWEHIIPKALLFDNSFSNSICACQKCNKTKNDKTAYDYMRSLGTQRFNDYKGRVKKMYDEKSISRTKYKNLLASFEDYQERKRNGCATEEDKELWENYIDRQIRQTQYISRAALKMLKNVCRNVYASSGTVTSFLRHGWGYDNILHDLNLPVYDAAGIGLTEDVVVKQDGKDIQVHRIKGWNKRMDNRHHAIDALVVACTKQSIVQRLNEFNSSRTEFEEEVKSGKKKRFKNKKSMLEKWVEINTPFSKKEVAEKVSGIIVSYRTSNKVASSSTNRYLSNGKTIVEKGIISPRLPLHESHLYGKINGKNVYRYSLSELFLKKKDVNIEDVLKSIVDKGIVAILENRINAGIINNDSSKKPYDVDPAKAKENLATLVSKPPMHSNGTPIRRVKCYVSKPTIPVRTDSHGTVTAYAVSGNNHHIEFYRNDKGEFKESVISYWQAFLRIKNHLPLFVNIDNASILRKASEEGFDIGEIHDSSWNPFLCLGKTELVVIGLKKRTIENLIKRGDYSKIASHVYKVCGVSQGDYTFCIHNEIKYVPKERNKPDGRFIRIQNIKSLANLELVKVKINPIGEITIL

SEQ ID NO: 4803 - protein, 797 aa, synthetic construct
  REGION 1..797: note = Synthetic
MLSEPLYKLWHTLYSLNKADERRKCLQNNFGISDEQTIDELCKLNFKKDGYCKLSSKAIRRILPYLQEGYDYAQSCLLAGFRHSDYVTTEENEGRPLQTHLPILKKNELHQPVVEKVLNQMIGIVNRLIEKYGEIDETRIELARELQRSKKEREDMDKQNRENLKRNEEIAEKLKKENGINKPTHRMLMKYRQFEETGGKCMYCGGDIDLKTFMYGIDTEWEHIIPKALLFDNSFSNSICACQKCNKTKNDRTAYDYMRSLGTQRFNDYKERVKKMYDEKSISRTKYKNLLASFEDYQERKRNGCATEEDKELWENYIDRQIRQTQYISRAALKKLKNVCRNVYASSGTVTSFLRHGWGYDNILHDLNLPVYDAAGIGLTEDVVVKQDGKDIQVHRIKGWNKRMDNRHHAIDALVVACTKQSIVQRLNEFNSSRTEFEEEVKSGKKKRFKNKKSMLEKWVEINTPFSKKEVAEKVSGIMVSYRTSNKVASSSTNRYLSNGKTIVEKGIISPRLPLHESHLYGKINGKNVYRYSLSELFLRKKDVNIEDVLKSIVDKGIVAILENRINAGIINNDSSKKPYDVDPAKAKENLATLVSKPPMHSNGTPIRRVKCYVSKPTIPVRTDSHGTVTAYAVSGNNHHIEFYRNDKGEFKESVISYWQAFLRIKNHLPLFVNIDNASILRKASEEGFDIGEIHDSSWNPFLCLGKTELVVIGLKKRTIENLIKRGDYSKIASHVYKVCGVSQGDYTFCIHNEIKYVPKERNKPDGRFIRIQNIKSLANLELVKVKINPIGEITIL

SEQ ID NO: 4804 - protein, 1565 aa, synthetic construct
  REGION 1..1565: note = Synthetic
MPENQILSLDLGSNSIGAVVRNAIEENQFGKATVTTFETGVGKDKENKYTISLAANRTSKRSIRRLYQSRKYKLWAVLEALIKDPNNLYCPIKGESLKRWKHYNKEEAQKENGGRQYPVNDVLFANWIKLDFNNDGVRDYISPYQLRNELANVRLDFTVEINRFKLGRALYHIAQHRGFKSSKIVNNKDDEKREQSERTDHNEEGNIGAEKRKQENFIKELGKIGFAYDPEKDTVGSLFARVETEGIHHPERKTEGIRIRKNLHQYVTRKMLIKEVKQIFGVQQLDFNDIFGEKNTKISITHSSIFWQRPLRSQKGLVGCCTLESWKIFDKKKGREVFVGKKRCAVSRPEFEEFRSLSFINNIAYREKGKHDNEWHFLSKEMRHELYREKFFVQKDFEFFDIAKWIKKKNRHDKWELNYNYKTNVSACIVSARLKKIFDEDWNKPVTMVDRSGKPYTVPFYEDLWHVLFGSDDQDFVEEYGRSKLKLDDEKVQQLRSLWFTMPVDYAQLSLKAINNILPFLREGFIYTDAVLLGKVPEILGNEIWNKNRVFITESLKSSVIEKNREEKRLLNIVNNLIAQYKARPKGNDRFADHDTSYVVGSIDAQLPSGSNERDDVQIARAAEEGFGKETWKKLSEERQNALEQITEYYQRFFKSGQRDFYKLPRLGDAMKKFLADNFPNQLYCPNTFKKLETGEEKCHCGKCKRLNKLYHPSMIAIYSQARDEYYKYDGKGIQKVMLGSPKTGAFKNPMALRTLHELKKLVNYYIVTEQVDEETRVVVEVARELNDTNKRWAIEKYQEIRRKENEEFGAAILELLNDPEAVGSLANADSDSDIDKFRLWYEMIELPEGFEKSGKFTAVEDDRTAKERKGKRKKKKDGEDEDLDEMEYYEFSENHFENIKKEVWVKLKKAKDSVVEKYRLWKEQQCFCIYTGNPIRITDLFKDSVIDIEHTIPCSISFDNSVANKTVCFANYNRNTKKNQIPTQLSNYPEIETRIATWKQKVKDLEMRVEFWKGKSKRASTPEYKNKAIREKHLWQFELDYWSNKVDRFTMKEVKPGFKNSQLKDTQIISKYALHYLKSYFNHVEVQKGEVTAQFRKIFDIQETGTKKDRSKHSHHAKDAMVLSVIPVAAIRDRMLELWYQIREEELLLKSNTEKKKSAIEEKIKLLKDELLQLKYQCNLPKGFNNSIKQLDETILNNNIARNRSVIPASKKVRFKGKDFVAKGDAIRGELHLATMYGKLQMVERDENDKPLRNEKGEWKFLEGDSAFKFGLRKGVDKNLDIDKIVDPALKRIIKDQMSNRSLANTLSEDGGLYMLNKSGERVHKIRHIRCFANDVTNPVRVKKQDIQSNKEHKNYYWAKNGENILCALYQKNIKDKKGNKRIDRELEIITLMDVAKLVQAGEIKSIDDLEIYRKDKQIGEVIIDENGNKEKPYAIFKPGIKVIFYDENPDELYKKEDERNDDYKKRISYRTYVLVKFSGVQITFKHHLENRNDDELKKAYPKDEYGGGGTIGFTKKVSDALIQNKFNNFEPWPKLLYTMNWLSMVIEGKHFEVLPDGMVKWKI

SEQ ID NO: 4805 - protein, 1563 aa, synthetic construct
  REGION 1..1563: note = Synthetic
MTEKILSLDLGSNSIGATIRDLSEEPQFVKTAVITFETGVGKDKEKKYTISLAANRTDKRSARRLYQARKYKLWAILEALIKDNSKLYCPISEESLKRWKHYNKEEAQIGFGGRRYPVEDELFANWIKLDFNNDGVPDYISPHQLRNELATVKLDFSVETNRFKLGRALYHIAQHRGFKSSKIVKNKDDDNKEKEAENSIGAEKKKQNKFFTEIEKLNIPFDQETDTIGMIFAKVETAGIHHPERKTEGIRIRKNLHQYVTRKMLIKEVKHIFEFQGLDYKSIFEEEYSKSPIFWQRPLRSQKGLVGYCTLEKWKVVDQKKQREVIVGKKRCPISRPEFEEFRTLSFINNIAYRDKTNKDAEWQFLPMEMRKELYREKFFVQKDFEFFAIHKWIKSKNGHNDWELKYNFKTNISACVVSARLQKIFGERWNSIVIRKDRNGKELKTPFYEDIWHVLFESNDEDFIEDYCKTKLGITDEDKIQKLQSLWFKMPVGYAKISLKAINNILPFLRDGFIYTDAVLLGKVREILGDKIWNENNTFITESLKKDVIEKNRNEKRILNIVNNLIAQYKSLPKSKRFADNDFRYIVGSRDVKLPKESIERDDNQIQKATEEGFGKETWRKLSNEEKAIVIEEITNKYQEFFEKGKRGFYTLPRLSDAMKKFLADNFPDLLHCPNTFKKVYTSEAKCKCDKCNLLDKLYHPSMIAIYPEAREEFYNQHGIQKRMVMLGSPKTGSFKNPMAMRTLHELRKLVNYFIANGDVEEDTRVVVEVGRELVDTNKRWAYAKYDQIREQENKEFAEAIRELLKDPEAKGSLADADSDSDIDKFRLWYEMIESPEGFEKNNKFITTEEDKKPIEKEKKGGNKKKSQTEEEDDLFEFSENYFENIKKAVQLKLKKAKDNVIEKYRLWKEQQYFCIYTGKPIKITDLFQENLIDIEHTIPRSISFDNSLANKTVCYADFNRNVKKNRIPYKLDNYDEIKLRIERWQQKVKDLELRVEFWKGKSKQASTLQYKNNAIRQKHLWQFELDYWKNKVERFTMEEVKPDFKNNQLKDTQLISKYAIHYLRSYFNKVEVQKGAVTAEFRKILDIQETKTAKDRTKHSHHAKDAVVLSVIPQAVIRDKMLEVWYKIQEEKQLLESDTEKDRIVILNKIKSFEEELRQLKFQCNLPKGLNNTIRKLDEELMINNIARNRSVIPAGKKVRFNGKTFVAKGDAIRGQLHLDTMYGKIQMVERDVDNKPKRNDKGEWLYNKGKDEYKFVVKKEVSKDLDINKIVDSELIKIIKTQIGKRTLASTLSEDGGLFMLKKDGSRANKIRHVRCFADDVSVPVRVKPQLIQGEKEHKNYYWAKNGENVICAFYQKIKKDKNGNEKIDRDMEIISLMEVADLVRSGEIKSIDDLEIYRKDKKGNIVIDENGNKEKPYAILKPGIKVIFYDDSLDGLKKEENESVSNYNKRISYQTYTLVKFSGGQLTFTHHLEARSDEELKNAYDKNKVYMVDEKGKEVKYGGGGKSGFTRKISDALKFNSPNNFEPWPKLLYTKDWLNMAIEGKHFNVLPDGEIEWLF

SEQ ID NO: 4806 - protein, 1545 aa, synthetic construct
  REGION 1..1545: note = Synthetic
MPQNNILALDLGSNSIGAVIRNIEAENQFENATVVTFETGVGKDKGQYTVSLAANRTSKRSVRRLYQSRKYKLWALLESLIQDENKLYCPIKENSLKRWKFYDKEQALKGNGGRKYPVDDILFNNWIKLDFNNDNLPDYISPYQLRHELVTVKLDFSEETNRYKLGRALYHIAQHRGFKSSKIVNNKDDEKGKPDEENLENTNIGAEGKKQSNFINELEKIGFNYEPENETVGSLFARIERDGIHHPERKMEGIRIRKNLHQYVTRKMLIKEVKQIFDFQQLDFNEIFGKNEAKISIAQSPIFWQRPLRSQKGLVGYCTLENRKIFYKDKQREVFVGKKRCSISRPEFEEFRAFSFINNISYREKGNQDKEWHFLPSEMRKELYQEKFFVQKDFEFFEIAKWIKQKNKHDNWELNYNYKTNVSVCSISSRLKKIFGDDWNKPVTIIGSKGKTYTAPFYEDIWHVLFESDDQEFIEEYGKLKLKLGDEKIRQLIALWYAMPIGYAQLSLKAINNILPFLREGYIYTDAVLLGKVPEILGKEIWEENKNFITESLKTLVIEKNREEKRLLNIANNLIAKYKARPKGNERFADNDTNYIVGSRDYRLPIGSIERDDVQIEKAAEEGFGKETWKNFSGEEKAKYINQIKDSYQNFFNSSSREFYKLPRLGDAMKVFLADRFPDLLYCSNTFKKIETGEKNCNCEKCKRLNKLYHPSMISIYPPARKEDYQRYGIEKKMVMIGSPQTGAFKNPMAMRTLYELKKLVNYYIVTGQVDEETRVVIEVGRELNDTNKRWAIETYQEIKRKENKEFAAAIFELLKDPEAEGSLANADSDNDIDKFRLWYEMIESPEGFEKNGKFTNVADDRTTKERKGKHNKKKKDAGNEDFYEEDFYEFSENRFEKIKKEIWVKLKKAKDNITEKYMLWKEQQCFCIYTGKPIKITDLFKETVIDVEHTIPRSISFDNSLANKTVCFADYNRNIKKNQIPTELPNYDAIEKRIEKWKQKVKELEMRVEFWKGKSKRAATLEYKNSAIREKHLWQFELDYWKNKVERFTMKEVKPGFKNNQLKDTQIISKYAMHYLKSYFNQVEVQKGEVTAQFRKIFDVQETGTEKDRSKHSHHAKDAMVLSVIPVAAIRDKMLELWYTIKEEELLLKSDTEPNKLAIQEKIKQLKLELDDFKIRMKPKAFNNAIKQLDETILNNNIARNRSIVPASKKIHFKGKTFIAKGDAIRGELHEANLYGKIQMVARENDIPIRDQNGNWKFLENDEAFKIVRRNEVDENLNIDTIVDPSIKKIIKAQMGERSLAATLSEDGGVYMLNKEGKRVHKIRHVRCFESSVTNPIAVRKHDISSNKEHKNYYWAKNGENVLCALYQKIIKDKKGNEKIERELEIISLMDLAQLVRSNEIKNIDDVELYKTDKKTGKLIIDEDGIKEKPYAILKPGMKVIFYEKDIDELKILSNAELLSRIYITGNFEDGRINFYHHIASLSSKQIEEKLVEMKASKKGASSVNFLNPFPKLRLSKNNLNMAIENKHFAVFPDGSISWLTMNY

SEQ ID NO: 4807 - protein, 1471 aa, synthetic construct
  REGION 1..1471: note = Synthetic
MGNRADLELAFDVGHSSIGWAVLKTQPELEMKGCGTVIFRPDDCLASKRRDYRRQRRHIRSTRLRIERMTNLLLGIGAITQSDVESGKKQHKGEPPPWLLAARVLAARTETEKAKALLTWPELWKVLRWYAHNRGYDANVRWSGESKVEAFSPSPQINTEDVEEQAVEAEESELADVEVAEDSDSDSDKLRAGKHLMSSKYGFHTATFAETVAKILLGPKRDVKPGQAGKTGKLAETTESFSESDFRKLLFDTPTESWSHPRHLSIYFKGIRAAFPRRIVKVIGGQRTLVGGTEWEVRAILRAHFDAPKGKALCDETFEAAICGRLPKTRENWRAYAETHPTLYLSSDDQAKLRSLRAPPKASQEKSERIRQQRRNILTGKLFLPSRYEGGLLFGQLGTRFFNRIISRCPFSFARIVAAILSGDENTLRLYGTTLAAVNRSRHSRNGVMETDLDLARRWAAKLSKVPAAKSREFLLYRWAMTLANVIVARPGRERLTGYERRCIHRRLRRTGYFTKDSFKEAVRQTTGCEPANLDQMFDTTTEAENSLFIDPVRKYLATNEVAGVVLPVLSQFLQVRLARLLQKGKGVRVREIAEWLDETAKRELSQRIEQYVQENNAKAKAAKKKPHDTHSPDEDRRKKQNKLTAAAVLRVRLEAPLPKGRASYHRVVLRKAVAEVLKGFDPRKPKRDRSNPDGENKPSHGCLFRTPETNRQLLGNPNNEAEYERWKQRWLSHQKNYQRYIARERLSPGSGEAFVRSEYHAAQSYRWLASQSNNHIVRHRLTILDRLLRDIIADQNYCAGDPKRIRRISIEVANDILTFSGLERKQLSGQVMPSLREHHDHVVRLLQQELKGTQWENKIDGELIWKAKIADDLGWWCPYTGKKYSPCELASGEMDVDHIIPKSRRLTNAMSAVVVTFKTINNLKGDLTAWEFVERYQDQPVGPHGEKVRKLWDYERFVKNPDNEMDKPRLSGETGHSDYPRWPKYLPGSRRKLHPDYVRRKLRRRYLLLKHYEKDKDTFTPRDLTITSHLNRLAQQVLLRSLPHLAEHQITAIPGSVIGVLRDAPGWRLLGCLDGAATADVIRKVLQLDHEGKPMCASDVAPLMKRIPKPKGEIRELTHLHHAVDACAIAIINHLLPKDGKLWELVAKRELTDADKNAYDDLRQKNQSQWQPRRLARLFSIVPNLDDKGQQPKHDHKWRIRPCRLKDVLPDIGAQVNKCLRERRVVEHTPADMSGLAAEETVWRIFDPSDNHPSARRLKQWFEKKIKDGEIQKLPDPTNEADKTVLIVCRKRRDAKSNDKGKTLHDTGNVWRWVYDEVNKVRVVGLNPGKLHRIKAVKLIRENFGIALDPEPTIVPFHKVWQRLMELKAKNGGKMPRVLRNGQLIRVLSGSRAGLWRVTSVKQTEAYGLVLDLAYPDSVHLSRPNAPVEQLLKEGLEILKHSLTGYDASVVAYAPVKRRPRKPKAAQSEQ

SEQ ID NO: 4808 - protein, 1067 aa, synthetic construct
  REGION 1..1067: note = Synthetic
MRIAENIVLGLDLGSSSIGWALIEESPITLEKHILQKVSPDGIVTYAVGSRIIDAPEDAKTHELLNVARRQKRSVRRVIARKAQRMKAVRNLIAEAGVPEIKNLDAVHHEKGTPQNSPWELRSRGLQSPLSDLEFAVALIHIAKHRGFRSNSKNENNDDAGKVKESLRELERKLKESGAETIGQFMAEQSDRRNRKNYKGEAQYTHMVMRSWQEQEVHLLFERQRDFGNRLAASGIEERFCSLAFNQRELKSVASMVGNCVFLEHEKRAPAFSPTAEFFRFLQKVVHLRVRENDEVRPLSLAEQQTMIELFGCTAKITYKSVRRKLKFGPDVFFDELSYPMSNGVIDMKEENADVVRRSGASCAGTMALKSCLGPELFENLRQERTGEDDRYPGWPVIDRIAKILSDNDGFDSMEHELAELDIDDSIRKNIMVCAREGKFSAFRGTMNLSVKAMRALIPFMRKGMRYDEACDAAGFDHAREREVEINDIRNPVVQHLLREVKRQVRAVCHEFGLWPGRVNIEMLRDVGKSASERKKMDSGIRSRTSERERHRKALEEKWNRPPSAAELKRYELWLEQNEHCAYAQLLGADSPVYRGAPGGHIPLDWLKDGMNHVQIDHILPRSRTFDNSRNNQCLCLAGANQSKLNKTPFEWKGNADAEAWHRYSVWINGLPVKARKKRFFLLKDLSGEVEGRFHARNVTDSAYTARLVAQWFRNEYAYRLKDAPDEERNCRRVYTRPGAVTNFLRHVWGVQSLKKNEQGEREGDQHHALDAVIVACCTEGMLQAITRQFKKNELEGLNDRLPRPWNHFRESLEPVINSVSVSREIKSKKTGALHEETLRSLREETVNGVNRQMVYERKWVNDLTMRDLENIKDPERCRKLVSALRTWLALPEKSRPPFTDPDSGNVVRHVRVRRGEFSSGVTLKRGSGVAQADNGEMARTDVYSRDGRFYLVPVYMKDIADGRLPLRACRNATPEAQWPVMDESYEFLFSLTKNCYVLTKKRETIREGYYVGMDRTTAAISLSLAEDKQKKIKGIGVLQLDHFEKYIVDRLGRRVRVTRERDPRRS

SEQ ID NO: 4809 - protein, 1245 aa, synthetic construct
  REGION 1..1245: note = Synthetic
VVRCRSSYTANIRKISAQIQKFSLFLQKNRQFMEKRLGIDVGTNSLGWAIVEVDDEGCTLLDRGVDIFQEGVAREKNQEKPAVQDRTDARALRRHYFRRRLRKIALLRVLVRHDLCPALSEEQLNAWQGKGIYPLDDAFIRWQRTDDNADRNPYRDRFRCLTEELDLACREERYVLGRALYHLCQRRGFLSNRKDAGNEAEEGKVKQEIKTLSADMAAAGCEYLGEYFYRLYQRKEKIRKHYTARNEHYLAEFRAICRKQRLDEELRQALEKAIFYQRPLKSQKGLVGKCTFEKDKSRCPVSHPRFEEFRMLQFINNVRVTGPGDAEPRPLSPEEVEIVRPLFLRKSKPHFDFEDIAKKIAGKGNYACRGELLQAPYRFNCAGKSTVTGSPVSALFASVFGDDWQREICSLYTLGAGKNEEQILNDVWHVLFAFEDEERLQTWLQEKLQLSADDAKTLAAFRLPQGYASLSLNVINKILPYLRRGYRYDEAVFFANLGKVLPAEVYADPARRREVEQGISAQMDDLGDGEKTRKEERIRDYLRRYWGVEEKRLERLYHPSMIEAYPSASPNGQGLLQLGSPRIPAVRNPMAMRALFRLRVLLNELLREGKIDRGTKINIELARELNDANKRKAIERYQREREAENRKYAEEIRQQYVEATGHSIEPSEEDILKYRLWVEQGHCSLYTGKTIGISEFLGDGRRYDIEHTVPRSRGGEDAQYNKTLCEEEFNRDIKRDKLPSELANHTAILACVESCGWFERIEGLEHRVWGADRRAKSATTKSAKDFAIQDRHYWRIHLDYWRRKCEAFTMTEVPEGFSNRQGVDVGIIGRYARLYLQTVFDRVYTVKGATTAAFRRMWGLQEEYAAKERVNHVHHCIDAITIACIGSREYALWAQYVRQDELYRRGEADKPRCGKPWPTFTENVRATADELLISHHTPDNMPKQSRKRLRVRGKVQRNDRGEVKYMQGDTARGALHQQTFYGAIERDGEIRYVVRKSLDQLLPADVEKIVDEAVRQKVREAVEAYGFKEATDPTKHTVWMNEEKQIPIRKVRILTGVKNPILLKPHRDVSVKEYKRYYHVVNDGNYCMAIYEGRDRQGRLKRTFEIVNKLEAARYFKRSADRESRPDLVPLSDVNGYSLKYLLKTGTMVLFYENSPDELYECSVGELAKRLYKVVGMAQDGRVQFLFHQEARDQKAVTAECGMGISVFDARHPAPKLRIRVSNFKMFVEGYDFELTVTGEVKFKR

SEQ ID NO: 4810 - protein, 1232 aa, synthetic construct
  REGION 1..1232: note = Synthetic
MAKVLGLDAGTNSLGWAIVEETETGYILEDKGVHIFQEGVARDKNNEKPAVQDRTDARALRRRYFRRRLRKIELLRVLVRYGLCPPLTEEQLEAWREKKRYPLDAAFLRWQRTDDNAERNPYHDRYRALTETLDLSDERHRHALGRALYHLAQRRGFLSNRKEAGNGKEEGAVQSGIENLSAEMEKAGCRYLGEYFYQLYRRKEKIRKRYTSRNKHYLAEFNAICERQRLPEEWRKALHRAIFFQRPLKSQKGSVGKCTFERKKSRCPVSHPRFEEFRMRSFINNIRLTAPGDDTPRPLTRLETETILPLFLRKSKPHFDFEEIARRIAGKGQYGCQGDRNEAPYRFNFARTATVSGCPVTASLIALFGDDWLPEICRLYRLGEGKSEEQVLNDIWHALFSFDDEERLRAWAADKLRLADEQAKAFAAIRLPQDYAALSLNAINKILPYLRRGYRYDEAVFLANLKAVLPPATYADETRRLRIERDIAELTLESRREPYVKYDSKERRIDDYLTDQGVPPARLNRLYHPSMIETYRAARPDAQGLLLLGSPRTASIRNPMAMRALFRLRTLVNRLLREGKIDPDTKIRIEFARGLNDANQRKAIEQYQREREAENRKYADEIRAQYAAETGLTIEPSEDDILKYRLWEEQKHVCPYTGKQIRVSDFIGSAPGFDIEHTLPRARGGDDSQMNKTLCESRFNRESKRTKLPAELSNRAEILERIESFGWREKVESLQKQIEAQFRKGRNAPTKEERDSAIQRRHYLRMQRDYWRGKYERFAMTEIPEGFSNRQGVDIGIIGKYARLYLKTVFRRIYIVKGSTTDAFRKMWGLQEEYARKERINHVHHCIDAITIACIGPKEYDRWARYAADEERYRYGAGARPRFDKPWPTFTEDVKAVADELLVSHHTPDNMAKQTRKKLRVRGRVKLDAAGRPICQQGDTARGRLHQDTFYGAIRHQDKLRYVIRKSIGDLQPADVEKIVDETVKARIKEAIGEVGFKTAMNPDEHTIWMNREKGVPIRRVRIFANITQPLPWDKMQRDLSVHEYKRRYHVANDGNYCMAIYEGTDSKGRTKRSFEIVNLLDAAGYFKASADRTARPDLVPRTNANGHPLKYLLKTGTMVLFYENSPAELYDCPPKELAKRLYKVTKMAKNGQTAFMFHQEARNDDKLKTDYAEKFGTTAPKALTNGYSSVDYQQPHPKLLLSPSSFDMYVEGYDFELTVTGQIIFKHETPC

SEQ ID NO: 4811 - protein, 1225 aa, synthetic construct
  REGION 1..1225: note = Synthetic
MATILGLDLGTNSLGWAVVEETEHGYTLKEQGVDIFQEGVAREKNNEKPAVQDRTNARALRRQYFRRRLRKIDLLRVLVRYDLCPPLTGEQLTAWRKEKHYPLDEAFLQWQRTDDNADRNPYHDRYVALTEQLDLGNRQHRHLLGRALYHLAQRRGFISNRKEAGKEQEEGTVKSSIRSLTAEMEAAGCRYLGEYFYQLYQHKEKIRGKYTSRNEHYLAEFEAICERQQLPDEWRKALHRAIFFQRDLKSQKGAVGRCTFEPRKSRCPVSHPRFEEFRMLQFINNIRITSPQDAAPRPLTQEEVDAIHPLFYRKSKPHFEFEEIARKIAGKGKYACREERIEAPYRFNFARTTTVSGCPVTASLIAVFGSDWLREMCSLYLLGEGKSEEQVLNDVWHVLFFFKDEECLRTWALEKLQLTAEQAKAFAAIRLPQDYAALSLNAINKILPYLRLGYRYDEAVFLANLKAVLPKEAYDNEERRHEIEHDIAELLLSYKRNLYDKYDSKERRIADYFSDHGLDLSRFDRLYHPSMIETYRKAQPDAAGILRLGSPRTSAVRNPMAMRALFRLRALVNRLLRDGKIDRDTKIRIEFARELNNANLRKAIEQYQREREAENRKFAEEIRSQYAAETGRTIDPTDDEVLKYRLWEEQQHVCPYTGRQIRISDFIGADPGFDIEHTIPRARGGDDSQMNKTLCENRYNRVVKRSKLPTELSDHAEIMARIESFGWQEKVESLQKQIDAQIRKSKAAATKAEKDGAIQRRHYLKLQQDYWRGKYDRFTMTEVPEGFSNRQGVDIGIIGRYARLYLKTVFEHIHTVKGATTSDFRKIWGLQAEYEKKARVNHVHHCIDAITIACIGHREYLAWKRYAEEAERYQLGEGDRPDIEKPWPTFTEDVKAVADELLVSHHTADNMAKQTRKKLRVRGLVRLNDAGKPIYMQGDTARALLHKDTFYGAIEREGEIRYVVRKSLGQLQLGDVDKIVDDAVRERVREAIEAVGFKTAMNADEYTIWMNREKGVPIRKVRIYTPSVTQPVALKKQRDLSEKEYKQDYHVVNDGNYCMAIYEGVDKKGKKRRTFEIVSNLEAARYFKASTDRNDRPDLVPVADTNGYPLKCILKTGTMVLFYENTPAELYECTRRELAKRLYKVSGMSTLTLQQKYRYGTIALKHHQEARPAGELKAKSGEWKQNEEYRPVISLLHTQLNAYVEGYDFELTITGEIKFKHAMPC

SEQ ID NO: 4812 - protein, 1225 aa, synthetic construct
  REGION 1..1225: note = Synthetic
MAKVLGLDLGTNSLGWALVDESEQGYALLDKGVEIFQEGVAREKNNEKPAVQDRTNARTLRRHYFRRRLRKIELLKVLIRYDLCPPLTDGQLSTWRQKKQYPLDEEFLRWQRTDDNEDRNPYHDRYVALSERLDLGVRTQRWLLGRALYHLAQRRGFLSNRKEAGDEKEDGTVKESIKNLSAEMEAAGCRYLGEYFYELYQRKERIRGKYTSRNEHYLAEFNAICDRQRLPDEWREALHHAIFFQRDLKSQKGSVGRCTFEPTKSRCPVSHLRFEEFRMLSFINNIRVTGPGDNAPRPLTTEEVEAIRPLFFRRSKPYFDFEEIARKIAGKGQYACKEDRTEAPYRFNFTRTATVSGCPVTASLMDIFGDDWLREARSLYLLGEGKTEEQVLNDIWHALFSFNDEERLREWACKNLQLTTEQAKAFAAIRLPQEYAALSLNAIRKILVYLRCGYRYDEAVFLANLQAALPKEIYADETRRRAIERDIASLLLDYKRNPYDKFDSKERRIADYFSDHGLDMSRLNRLYHPSKIETYPDAKPNAEGIMQLGSPRTSAIRNPMAMRALFRLRDLVNTLLREEKIDRDTKIRIEFARGLNDANRRKAIEQYQREREAENRKFAEEIRLQYTAETGREITPSEDEVLKYRLWEEQQHVCPYTGRQIRISDFIGANPGFDIEHTLPRARGGDDSQMNKTLCENRFNRDTKRAKLPTELSNHAEIMERIESFGWREKVETLRKQIAAQVRKSKSAATKDARDEAIQRRHYLQMQFDYWRGKYERFTMTEVPEGFSNRQGIDIGIIGKYARLYLKTVFDRIYTVKGSTTAAFRKMWGLQEEYARKERVNHVHHCIDAITIACIGRREYDRWAQYMADEEQFRYGESGKPRYEKPWPTFTEDVKAVADELFVAHHTPNNMAKQTRKKLRIRGRIKLNADGKPIYQQGDTARCRLHQETFYGAIEREGEIRYVVRKALGQLQPGDIDKIVDDAVRDRVREAIDEVGFKTAINSDEYTIWMNREKGIPIRKVRIFTPSVTQPIALKKQRDLSDKEYKQDYHVANDGNYYMAIYEGHDKKGKTKRTFELVSNFEAAQYFKASADREARPDLVPLADANGFPLKCILKTGTMVLFYENSPAELYDCTPEELTKRFYKVTGMSTLTLQQKYKYGTLSLRHHQEARPAGELKAKSGVWKTNEEYRPVISLLHTQLNAYVEGYDFELTVTGEIKFKHGTPC

SEQ ID NO: 4813 - protein, 1224 aa, synthetic construct
  REGION 1..1224: note = Synthetic
MEKILGVDLGTNSIGWAIVEDTDKGYILKDRGVDIFQEGVARDKNNEKPSVQDRTEARALRRHYFRRRLRKIELLRLLVKYGLCPYLTDEQLDLWRMKKQYPLDDGFLQWQRTDDNKDKNPYHDRYVALTQTLNLEKMEHRYMLGRAIYHLAQRRGFISNRKEVGKDKEDGVVKDGIKSLSTEMEKAGCHYIGEYFYKLYQHKGKIRGRYTSRNEHYRAEFDAICERQQLPEEWRKNMYRAIFYQRPLKSQKGLVGKCTFEPKKSRCPVSHPRFEEFRMLSLMNNVRVTSPGEIEPRPLSQCEITTITPLFLRKSKPYFDFEEIARKIAGKGKYACRNDRNEAPYRFNYARTATVSGCPVTAAIVAVFGSDWISEICSLYRLGEGKTEEQVINDVWHALFSFDDEARLKTWAQENLQLTEEQAEDFASIRLPQDYAALSLNAINKILPYLRRGYRYDEAVFLANLKSALPFDIYEDEQRRGEIENDIANLLSSYKRNPYDKYDTKERRITDYFSDHGLDTSRIDRLYHPSMIDTYRRVMPDSEGCMQLGSPRTSSIRNPMAMRSLFRLRALINRLLRDGKIDRDTKVNIEFARGLNDANRRKAIEQYQREREAENRRYADEIRKQYMTESGREIVPSEDDILKYRLWEEQQHICPYTGRQIGISDFIGSSPVFDIEHTVPRARGGDDSQMNKTLCDSRFNRERKRAKLPSELSSHVDILERIESFGWLKRVEDLQKQIEAQVRKSKGAATKTEKDGAIQRRHYLQMQLDYWRGKCERFTMTEVPDGFSNRQGVDIGIIGRYARLYLKTVFDRIYTVKGATTAAFRKMWGLQDEYSKKERTNHVHHCIDAITIACIGRKEYDRWAQYASDEERYSYGESCKPRFEKPWPTFTEDVKAVADELLVSHNTPDNMEKQTRKKMRVRGKVKFNSEGNPIYIQGDTARRKLHQDTFYGAIKREDEVKYVVRKSLGQLQQSDVDKIVDDVVKSRVKEAIREVGFAKAMDPEEYTIWMNEAKRIPIRKVRIFTPSITQPIALRKQRDLSDKEYKQDYHVANDGNYCMAVYEGQDKRGKTKRTFEIISNLEAAKYFKRSADRADRPDLVPMSDSNGYPLKCILKIGTMVLFYEKSPAELYECSRKDLVKRLYKVTGFSTLTVSSNSYGRLTLKFHQEARPAGELKAKSGEWNSAEEYRPVISLLHTQLNAYVEGCDFELTVTGEIKFKHAMPC

SEQ ID NO: 4814 - protein, 1224 aa, synthetic construct
  REGION 1..1224: note = Synthetic
MSKILGLDLGTNSLGWAIVEETGCGYSLLDKGVDIFQEGVAREKNNEKPAVQDRTDARALRRHYFRRRLRKIEVLKVLIDNDLCPRLSEELLTEWRKNKKYPLDEAFIRWQRTDDNLDKNPYHDRYRALTETLDLNKESDRHALGRALYHLAQRRGFISNRKDAGKESEDGQVKQGIKNLTADMENAGCRYLGEYFHTLYLQKEKIRKKYTSRNEHYLTEFRAICAQQHLPEPLEQALYRAIFFQRPLKSQKGAVGKCTFEKRKSRCPVSHPHFEEFRMHSFINNIRIAAPEDNDFRPLTQAEAETIVPLFLRKSKPHFDFEEIARKIAGKGRYACKGDRNEAPYRFNYARIATVSGCPVTASLVAVFGDDWLTEICRRYTLASGKSEQQILNDVWHALISFDDEERLRTWAREKLRLTEEQAAAFAAIRMPQEYAALSLNAIEKMLPYLRAGYRYDEAVFIANLKAALPQTIYEDETHRHEIEQDIVRLLLDYKRNPYDKYDSKERRIEAYFSDNGLDVSRLHRLYHPSMIESYHVQRPDSNGLLQLGSPRTPSVRNPMAMRALFRLRILINRLLRDGKIDPATKINIEFSRGLNDANKRKAIEQYQREREAEHRKFADEIRKQYAAETGTEIEPTETDILKYRLWEEQKHVCPYTGNQIRISDFIGSATDFDIEHTLPRSRGGDDSQMNKTLCENRFNRDIKRAKLPSELSAHAEIMARIEGFGWHEKVEKLQKMIEAQVRKSKGAATKTEKDNAIQRRHYLQIQLAYWRGKIERFTMTEVPDGFSNRQGVDIGIIGRYARLYLKTVFERIYTVKGATTDAFRKMWGLQAEYAKKERVNHVHHCIDAITIACIGRSEYDHWARYVGDEERYLRNEGTRPQFEKPWPTFTEDVKAIADELLVSHHTPDNLPKQSRKRLRIRGKVQVDGQGKPVYMQGDTARGALHQQTFYGAIMRNDEIKHVVRKSLDQLQPADVEKIVDDAVKQKVKDAIECVGFKTAMNPAEHTIWMNREKAVPIRKVRIFTPSVTQPIHLKKQRDASAKAYKQDYLVVNDSNYCMAVYEGTDKRGKTRRSFEIVNSLEAAKYFKASADRTARPDLVPITDVNGDPLKCLLKTGTMVLFYENLPEELHECTQKELAKRLYKVTGFSTLTVSNNSYGRLTMKHHQEARPAGDLKAQDGTWRIKEEYRPVIRILHTQLNAYVEGYDFDMTVTGEIEFKHEPSC

SEQ ID NO: 4815 - protein, 1221 aa, synthetic construct
  REGION 1..1221: note = Synthetic
MEKVLGLDLGTNSIGWAIIQREGDCCTLIDKGVSIFQEGVAREQGAEKPAVQTRTDARALRRAYRRRRKRKIDLLRVLVDHELCPPLTHEQLDLWLQKKRYPLDEAFLAWQRTDEETGRNPYRDRYRALSEQLDLTGEKGRYTLGRALYHIAQRRGFLSNRRDNTAESDGKVKQGIDSLTEAMKAAGCRYLGEYFYMLYGKGEKIRNHYTSRNDHYRAEFDAICSRQQLDPTLTDKLRRAIFYQRPLKSQKGTVGKCTFEKGKSRCPLSHPRFEEFRMLSFINNIRITTPYDFGASRPLNEEERAAAIRMFMRKSKPTFDFEDIAKALAGRKRSYAYEEDAGEAPYRFNYRMSTSVSGCPTTAALADIFGEDWVSGICSLYTRAEGKTKERIVDDVWHVLFSFDDDDKLRQWAAERLQLSEADAEKFAAITPKQGYAALSLNAIDKILPYLRAGRRYDEAVFCANIKAAVPAEVRSDEQLLGRITDEVSRIVADFKPDPTIKADTKQSRIEGCMREHGIEADMKKLYHPSMIETYRKAEAGDDGLVQLGSPRTSSVRNPMAMRALFRMRALLNRLLREGRIDPMTKINIEFARGLNDANKRKAIEQWQREREKENKRYAQEIRKLYEEQTGSPTEPSEEDILKYRLYEEQNHICLYTGRQISITDFIGSSASCDIEHTLPRSRGGDDSQMNKTLCDNRFNRETKCSKLPSELSEHSDVMARIEQLGWKQRIDDLHKQIETASRRSKNATTKEDKDKAIQHRHKLRMQLDYWQGKYERFTMTEVPEGFANRQGVDIGIIGRYARLYLKSVFERIYTVKGATTAAFRKMWGLQEEDSEKERTNHAHHCIDAITIACIGRNEYDRWAQYAAQEEYYRRCEGVKPSFDKPWPTFTEDVRAVADELLVAHSTPDNMSKPTKKRLRKRGRIVSGDDRRPIIVTGDSARASLHKDTFYGAIKRDDEIKYVVRKALTDLDEKDIDKIVDEAVRARVRDAVERMDFTQALAGTIWMNEQKRIPIKRVRIFAPTVTAPIKLKEHRDLSKKEHKHHYHVVNDGNYCMAIYEGQDKKGRTKRSFEIVDNLEAAEYFKASADRSERLDLVPRSDACGNPLRCILKTGTMVLFYENSPEELYDCSKRELAKRLYKLTQFSTLRIGNNSYGIIVFRHHQEARPASELKPKNGVWKIGEEYRPLIRILHTQFNALVEGSDFELTVTGEIIFKHRSHD

SEQ ID NO: 4816 - protein, 1220 aa, synthetic construct
  REGION 1..1220: note = Synthetic
MAKVLGLDLGTNSLGWALVDESENEYTLIDKGVDIFQEGVARDKNNEKPAVQDRTSARALRRHYFRRRLRKIELLKILIRYDLCPPLPEELLTAWQKEKRYPQDNEFLRWQRTDDNGDRNPYHDRYVALSERLDLGNRTQRWLLGRALYHLAQRRGFLSNRKEAGNEKEDGTVKECIKNLSAEIAAAGCRYLGEYFYGLYQHKERIRDKYTSRNEHYLAEFNAICDRQQLPDEWRKALHRAIFFQRDLKSQKGSVGRCTFEPTKSRCPVSHPRFEEFRMLSFVNNIRITGPGDNAPRPLTQEEFETIRSLFFRKSKPYFDFEEIARRIAGKGKYACKEERTEAPYRFNFARTATVSGCPVTASLQAIFGDDWITEIRSLYLLGAGKNEDQMLNDVWHALFSFNDEGRLRSWACEKLQLTDEQAKAFATIKLPQDYAALSLNAIGKILVYLRCGYRYDEAVFLANLRAALPKEVYADESRRHEIEQDIASLLLDYKRNPYNKFDSKEHRIADYFSDHGLDASRLMRLYHPSKIETYPDAQPKANGILQLGSPRTATIRNPMAMRALFRLRNLINTLLREGRIDRDTKIRIEFARGLNDANRRKAIEQYQREREVENRKYAEEIHSQYAAETGREIKPSDDEVLKYRLWEEQQHVCPYTGRQIRISDFVGSAPDFDIEHTLPQARGGDDSQMNKTLCENRFNRETKRAKLPAELSNHVEIMERIESFGWREKMESLQKQIEAQVRRSKSAAIKSEKDDAIQRRHYLQMQLDYWRGKYERFTMAEIPEGFSNRQGVDIGIIGKYARLYLKTVFDRIYTVKGSTTAAFRKMWGLQEEYARKERTNHVHHCIDAITIACIGRREYDRWAQYVADEERYGYGESGKPRFEKPWPTFTEDVKAVAEELLVAHHTPDNMAKQTRRKLRVRGRIKLNADGEPIYQQGDTARCRLHQDTFYGAIKQDGEIHYVIRKSLAQLQPTDIDKIIDDAVRDRVREAIDEVGFKTAMNPDEYTIWMNREKGIPIRKVRIFTPSVKHPIALKKQRDLSAKEYKRDYHVVNEGNYCTVIYEGQDKKGKTKRTFELVSNLEAAQYFKASADREARPDLVPQTDTNGFPLKCILKTGTMVLFYENTPAELYECTRKELVKRLYKVTAMAAEGRVQFLFHQEARDQKTLTSLYGAGTSQFCQSNPSPKLRLSVSNFNMLVEGYDFELTATGEIKFKDDRPC

SEQ ID NO: 4817 - protein, 1219 aa, synthetic construct
  REGION 1..1219: note = Synthetic
MAKILGLDLGTSSIGWAIVEQHDNGYSLLEKGVDIFQEGVARVKNNEKPAVQDRTDARALRRHYFRRRLRKIELLRVLVRHDLCPPLTDAQLDAWRSRKIYPLTEEFLRWQRTDDNTDRNPYRDRYRALTETLDLTARSDRHALGRALYHLAQRRGFLSNRKQAGEEEEGTVKEGIRDLTADMADAGCTYLGEYFYRLYRQKDKIRKHYTSRNAHYLAEFRAICEKQHLPEEWQQALHRAIFFQRPLKSQKGSVGRCTFEKGKSRCPVSHPHFEEFRMLSFVNNIRVQTPADSEPRSLTQSEAEAIRPLFLRKSKPHFDFEEIARKIAGKGKYACKDDRNEAPCRFNFSAATNVSGCPVTAALLFVFGGDLRTIRSRYTLAGDKSDEQVVNDIWHVLFAFDDDELLFDWGREKLGLSPEDARSFAAIRLPQGYASLSLNAIDKMLPHLRAGYRYDEAVFLANLKAVLPAAVWNDRGRREHIEQGIAEVVRNYERNPYDKSDTKERRIAEWLRDQGIDTARCDRFYHPSMIEAYTQARPDKKGLLQLGSPRTAAVRNPMAMRTLFRLRDLLNQLLREGKIDRTTKINIEFARGLNDANRRRAIEQYQREREAENRAFAEEIRKEFAAATDGRFEPTDDDILKYRLWKEQNNICLYTKKQIGLSDFIGSDTRYDIEHTAPRSRGGDDSQMNKTLCEKQFNRDIKRTKLPTELANHQEIMARIEALGWPEKIAGLQRQIEGQRRRSKNATTKAERDSAIQRRHYLQMHLDYWRGKYERFTMTEVPEDFSNRQGVDIGIIGRYARLYLKTVFERIYTVKGATTSAFRKMWGLQEEYTAKKRVNHVHHCIDAITIACIGRNEYERWAQFAGDEERYLRGEAARPRFEKPWPTFTRDVMAVADELLVAHHTPDNLPRQSRKKLRVRGKIQYGNDGKALYMQGDTARGPLHQQTFYGAIKCDDQIRYVVRKPLDQLQPSDIEKIVDEAVKARMREAIAAYGFKEAMDPMKHTVWMNEAKGIPIRKVRIYMPSVTSPIHLKKHRDLSVRKYKQDYHVANDSNYCMAIYEGTDARGKTKRSFRLVNNLEAARYFKASTDRTACPDLVPSSDKNGYPLKCILKTGTMVLFYVNSPEELHECTPNELVKRLYKVTGMSMLALQQKYYFGSLIFKHHQEARPAGELKIKSGVWKIGEDYRPVISILHTQFNACVEHDDFDLTVTGEIKFKR

SEQ ID NO: 4818 - protein, 1211 aa, synthetic construct
  REGION 1..1211: note = Synthetic
MEKVLGLDLGTNSIGWAVVERGEDNKCKLVGKGVNIFQDGVAHDKSGEKPAVHERTSARSSRRHYFRRRLRKIELLKVLIENGLCPALPEAALLEWKRRKLFPLDKAFLEWQRTDDNVDKNPYHDRYLSLFTELDLSRQADRYTLGRAFYHLNQRRGFLSNRKEAVRESDGKVSEDITNLSKEMKDAGCSFLGEFFYKLYAEGKKIRNRYTSREEHYKKEFFAICEKQGLSDGLVHSLERAIFYQRPLKSQKGNVGRCKFEPDKPCCPVSHPLFEEFRMLQFINSIRLKSPSDDDYRPIGKDEYHKILHLFFRKSKPDFDFDEVAKAIAGKGNYCSKDDVGSYGYRFNYSMGTNVPGCPVSAAIMAAIDASPEDWTDILSSVYVKGERKTRAQIVSDIWHSLFFFDDDQKLSEWLSANLQIDAKAASSLSHFNIPQGYASLSLKAISKILPWLRLGYVYSDAVFFANLPAILPKSVLGNKARMDDIEENIRILLSDSPLDGKSGTFNKYNNIHDYLLGVAENVKADKLYHPSQIELYKHALPDENGRILLGSPRTNAFKNPMAMRALFRLRKLINELLVEGTIDPDTKINIEFARGLNDANKRKAIQDYQKNLETQREKDRQEIIELFKSDGIDYEPSSMDLLKYRLYEEQNHRCIYTDRQISPRMFLGNATEFDIEHTIPRSRGGDDSQMNKTLCESRFNRDVKKAKIPSELDSHSILLDRVSEWKEKAEEIDKQIVFWRRRSKHAASKDEKDNAIRRAHYLSMERDYWLGKYNRFVMEKVPDGFSNRQGVDIGIIGRYARMYLKTVFNKIYIVKGATTADFRKAWGLQNEYEKKSRDNHAHHCIDAITIACIGKKEYDEWAGFMKQDEDYRFGRGKRPFFEKPWPTFTEDVSLITTELTIPHYTPDNLPKRAKKKLRIRGIIQRNSDGEIKYARGDSARNPLHMDTFYGAISVNDEIKYVVRKSLDSLKESDIEKIVDDVVRNKVKEAVAKIGSLKKAVSEGIWMNEKLGIPINRVRMFATSVTNPISLKKQRFVSDKEYKRNYYVTNDNNYCMAIYGTKKPSFKLLNSLEAAKQFNGKQSNLIPMSDEKDNPLRFVLKIGTMVLFYENSPSELLSCNSAELSKRLYKVTRLSTLTIQQKYHYGSITLKHHLEARPSTEIKAKNGLWHIGEEYRPIIVLTHKQLNVWVEGVDFDITQTGRIIFKPHPLW

SEQ ID NO: 4819 - protein, 1209 aa, synthetic construct
  REGION 1..1209: note = Synthetic
MEKVLGLDLGTNSIGWAVISREDDGSCSLIDKGVHIFKDGVSHDKSGEKPAVQERTAARASRRHYFRRRLRKIELLKVLTEYGLCPPLTQEQLKKWKEEKVYPLTEAFLAWQRSGNAADGNPYYDRYVALTQKLDLSDINDRYILGRALYHINQRRGFLSNRKNAAEDSEDGKVIQDISQLSESIEKSGCRYLGEYFYKVFREGGKIRRQYTARVEHYHAEFKAICEKQGLDAVLKHSLERAIFYQRPLKSQKGQIGKCSFEPDKPRCSVSHPKYEEFRMEQFINSIKVQRPEEDSLTSLTNEEKKSIRPLFFRNSKPSFTFEDIAKKLAGKGNYSYFEERRDDIYRFNYRMSVSVSGCPVTTALINALELDSFNDWETELCAVYTKAERKTTNEIINDIWHALFSFDDNRLLSQWLRSSLQLSEEKAEALAKCRIPQGYASLSLKAINKILPWLKKGLVYSDAVFYANLPEVLPSSIQKNPAKMSEIEENIRIILEDTPKDQKQRESSKVKNITDYLLGVADGVRPQRLYHPSMIETYPAVLPDEKGRIHLGSPRIESVRNPMAMRSLFRLRALLNELLDDGVIDPDTKINIEFARELNDTNMRKAIADLQRENETIRKKDYEEICQIMGEGYEPTEEDLIKYRLYEEQKHICLYTGKQITPRMFLGNAQIFDIEHTIPRSKGGDDSLANKTLCDSKFNREIKLAKLPSSLEEHDQILQRISNWKDVIESLEIQMSIQRNKARNASSKEEKDSAIRRRHFLRMKRDYWKGKYDRFIMTTVPEGFSNRQGVDIGIIGKYARMYLNTVFKRIYIVKGSTTADFRKAWGLQNEYTKKERVSHSHHCIDAITIACIGKKEYETWAQYMRKEEDYRFGRGVKPHFDKPWETFTEDVLAISSGLVTSHYSPNNLSKKSKKKIRVRGVIQRNADGTPKYAQGHAARVLLHKDSFYGAIQKDGEIRYVIRKSIDSIEEKDISKIVDDVVRAKVMEAVAQYGSLKKAVSETIWMNKDKKVPIRKVRIFAPMITSPIALKPHRDPSNKEYKRNFYVANDSNYCMAIYGSDKTSFKLINSLSAVNHFNRKPGVWVEPCDEKGRLLRCVVRPGTMVLFYEKSPEELYSCSQADLSKRLYEVIGLSTQTIQNKYHYGILTLKHHLEARPSSELKEKKGLWKVGEDIRPIIGINHNQTMFLVENHDFILTVSGRIHFLKEEL

SEQ ID NO: 4820 - protein, 1209 aa, synthetic construct
  REGION 1..1209: note = Synthetic
MNKNKVLGLDLGTNSIGWAIVEERPDGCALREHGVDIFQEGVKIEKGIESSKAAERTKYRAARRRLMRRKLRKIRTLEVLSEQGLCPRIVPERLKAWKQEGQYPLDDEFILWQRTDGDKNPYHDRNEALTRKLDLSVQRDRYILGRAMYHLAQRRGFLSNRLEKTKESDGAVKTGIDELSQDIEKSGCRFLGEYFYRCYCEGEKIRTRYTSRKEHYNAEFDEICRVQQLDENLKKELEKAIFFQRKLRSQKGLVGKCTLEKSKSRCPVSHPRFEEYRMLQLINNIKIQTPIDEALRPLSREEKEQIIPLFLRKSKKQFDFEDIANKLAGKNNYAYYKDNSGKPYLFNYKMNTSVSGSPVTVSLQDIFGEQWDAVLAERYTAKNGKTQQQIVNDVWHVLFFFDDDEKLKEFAMNKLQCSEEEAKKFSEIHLPQDYAALSLNAIEKILPFLREGMLYSHSVFLANMGKALPAEVWNDPESQRVIIRHVADIIDDFPKEGRLPIGDTIESRIASFIEAHFNVLPCRVKDRLYHPTMMETYPEAKSDEFGRLRLGSPRTSSVRNPMAMRALFRLRKLVNTLLDENKIDKSTKIRIEFARGLNDANRRKAIEDYQRERETERKKYYEEIKKLYLEESGREIEPNETDVLKFQLWREQNKICPYTGRTISICQFIGANPEFDIEHTIPRSAGGDDSQMNKTLCESAFNRNEKGSKLPSKLARHAEVLVRIAHWKERCDELRKQIERTKGSFSTKEIKDAMIRKRHKLKLELDYWSGKYRRFEMTEVPEGFSNRQGIDIGIISKYARLYLQSVFPKTYVVKGLTTDAFRKMWGLQEQYEKKERGNHAHHCMDAITIACIGPNEYARMAEYFRNQEQYRWYRNREKPQFPKPWPTFTEDVIAIEQKLLVSHHTPDNMSRQTKKKWRKHGQVQRDDNGKDLYVAGDSARGSLHQDTFYGAIMRDGELKHVVRKSLGSLKEGDVDKIVDEVVREKVRQAVEEKGFKQAMAGPIWMSEEKGVEIKKVRCFTPSVTSPIRLKEHRDLSRHEHKQHLRVVTGGSYLMAVYEVVDAKGKSKRDFEIVNNLDAAKYFKASSDHAAFTDIVPLTSEKGYPLKWTLKSGTMVLFYENSPEEVYEADNTELKKRLYKITIMKKNGQITFIFHQEARSKGELNEKDGEYKSGEEHRPLIRMYSTRLRALVEGHDFELSVTGEVKFKNG

SEQ ID NO: 4821 - protein, 1208 aa, synthetic construct
  REGION 1..1208: note = Synthetic
MEKILGLDLGTNSIGWAVIERGDNNVCKLLDKGVNIFQDGVAHDKSGEKPAVQERTAARSSRRHYFRRRLRKIELLKVLIDNKLCPALPVDALLEWKRKKLFPLQEDFINWQRTDENKDKNPYHDRYLSLFTTLDLNKQEDRYVLGRALYHLNQRRGFLSNRKEAADGSDGKVAESISSLSKEISAAGCKYVGEYFYKMYSEGKKIRNRYTAREEHYKNEFYAICERQNLPESLIHQLERAIFYQRPLRSQKGNVGHCKFEPDKPCCPVSHPRFEEFRMLQFINSIRVQSPADDDLRPINNEELAKIMHLFYRKSKADFEFEEIAKAIAGKGNYCSKDDSGMYAYRFNYSMSTDVPGCPVSAAIISAINSSPSIDWEEDLCSIYTKGNGKTQEQIVNDVWHALFSFDNDEKLTEWLSDALQIDEKAAGTLSKFNIPQGYASLSLKAINKIIPWLKRGLVYSDAVFFANLTDVLPKNIIENKDRLSDIEENIRILLDGQTVDGKESLTSKYKNIYDYLLGVDANVKANKLYHPSQIDLYKPALPDENGQIRLGSPRTKAFKNPMAMRALFRLRKLINALLSEGVIDSKTKINIEFARGLNDTNKRKAIQDYQKNQEALRSQDRQAIIALFKSEGIEYEPSTMDLLKYRLYEEQNHRCIYTDRQITPRMFLGSATEFDIEHTIPRSRGGDDSQMNKTLCDSRFNRDVKKSCIPSELENHAILLDRVSEWKNKVEELDKQIVFWRRKSKHASSKEEKDNAIRRAHLMTMERDYWRGKYNRFVMDKVPEGFSNRQGVDIGIIGRYARMYLKTVFNKIYVVKGATTAEFRKAWGLQNEYEKKERVNHSHHCIDAVTIACIGKNEYDAWAGFMKQDEEYRFGRGKRPFFEKPWPTFTEDVLAITSELTVPHYTPDNMSKCAKKKLRVRGVIQRNDAGKVMYARGDSARGSLHLDTFYGSIKVNDEVKYVVRKSLDSLKDSDIDKIVDETVRDKVKAAVEKHGSLKKAVAEGVWMNETLRIPINKVRIFVPSVTKPISLKEQRFKSDKDYKQNYYVANDNNYCMAVYGTKKPSFKLLNALDATKMINGKRDNVIPLSDDKDNPLRFVLKIGTMVLFYDNSPAELLECDSVELSKRLYKVTGLKYNTERYGMVELKHHLEARPSSELKKKNGKWQIGEGIRPIVVLTHHQLNIWVEGVDFDITETGRIVFKPHPLW

SEQ ID NO: 4822 - protein, 1206 aa, synthetic construct
  REGION 1..1206: note = Synthetic
LGDRAAARHALRTARPGCRHLSGGRGARRHGTGAAGRPTTHRRPRPAEALRPPPAAQDRAAEGARPPRTLSAADRGAARGVEAQEGLSADRRIPALAAHRRPHGPQPLPRPLPGPHRNARPRDAARPLRPRAGILPPRAAARLPEQPQGGGRRPRRGQGEGGHPGALGRDRRRRMRLCRHLFLRALSPRRADPHALHFAHGAPARRIRGHMRASAAARRAVRSAAAGDLLPTAKSQKGLVGRCTFEKRKSRCAASHPRFEEFRMRSYVNNIRIETPADPAPRPLYPEEIEAIVPLFQRKSRPHFDFEDIAKKLAGKGRYACKGDRIEAPYRFNFARKATVSGSPVTAALAGLFGDDWLRELCRRYALGAGKSEERILDDVWHALFSFDDDERLRAWAKERLGLDDDEAARFAAIRLPQGYAALSLNAIRKILPALRAGYRYDDAVFIANLKAVLPPAIRADEAQRSAIEADIAALLDDYRSNPLNRATKEEYIRDYLRDRIGSDESRLRRLYHPSMIETYPAARPDAQGGIRLGSPRTPAVRNPMAMRALHRLRALVNALLRDGKIDPRTKIRIECARELNDANRRKALESYQRQREAEHRKYADEIRAQFAEATGRAVEPTQEDVLKYRLWEEQKHICLYTGRQIGIADFIGDAPRFDIEHTVPRSRGGDDAQENKTLCESRFNRETKRAKLPAELADHAAIAARIEALGWPERIERLRTQLEFQYRKSRQATTKQEKDAAIQRRHCLRMELDYWQSKLERFRMTELPEGFTNRQGVDIGIIGKYARAYLGTVFERIYTVKGTTTAAFRRMWGLQQERTPKARTNHAHHCIDAIVIACIGPREYDLWARYAGDTERYERGEAGRPRCEKPWPTFTEDVRTLTDELLIAHHTADNMVKQSRKRLYKHGKALCDEAGNPRYAQGDTARGALHKQTFYGAILRDDEVQYVVRKPLDQLQKDDVEKIVDEAVKQRVKEAIAEAGFKTATDPAQYTVWMNREKGIPIRKVRIFATSVKRPLRLKEQRDASVHPHKRHYYAVNDANYCMALYEGTNERGRTERSFEVVNRLEAAAFFKASADRASRPDLVPCRDAKGYPLKYILKPGTMVLFYEKTPEELGECTPAELAKRLYKVTGISTSLIEQKYAYGVLTLKHHQEARPSGELKIKKGSWKIGEEYRPLIGMNHTQLNACVEGYDFELTVTGKIRFKH

SEQ ID NO: 4823 - protein, 1205 aa, synthetic construct
  REGION 1..1205: note = Synthetic
MEKVLGIDTGTNSLGWAIVERSENGCRLLDRGTNIFEEGVKIEKGNESSRAAERTEYRHQRRHYWRRKVRKIRLLTVLAEVHLCPPVSKEELRRWRNENQYPGRKDFIDWQRTDDDRNINPYRFRHICLTQKLDLTDLTQRYILGRALYHLNQRRGFLSNRKETTKESDGQVMESIHDLDVKMKEAGCDYLGEYFFQLYERGEKIRNKYTSRKEHYLKEFHAICDKQGLSEDLRRKLEHAIFFQRPLKSQKHLVGSCKFEKGKPRCPVSHPLFEDFRMYQFINNIKIQTPADEMLRPLTAEERAQIIPCFMRKSDFEFKVIAKVLSGGKKNSFGYYKDGVDYPYKFNFQMDTTLSASPVNNALTEIFGQDWLSAVCEVYTLAGKKTRSQVMNDIWHVLFSFDDDEKLKDFARERLQLDEENADKFSQIRMKSDYAALSLKAIRKILYFLKNYGVIYSDAVLLANLSEVLPKQDWNLKETREAAIENIIEYLADFNPGLGNAKIEDYLKDYLQSRYHLDEKTVGKLWHHSDLELYPKAGENQLGSPRTDSVRNPMAMHSLFRIRKVVNLLLQQGKIDEDTIVNIEFSRDLNDANRRKAIQAWNRENEKANTAAEKKIQEFYKDKYGVERQSVSKDDILKYRLWEEQGHNNLYGEGEKIGLEDFLGPNPTYDIEHTIPRSRGGDTTMENLTLCNSVYNRDVKKAKLPSELPNHESILQRIESWKEKYLAFDQQYRKLRRGADATKEDRDRRIQRKHLAMIQRDYWKHKYERFTMTEVPDGFARRQGHDNSVIARYARMYLKSLFKRVYIVKGIATSDFRKLWGIQEEYEKKSRINHVHHCIDAITIACIGKTEYDKLAQQRHTDSDRVWLKAIQKDIPKPWPTFTEDMKHLQNELLIAHYTKDKLPKQTRKKIRDKNGRVVYLTGDTARGALHEQTYYGAIEREGGIRYVVRKSLDSLEEKQCENIVDDEVKRIVKDAILNHGSLAKAVEAGIWMNEEKRIPIRKVRIYTRLTRPLSFDKKKPRDKSVHEYKRNYYVNNDRNYLMAIYRGKDAKGKEKSSFELVNALAAAEFYRKSNDRIGVGNQLVPNEKDGLPLQYLLKVGTMVLVYENSPEEVWDLSPENLQKRLYKITGLSSMILQKKYEYGTLELLHHQDARMSKDIKSTNGVFKETDEFRAKMTMLHTQFHALVEGVDFEINDLGELKRLI

SEQ ID NO: 4824 - protein, 960 aa, synthetic construct
  REGION 1..960: note = Synthetic
LVGKCTFEKDKSRCPVSHPRFEEFRMLQFINNVRVTGPGDAEPRPLSPEEVEIVRPLFLRKSKPHFDFEDIAKKIAGKGNYACRGELLQAPYRFNCAGKSTVTGSPVSALFASVFGDDWQREICSLYTLGAGKNEEQILNDVWHVLFAFEDEERLQAWLQEKLQLSADDAKTLAAFRLPQGYASLSLNVINKILPYLRRGYRYDEAVFFANLGKVLPAEVYADPARRREVEQGISAQMDDLGDGEKTRKEERIRDYLRRYWGVEEKRLERLYHPSMIEAYPSASPNGQGLLQLGSPRIPAVRNPMAMRALFRLRVLLNELLREGKIDRGTKINIELARELNDANKRKAIERYQREREAENRKYAEEIRQQYVEATGHSIEPSEEDILKYRLWVEQGHCSLYTGKTIGISEFLGDGRRYDIEHTVPRSRGGEDAQYNKTLCEEEFNRDIKRDKLPSELANHTAILACVESCGWFERIEGLEHRVWGADRRAKSATTKSAKDFAIQDRHYWRMHLDYWRRKCEAFTMTEVPEGFSNRQGVDVGIIGRYARLYLQTVFDRVYTVKGATTAAFRRMWGLQEEYAAKERVNHVHHCIDAITIACIGSREYALWAQYVRQDELYRRGEADKPRCGKPWPTFTEDVRATADELLISHHTPDNMPKQSRKRLRVRGKVQRNDRGEVKYMQGDTARGALHQQTFYGAIERDGEIRYVVRKSLDQLLPADVEKIVDEAVRQKVREAVEAYGFKEATDPTKHTVWMNEEKQIPIRKVRILTGVKNPILLKPHRDVSVKEYKRYYHVVNDGNYCMAIYEGRDRQGRLKRTFEIVNKLEAARYFKRSADRESRPDLVPLSDVNGYSLKYLLKTGTMVLFYENSPDELYECSVGELAKRLYKVVGMAQDGRVQFLFHQEARDRKAVTAECGMGISVFDARHPAPKLRIRVSNFKMFVEGYDFELTVTGEVKFKR

SEQ ID NO: 4825 - protein, 1222 aa, synthetic construct
  REGION 1..1222: note = Synthetic
MEKVLGVDLGTDSIGWAIVQRHDTRYELLDRGVDIFQEGVARGDTGQEQPAVQQRTAARALRRHYARRRLRKIELLKVLVRHELCPPLTEEQLEEWKRRKVYPLTDEFLRWQRTDDRTDRNPYRDRYRALTETLDLATQHDRYALGRAFYHLAQRRGFRSNRKEAGADREEGKVKGAIRELSAEIADAGCAYAGIYFYELYRRGERIRTRYTSRTEHQLAEFEAICARQRLPDELCGALRRAIFFQRPLKSQKGLVGRCTFEKRKSRCAASHPRFEEFRMRSYVNNIRIETPADPAPRPLYPEEIEAIVPLFQRKSRPHFDFEDIAKKLAGKGRYACKGDRIEAPYRFNFARKATVSGSPVTAALAGLFGDDWLRELCRRYALGAGKSEERILDDVWHALFSFDDDERLRAWAKERLGLDDDEAARFAAIRLPQGYAALSLNAIRKILPALRAGYRYDDAVFIANLKAVLPPAIRADEAQRSAIEADIAALLDDYRSNPLNRATKEEYIRDYLRDRIGSDESRLRRLYHPSMIETYPAARPDAQGGIRLGSPRTPAVRNPMAMRALHRLRALVNALLRDGKIDPRTKIRIECARELNDANRRKALESYQRQREAEHRKYADEIRAQFAEATGRAVEPTQEDVLKYRLWEEQKHICLYTGRQIGIADFIGDAPRFDIEHTVPRSRGGDDAQENKTLCESRFNRETKRAKLPAELADHAAIAARIEALGWPERIERLRTQLEFQYRKSRQATTKQEKDAAIQRRHCLRMELDYWQSKLERFRMTELPEGFTNRQGVDIGIIGKYARAYLGTVFERIYTVKGTTTAAFRRMWGLQQERTPKARTNHAHHCIDAIVIACIGPREYDLWARYAGDTERYERGEAGRPRCEKPWPTFTEDVRTLTDELLIAHHTADNMVKQSRKRLYKHGKALCDEAGNPRYAQGDTARGALHKQTFYGAILRDDEVQYVVRKPLDQLQKDDVEKIVDEAVKQRVKEAIAEAGFKTATDPAQYTVWMNREKGIPIRKVRIFATSVKRPLRLKEQRDASVHPHKRHYYAVNDANYCMALYEGTNERGRTERSFEVVNRLEAAAFFKASADRASRPDLVPCRDAKGYPLKYILKPGTMVLFYEKTPEELGECTPAELAKRLYKVTGISTSLIEQKYAYGVLTLKHHQEARPSGELKIKKGSWKIGEEYRPLIGMNHTQLNACVEGYDFELTVTGKIRFKH

SEQ ID NO: 4826 - protein, 1228 aa, synthetic construct
  REGION 1..1228: note = Synthetic
MTKTLGLDLGTNSIGWAIVERDDNDGRCRLLDRGVDIFQEGVAREKNNEKPAVQDRTEARALRRHYFRRRIRKIELLGLLVKYDLCPPLSRDQLHAWRSRKRYPLDEEFLRWQRTDDAAGRNPYHDRNRALSETLDLNDRADRHALGRALYHLAQRRGFLSNRKQAGAESEDGTVKQGISNLSEAMRKAGCEYLGQYFHTLYLRKEKIRTHYTARNEHFLAEFRAICEKQQLPGEWREALHRAIFYQRPLKSQKGQVGRCTFEKKKSRCPASHPRFEEFRMRSFINNIRITGPGDEEPRPLRTDEIERIRPLFLRKSKPHFDFAELAAKLAGKGNFACKGDRSEAPYRFNFPRTTTVSGCPVTAALIALFGDDWQAALRSRYTLAADKSDDRIVNDIWHALFSFDDEERLRDWARTKLGLSDDEAQHFAAIRMPQDYASLSLNAIDKILPGLRAGLRYDEAVFMANMQAVVPDDVRDDAAKLERIGTDIAVLLEDFGRNPLNARTTKEQCVRDYLRNCCGIDDKHLDRMYHPSMIETYRAALPDAAGILRLGSPRTDSIRNPMAMRALFRLRILLNTLLRQGKIDRTTKINIEFSRNLHDANHRKAFEQYRRDREAENRKYADELRAQYADATGRTIEPTETDILKFRLWKEQQHRCIYTGKQIGIADFIGSNPRFDIEHTVPRSRGGDDSQKNKTLCDCRYNREVKRAKLPSELADAQAIGARIEELGWRKRIDELEKQIGNQIRKSKNASPKQEKDFAIQRRHYLKMQLDYWKGKYERFTMTEVPDGFSNRQGVDIGIIGRYARLYLKSVFERIYTVKGATTDAFRKMWGLQEEYAKKERVNHVHHCIDAITIACIGRTEYDRWAQYKAEDENYRFGRGDRPLFVKPWPTFTEDVLAVADELLVAHHTPDNMGKQSRRKLRVRGRIRRGTDGKPLYAQGDTARGVLHQQTFYGAIRREDEVKYVVRKSLDQLQESDVAKIVDDAVRKRVEKAVADVGFKTATNTAEHTIWMNEEKGVPIRKVRIYTPSVTQPIHLKRHRDLSDKEYKQEYHVANDGNYCMAIYEGTDRRGKTKRSFELVSNLEAARYFRRSADRAARPDLVPQSDADGYPLKCILRPGTMVLFYEASPAELYECTQQELTRRLYKVTGLSILRIQKKWEYGAITLKHHQEARPAGELKAKNGEWKTGEAYRPVIAINHTQLRAYVEGYDFTLSVTGEIEFKHRPSC

SEQ ID NO: 4827 - protein, 1223 aa, synthetic construct
  REGION 1..1223: note = Synthetic
MKKVLGLDLGTNSIGWALVKQDEEGFALLEKGVDIFQEGVAREKNNEKPAVEDRTAARAARRHYFRRRLRKIELLKVLIRYGLCPPLSCEQLDEWRRKKVYPLDASFLQWQRTNDALNKNPYYDRYRALNQTLDLREQADRYTLGRALYHLVQRRGFISNRKDAEKQSEEGKVKSSIKELNQEMEQCGCRYLGEYFYRLYEQKKPIRKKYTSRNEHCLAELKAICRQQHLPQEWEKDLERAIFYQRPLKSQKGLVGKCTFEKSKNRCPASHPLFEEFRMLAFIRNIRMAAPGETDLHPLSCEQVEAIRPLFLRKSKPYFNFEDIAKKLAGKAPFACKGEEGTGESFRFNYPRTTNVSGCPTSAGLVYAFGDQWLSDLCSLYTLGEGKDQEQILDDIWHALFWFPDEDHLRKWAKERFQLSDEQAERFAAIRLSSEYAALSLKAIRKILPYLRKGFRYDQAVFLANLKTALPSCSEQQYEKIENDIAALLEDFHRNPLNEGKTQSDCIREYLLDECPEASPEQLDRLYHPSMIETFPQARPDRAGLFLLGSPRTSSLRNPMAMRALFRLRILINTLLRKGWIDPQTIIRIEYARELNTANMRKAIEFYQREREKENNEYRKEISDLYRKETGREIEPTEDELLKYRLWKEQKGQCLYTGKRIGLCDFIGGAPQFDTEHTVPRSRGGEDEQANKTLCESEFNRKVKQSKLPSELDNHSEILARIDALGWKKEIDELRKQIGRLKNHGDAKEERDRAVIRRHYLTMKKNYLEKKYNSFVRSAPPADFANRQKVDVGIISRYASQYLKTVFPKVFSVKGATTADFRLLWGLQEEGLSPKNRDNHVHHCIDAITIACIDPTMYKLWAQYQQQWEYYQKGKGERPQVKKPWPTFTEDVKSIAEALLVSHHTPDNMSKNSRKKLRKRGRILRNKAGEILYAQGDTARGALHLQTFYGAICHQDEIKYVVRKPVEQLKQEEVGKIVDPAVREKVESAIREVGFKKAVNPQEYTIWMNCEKNIPIRKVRVFVPSVTQPIRLKKHRDLSDKEYKQDYYVTNDNNYCMALYRGKDNKGKTKQTFRLVSALEAAQYFKSKAGKAARGQLLPPFDENGYALACLLRKGTMVLFYENSPEELYTCSQKELARRLYKVTGLSSMILQQKYTYGTVVLKHHQEARPSGELKAKNGAWKINEGYRPIITLLHTQFKAYVQGYDFDLSVTGEITFKHEPPC

SEQ ID NO: 4828 - protein, 1204 aa, synthetic construct
  REGION 1..1204: note = Synthetic
MSKVLGIDLGTNSIGWAIVERDGTSTSLVDKGVHIFQEGVNRVKGNEEPTVKTRTEARASRRHYFRRRLRKIELLKILVEQKWCPYLSSDALKAWKETKRFPLDPDFLKWLRTDDFTNINPYHDRHRCLNEKLDLTKREDRYTLGRALYHLNQRRGFLSNRKDQGSEDATGKVAKDILDLNAEMQSSGFIYIGDYFYHLYNLCEPIRHKYTDRKEHYIKEFNAICEKQDIDLDLVQKLFSAIFFQRPLKSQKGLVGKCPFEKGKPRSPISHPDFEEFRMRSFINNIRVALPGETEMRPLSSAEISAIEPLFFRKSKDTFDFADISKKLAGKGIVPVYKHQDDAARIDTFRINYRDTTTVSGCPVTSQFKALFSEDWKSAICEQYTLSDGKSQEQIIDDIWHALQFFDDDDKLQKWAADRLQLSEKDSKLFASIKVPQGYASLSHCAISKMLPWLREGMRYDEAAMMANIPAVVGKKAWTTNKEEIIRTVVGIVTSYVPNHDIANDSKERKIEEELCNLGIYDLDMTKFYHPSMIETYPQSRPDANGLVLLQSPRTDSIRNPMAMRSLFRLRALINGLIKEGKIDKFTKINIELSRNLNDFNSRRAIDFLQRDNEKRRESYRKSIDMYYAEQGIEAEPTDEDILKYELWEEQKHICLYTGIQIPLSGFLGANPRFDIEHTVPRSRGGDNSKANKTLCESHFNRDIKKSFLPSELANGDEILNRVAACGWEEAMESLRKDIAKATKSAKSASDKASKDKAIQRRHIAKMQLDYYSDKIRRFKMRDVPEGFTNRQGVDIGIIGRYARLYIQSVFEKVYSVKGETTAEFRKMWGLQDSYAKKERVNHTHHCIDAITIACIGKQEYDMWAQYKRDEENFILYGAKKPSFPKPWETFTEDVKGISDNLLVSHYTADNMSKQTKRIMKKSGAIQRGDDGNPKYVRGDSARGSLHLQTYYGAIKKDEEVKYVIRKELALLADKDLKNIVDDVVREKVLKAVENGGLSALQGTIWMNEEKCIPIKKVRLFAPNVTNPLTLKEQRFKSDADYKRNYYVVNESNYAMLIFEGLTEKGKQKRSFKMINNLEAARLFNQKTLDVLPREDENGFSLKYVLQNGTVVLFYEPSEKNLKLLSQKELSKRLYKTLKFSTNSIVCFIHNQEARPVGNIEYRKGPWLSSDEFRPIMAMSYNQVCALVQNVDFKITVTGRIVFL

SEQ ID NO: 4829 - protein, 736 aa, synthetic construct
  REGION 1..736: note = Synthetic
MAKVLGLDLGTNSLGWALVDESENEYTLIDKGVDIFQEGVARDKNNEKPAVQDRTSARALRRHYFRRRLRKIELLKILIRYDLCPPLPEELLTAWQKEKRYPQDNEFLRWQRTDDNGDRNPYHDRYVALSERLDLGNRTQRWLLGRALYHLAQRRGFLSNRKEAGNEKEDGTVKECIKNLSAEIVAAGCRYLGEYFYGLYQHKERIRDKYTSRNEHYLAEFNAICDRQQLPDEWRKALHRAIFFQRDLKSQKGSVGRCTFEPTKSRCPVSHPRFEEFRMLSFVNNIRITGPGDNAPRPLTQEEFETIRSLFFRKSKPYFDFEEIARRIAGKGKYACKEERTEAPYRFNFARTATVSGCPVTASLQAIFGDDWITEIRSLYLLGAGKNEDQMLNDVWHALFSFNDEGRLRSWACEKLQLTDEQAKAFAAIKLPQDYAALSLNAIGKILVYLRCGYRYDEAVFLANLRAALPKEVYADESRRHEIEQDIASLLLDYKRNPYNKFDSKEHRIADYFSDHGLDASRLIRLYHPSKIETYPDAQPKANGILQLGSPRTATIRNPMAMRALFRLRNLINTLLREGRIDRDTKIRIEFARGLNDANRRKAIEQYQREREVENRKYAEEIHSQYAAETGREIKPSDDEVLKYRLWEEQQHVCPYTGRQIRISDFVGSAPDFDIEHTLPQARGGDDSQMNKTLCENRFNRETKRAKLPAELSNHVEIMERIESFGWREKMESLQK

SEQ ID NO: 4830 - protein, 1206 aa, synthetic construct
  REGION 1..1206: note = Synthetic
MEKVLGLDLGTNSIGWAVIGRNEDDTCMLIDRGVHVFQDGVAHDKSGEKPAVLERTAARASRRHYFRRRMRKVALLKVLVREGLCPRLADEDLKKWQNEKVYPLNEEFMLWQRSFDGPDRNPYYDRYRSLTEKLDLTDILDRYTLGRALYHINQRRGFLSNRKDAADDSENGKVKEGISLLSSEMNNAGCRYLGEYFYHLFKKGDKIRCKYTAREEHYKAEFDAICEKQGLSARLKKDIERAIFFQRPLRSQKGNVGKCSFEKGKPRCPISHPRYEEFRMLQFINSVRVQRPYETEAYPLNDKEVQSIKPLFFRKSKPDFPFDEIAKKIAGKGNYAYRENGRNDQYRFNYRMSVSVSACPVSAAIISALGLQGPDGWEEELCSVYTKSDGKMQDGILNDVWHALFFYDDGKKLSEWLSAALQLDEDKADGLAKFRLSQGYAALSLKAINKILPWLRRGHIYSDAVFYANLPAVLPSSVTEDTTKMAVIVENMRILLEDFSRDPLNRESSKVKNISDYLLGVADNVHPEKLYHPSMIETYHAVMPDGKGRVHLGSPRTDAFKNPMAMRALFRLRALLNRLLDEGVIDPSTKINIEFARELNDTNMRKAIADWQKDQEEQRKKDSDAIRSIMGDGYVPSDDVLLKYRLYEEQNHICLYTGRQISPRMFLGGVSEFDIEHTIPRSRGGDDSQANKTLCENKFNREIKKTQIPSELVDHDVILERIAGWKETIEELSNQISFQRRKVRAAQTKEAKDASIRRMHYLKMKLNYWKGKYERFTMTKVPEGFSNRQAVDIGIIGKYARLYLKTLFCKIYVVKGATTAAFRKEWGLQSEYSKKERVNHAHHCIDAVTIACIGKNEYDRWAQYLRKEEDYQFGKGPKPRFEKPWPTFTEDVLAIPSSLIVSHYTPDNLPKLDKKKVRVRGVIQRNVDGKPMYAQGHTARALLHKDTFYGAIQKDDEVRYVVRKPLDSLDEKKDVPKIVDNAVREKVLAAIAEYGSLKKAVTETIWMNKEKGVPIRKVRVFTPTITSPIALKPHRDESDKEYKRSYYVANDSNYCMAIYGDKKPSFKLFNALSAVNHFNGKPVEWIAPTDATGRPLRCIVRAGLMVLFYEESPEELYNCSQEELSRRLYEVTGLAPQNMGKYHYGILTLKHHLEARSSTELTIKKGLWKHGENLRPIIGINNNQALFLVEDQDFVLTVTGRIVFKK

SEQ ID NO: 4831 - protein, 1229 aa, synthetic construct
  REGION 1..1229: note = Synthetic
MYEDVLGIDLGTNSIGWAIVRKYLYHYELLHKGVHIFPMGVTNTDKGEVPSVQERTHARALRRLYFRRRLRKIEILKVLIEYTLCPFLTQEQLLEWKLKKKYPLSEEFLKWQRTDDNIDKNPYHDRHICLTQKLNLENENERYILGRALYHLCQRRGFLSNRKANSRESDGEVKTSISNLSKEIENSGYKYIGEYFYFLYKRGEKIRGKYTARDEHYRKEFNAICDMQELSVELVTKLERAIFFQRPLKSQKGLVGKCSFEKNKSRCPLSHPRFEEFRMLSFINNIKIKTMNDNNYRPLDESEIKLIIPLFHRKAQFEFEDIAKAIAGKKVNYGFKDDKADVAYRFNYKMTTNVSGCPVTSGLIGVFGNDWLNEICSVYQKGENKTQEEILNDIWHVLFSFDNNQKLEEWGRKYLQLTDEQVKKFITISIPQGYASLSLNAINKSLVYLHKGLRYDESIMLANIKSILPQHILNNNEYFTQIESDLINTITDFVFDPDNPKRTKPDAIREYLEDIVERKKLDKIYHPSMIETYPNAVANKDGVVLLGSPRTSSIRNPMAMRALFQLRHLINQLIKEGKINQYTKVNIEFSRNLNDANKRKAIASVQTDNNKKRTKAIKEIQNHFKTQHNIEYTPSENEILKYLLWEEQNHRCIYTGTQIDISDFVGANPKYDIEHTVPRSRGGDDSQLNKTLCESRFNREIKQAKLPSELSNYDEIMAHVVQQGWETKIKDLEKQISRIKTSSANNKVSKDKMIVERHKLRMDLDYWRGKYERFTMKEVPIGFSNRQGVDIGIIGRYARMYLGSYFNKYINTTSRSIDIEDNISSNKQIFTIKGATTAEFRVMWGLQEEYTKKERINHVHHCIDAIVIACIDRAQYQKWATYKQNLEISQWNNFTKPIFEKPWKTFTEDVKAISNSILVSHYTADNMPRKTKKALRIRGKIQRNVEGKIKYQQGDTARGALHNDKFYGAIKKNDNIHYVIRKRLSELSESDVSKIVDEVVKEKVSQAIAERGFKNAFAEPVWMNKEKNIEIKKVRIFVKSTNPIHLKKHRDLSDKDYKLNYYVTNKNNYCLAIYEGIDNKGNTKRSYKIVSNLEAAKKLKLNARKNDVELVPLSDKNDNPLKYFFKIGTMVLFYENSSSEIIKCNISELHSRLYKITGINIDPTGNGYGCIVLTHSSEARSSSEFSTKKGKWKIGEDLRPSITLRHTQFNALVEGFDFELTTTGEIIFK

SEQ ID NO: 4832 - protein, 1224 aa, synthetic construct
  REGION 1..1224: note = Synthetic
MAKVLGLDLGTNSIGWAIVEQNDCGYTLLDKGVDIFQEGVAREKNNEKPAVQDRTNARALRRHYFRRRLRKIELLKVLVKEDMCPALTDEQLSAWQKKKQYPMDEEFLAWQRTCDNTDKNPYHDRFSALTQKLDLNNRQDRHTLGRALYHLAQRRGFLSNRKDTTDPNDSGKVKDGIKDLSDEIKAAGCNYLGEYFYMLYRKKGKIRTKYTSRNEHYLAEFNAICEKQNLPQQLTRALHRAIFYQRPLKSQKGLVGRCTFEKSKSRCPMSHPRFEEFRMLSFINNIRVTGPDDSAPRPLNESERQKILPLFMRKSKPHFDFEEIARKLAGKGQYACKGDAIQAPYRFNFFKSHSVSGCPVTAGLSSIFGDDYKSEICSLYRKAEGKTADRIIDDVWHVLFSFDDEQKLREWAQNNLQLSDTEAEKFADIRPPQGYAMLSLNAIDKMLPHLRTGMRYDEAVFVANLKAVLPADVWVDKAVLNEIEKDIADILQNYVRNPYDRFDSKERRISDYLRGQGIDDSRTGHLYHPSMIETYHKAEPNADGIMQLGDPRTPAVRNPMAMRALFRLRILLNKLLQEGSIDRDTKINIEFARELNDANMRGAIYKFQRENEKKNKEYADEIRKLYKEATGRDIEPTDDDILKYKLWEEQNHKCLYTGTEIGITGFIGTDTRYDIEHTVPRSRGGDDSQANKTLCEKRFNRETKRAKLPSELDNHAEIMARIEALGWKEEIDDLQKQIEGTKVRSRNATTKDKKDAAIQDRHFLEMKRKYWADKYERFTITEVPDGFSLRQGVDIGIIGKYARLYLQTVFDRIYTVKGSTTAAFRKMWGLQSEYTVKSRDNHTHHCMDAITIACIGRKEYDAWAQFEDDEDKHEWYGTARPQFPKPWPTFTEDVKAISDRLLVSHHTADNMPKQSRKKLRIRGKVQYGKDGKPLYVQGDTARGSLHKDTFYGAIEREGEIKYVVRRSLDSLQESEIDKIVDDVVRQKIRDAVAEKGFKEATADTIWMNEQKAIPIRKVRIFATSITQPIHLKKHRDLSTKEYKQEYHVANDSNYCMAIYEGTDKKGKPKRSFEIVSNIEAAAYFKRSADRAARPDLVPQSDKDGFPLKYILKTGTMVLFYENSPAELHECSEQELAKRLYKITTMSSMTLKQGERIYQYGTLVLRHHQEARLATELKEKNGIWKTGEEYRPLIKLYHTQLNAYVEGYDFELSVTGKIAFKHRQP

SEQ ID NO: 4833 - protein, 1227 aa, synthetic construct
  REGION 1..1227: note = Synthetic
MEKVLGLDLGTNSIVWAIIERNGNECKLLGKGVNIFQEGVAREKGVEKPAVQDRTNARASRRHYFRRRLRKIELLKVLVENDMCPHLSLEQLKEWKTNKKYPMEEDFLLWQRTNESENKNPYHDRYRALTETLDLAKQKDRYVLGRAFYHLAQRRGFSSNRKELQSDEDSGMVKSGIRALSQDMEDAHCSYLGEYFYQLYQKREKIREKYTSRNEHYLKEFYAICKKQNLQEDLMLKLRSAIFFQRPLKSQKGFVGKCTFEKGKSRCPASHPRFEEFRMLSFINNIRVADPETRDFRPLSQDEIKQITPLFYRKSKPHFDFEDIAKKIAGKKNEYSCKGDREQKGFRFNYARTATVTGCPVTAEFIAVFGDEWMANMCSQYIHADKKEGENQEDEILNDVWHALFFFEDEEKLCKWATEKLQLDNEQAKVFSEIHLPQDYASLSLNAINKILPYLRMSMRYDEAVFVANLRAVLPKELWENKEKRRQIETDVLQIVEEYSENPLNREFTKEQCVKDYLWHSVGVEEKKLAHLYHPSMIETYPNAECNAQGVLQLGSPRTQSVRNPMAMRALFRLRHLINRLLQEKKIDRNTKINIEFARGLNDANKRKAIEQYQREREKKNQEYREDIRITYKEETGKDIEPTETDILKYRLWKEQNRKCLYTGKEISIRAFLGEDPAFDIEHTIPRSKGGDNSQMNKTLCENRFNRDIKGAKLPSELANHADILARIETLGWEEKIENLQKQVEMRRRDSKRATTKEQKDKAIQSRHKAQMELDYWKGKYQRFVMTEVPEGFSNRQGVDIGIIGKYARLYLKTVFDKIYTVKGATTAEFRKMWGLQDEYAKKERVNHIHHCVDAVVIACIGRNEYDAWAQYMANEERFEKGNGQAPCFAKPWPTFTSDVKRLADEVLISHYTADNMPKQSRKKLRKRGKVQVNADGKPVYLQGDTAREVLHMQTFYGAIERDGEIKYVVRKAISQLQPADVEKIVDETVKQCVKEAIQELGFKKAINPSEYTIWMNKEKQIPIRKVRIFASNVTKPISLKKQRDLSPKDYKQNYYVTNDSNYCLALYEGADAKGKEKRSFGLISNLEAAKYFRLGTDKKKQSYLVPISDKDDYPLKYVLRAGMMVLFYENTPQELYKCSSEELGKRLYKITGLSSMTLQGKYTYGVLTFRHHQEARPAGELKARNGEWKVSDDYRPIIRVYHTQFKALVEGYDFEITITGEMKFKH

SEQ ID NO: 4834 - protein, 1237 aa, synthetic construct
  REGION 1..1237: note = Synthetic
MNLLFSTNTMARILGIDLGTNSIGWAITEEENGIYKLIDKGVNIFQEGVAYDKNNEKPMVEKRTNARALRRHYFRRRLRKIEILKILIDNNLCPFLSAEELNTWREKKQYPLNEEFLSWLRTDDNKDNNPYHDRYIALTQKMNLDNKLERFILGRAIYHIGQRRGFLSNRKDSTKEEEKGKVKSSIKDLDEAIANSGCKYLGEFFYKLYQNKERIRNGSFGEGHGYAYRKDHYLKEFEVICQKQHISQELHDKLYHAIFFQRPLKSQKGAVGYCTFEKGKARCPISHPSFEEFRMLQFINSIKVQTPNDKKLRELTEEERNSIIPLFMRKSKPHFEFEEIAKKIASNKKNNYGYFKDKDNKQYLFNYHLDTTVSGCPLIASLLNLFGDEWVEHLCSVYTKSENKSKEQIINDIWHVLFTFDDCDKLMEWGITNLQLSPEEAKKFSEINTVQGYASMSLNAINKSLPYLRAGYRYDQAIFLANLKSVVGENRWNNIEQRDRIINDVCTAIEEFAFVKRVEKTKKEYIQKILLDEYGIEKSYSDKLYHPSRVEGFKDAEIDHTGTLQLGSPRTSSIRNPMAMRSLFRLRILINELLRNKLIDKETRVNIEMARELNDANKRAAIKLYQKELEENHKKYAKEISKAYFEETGIRIIPTDDDIQKYQLWEEQKHKCLYTGEEIGIADFIGCGNKYDIEHTVPRSRGGDDSQANKTLCNNQFNRELKQAKLPSELNCIFDIRVRIEELGWNKKIEEFEKQIAQQVKKSKTATTKEAKDNAIRQRHYLKLKLDYWKDKVHRFNITEINEGFTKRQGVDIGIISRYARMYLQTAFKKVHTVKGATTADFRKMWGLQDIYTKKERNNHVHHCIDAITIACIGHGAYDLWKKYCENSDKHKFGNSSKAVVEKPWISFTEDVKNIVEEILVSHYTANNVPKQSKKKMRVRGVVQYNEKNEIKYQQGDTARSSLHKETFYGAIMKDDEIKYVIRKSLSSLEETDVEKIVDETIKQCIKDAIKAEGFKAAMSKPVCFNKEKGVYIKKVRIYAPSVKQPICLKQHQQQSKHEYKQGYYVVNDGNYCMGIYEGTDEKGKVKRNFKIVNNLEATEFFNGKSNELQLVSMSDNNDLPLKYIIKAGTMVLFYEKEPYEFYNCNKAELNKRLYKITGFSTQQIKRNTGKIDKYGAMTLKHHQEARPAGELKAKNGEWKIGEEYRPIISLLHSQFNAYVEGYDFELTVTGEIIFKH

SEQ ID NO: 4835 - protein, 1256 aa, synthetic construct
  REGION 1..1256: note = Synthetic
VVRCRSLTLQIYIKNRISATFYLILQKTSLFMDKILGLDLGTHSLGWAIVEETESGYTLIDKGVDIFQEGVLRDKNNEKPAVQDRTQARASRRHYFRRRLRKIELLKVLVEHDLCPSLTEEQLTLWRKKKRYPLDEEFLLWQRTDDNLDRNPYHDRYRVLTEKLDLSIRQQRHLLGRAIYHLAQRRGFLSNRKDAGDEKEEGKVKSSIKNLSDEMAAAGCRYLGEYFYRLYQNKERIRGKYTSRNEHYLAEFHAICERQQLPETWRKELHRAIFFQRDLKSQKGLVGKCTFEPKKSRCPVSHPHFEEYRMLCFMNNIRIQGPQDNAPRPLTQEEIKVITPLFLRKSKPYFDFEEIARKIAGKGRYACKDDRNEAPYRFNFSRSTTVSGCPVTASLIALFGDNWLPEMCSLYRLGEGKTEDQIFNDVWHALISFKDEDCLQAWACEKLQLSEDQAKKFTSIKIPSDYAALSLKAINKILPYLRRGYRYDEAVFLANLKATLPQEVFANSSRRLQIEQDIASLLLDFQTNPLNRHKTKEACIADYFDEHGLDTSRLDRLYHPSKTETYRDAQPNAEGILQLGSPRTSSIRNPMAMRALFRMRALVNQLLREGRIDRDTKINIEFARKLNDANRRKAIEQYQREREAENRKYAEEIRKHYMTETGKEIEPSEDDILKYRLWEEQNHTCPYTGQPICISAFIGSAPVYDIEHTVPLARGGDDSQMNKTLCKSYFNREIKQNKLPSELSNHAEILERIESFGWRERIESLKKQIAIQTRKKDSATTKEQKDAAIQQRHFLQMHLDYWRGKYERFTMTEVPEGFSNRQGVDIGIIGKYARFYLKTVFNRIYTVKGSTTDAFRKMWGLQEEYTKKERTNHVHHCIDAITIACIGRKEYDRWARYTVAEEQFRFGKGPKPHFEKPWPTFTEDVKSVANELLVAHHTADNMPKQTRKKLRIRGKVKLNDAGQPIYMQGDTARALLHKDTFYGAIKRDDEIRYVVRKPLEQLQPTDVDKIVDEAVKARIKEAIDEVGFKTAMNTSEYTIWMNREKRVPIRKVRIFTPTVTQPISLKKQRDPSDKEYKQDYHVVNDSNYCMAIYEGVDKKGKTKRSFEIVSNLEAAQYFKASADRDDRPDLVPIADTNGYPLKYILKTGTMVLFYEHTPAELYECTRAELVKRLYKVTGMSVLTLQQKYRYGTLTLKHHQEARPAGELKAKNGEWTYQEEYRPVISLLHTQFNAYVEGYDFELTVTGEIIFKHSMPC

SEQ ID NO: 4836 - protein, 1145 aa, synthetic construct
  REGION 1..1145: note = Synthetic
LCPPLTHEQLDLWLQKKRYPLDETFLAWQRTDESTGRNPYRDRYRALSEQLDLTGEKGRYTLGRALYHIAQRRGFLSNRRDNTAESDGKVKQGIDSLTEAMKAAGCRYLGEYFYMLHGKGEKIRNHYTSRNDHYRAEFDAICSRQQLDPTLTDKLRRAIFYQRPLKSQKGTVGRCTFEKGKSRCPLSHPRFEEFRMLSFINNIRITTPYDFGASRPLNEEERAAAIRMFMRKSKPTFDFEDIAKALAGRKRSYAYEEDAGEAPYRFNYRMSTSVSGCPTTAALADIFGEDWVSGICSLYTRAEGKTKERIVDDVWHVLFSFDDEERLRDWARTKLGLSEDEAQHFAAIRMPQDYASLSLNAIDKILPGLRAGLRYDEAVFMANMQAVVPDDVRDDAAKLERIGTDIAVLLEDFGRNPLNVRTTKEQCVRDYLRNCCGIDDKHLDRMYHPSMIETYRAALPDAAGILRLGSPRTDSIRNPMAMRALFRLRILLNTLLRQGKIDRTTKINIEFSRNLHDANHRKAFEQYRRDREAENRKYADELRTQYADATGRTIEPTETDILKFRLWKEQQHRCIYTGKQIGIADFIGSNPRFDIEHTVPRSRGGDDSQKNKTLCDCRYNREVKRAKLPSELADAQAIGARIEELGWRKRIDELEKQIGNQIRKSKNASTKQEKDFAIQRRHYLKMQLDYWKGKYERFTMTEVPDGFSNRQGVDIGIIGRYARLYLKSVFERIYTVKGATTDAFRKMWGLQEEYAKKERVNHVHHCIDAITIACIGRTEYDRWAQYKAEDENYRFGRGDRPLFVKPWPTFTEDVLAVAEGLLVAHHTPDNMGKQSRRKLRVRGRIRRGTDGKPLYAQGDTARGVLHQQTFYGAIRREDEVKYVVRKSLDQLQESDVAKIVDDAVRKRVEKAVADVGFKTATNTAEHTIWMNEEKGVPIRKVRIYTPSVTQPIHLKRHRDLSDKEYKQEYHVANDGNYCMAIYEGTDRRGKTKRSFELVSNLEAARYFRRSADRAARPDLVPQSDADGYPLKCILRPGTMVLFYENSPAELYECTQQELTRRLYKVTGLSILRVQKKWEYGAITFKHHQEARPAGELKAKNGEWKTGEAYRPVIGMYHTQLRAYVEGYDFTLSVTGEIEFKHRPSC

SEQ ID NO: 4837 - protein, 981 aa, synthetic construct
  REGION 1..981: note = Synthetic
MAKVLGLDLGTNSLGWALVDESENEYTLIDKGVDIFQEGVARDKNNEKPAVQDRTSARALRRHYFRRRLRKIELLKILIRYDLCPPLPEELLTAWQKEKRYPQDNEFLRWQRTDDNGDRNPYHDRYVALSERLDLGNRTQRWLLGRALYHLAQRRGFLSNRKEAGNEKEDGTVKECIKNLSAEIAAAGCRYLGEYFYGLYQHKERIRDKYTSRNEHYLAEFNAICDRQQLPDEWRKALHRAIFFQRDLKSQKGSVGRCTFEPTKSRCPVSHPRFEEFRMLSFVNNIRITGPGDNAPRPLTQEEFETIRSLFFRKSKPYFDFEEIARRIAGKGKYACKEERTEAPYRFNFARTATVSGCPVTASLQAIFGDDWITEIRSLYLLGAGKNEDQMLNDVWHALFSFNDEGRLRSWACEKLQLTDEQAKAFAAIKLPQDYAALSLNAIGKILVYLRCGYRYDEAVFLANLRAALPKEVYADESRRHEIEQDIASLLLDYKRNPYNKFDSKEHRIADYFSDHGLDASRLIRLYHPSKIETYPDAQPKANGILQLGSPRTATIRNPMAMRALFRLRNLINTLLREGRIDRDTKIRIEFARGLNDANRRKAIEQYQREREVENRKYAEEIHSQYAAETGREIKPSDDEVLKYRLWEEQQHVCPYTGRQIRISDFVGSAPDFDIEHTLPQARGGDDSQMNKTLCENRFNRETKRAKLPAELSNHVEIMERIESFGWREKMESLQKQIEAQVRRSKSAAIKSEKDDAIQRRHYLQMQLDYWRGKYERFTMAEIPEGFSNRQGVDIGIIGKYARLYLKTVFDRIYTVKGSTTAAFRKMWGLQEEYARKERTNHVHHCIDAITIACIGRREYDRWAQYVADEERYGYGESGKPRFEKPWPTFTEDVKAAADELLVAHHTPDNMTKQTRRKLRVRGRIKLNADGEPIYQQGDTARCRLHQDTFYGAIKQDGEIRYVIRKSLAQLQPTDIDKIIE

SEQ ID NO: 4838 - protein, 1210 aa, synthetic construct
  REGION 1..1210: note = Synthetic
MEKVLGLDLGTNSIGWAVIGRNEDDSCMLIDRGVHIFQDGVAHDKSGEKPAVQERTAARASRRHYFRRRMRKVELLKVLVREGFCPHLSDEDLKKWQNEKVYPLNEDFMRWQRSYAEPDRNPYHDRYRALTEKLDLTETRDRYVLGRALYHINQRRGFLSNRKDAADDAESGKVKEGISKLSKEMAKAGCRYLGEYFYRLFQKGDKIRCKYTAREEHYKAEFEAICEKQNLSARLKTDLERTIFFQRSLRSQKGSVGKCSFEKGKPRCPVSHPRYEEFRMLQLINSVRVQRPFETEASPLNDEEVQSIKSLFFRKSKADFPFEEIAKKIAGKGNYAYKENGRDDQYRFNYRMSVSVSACPVSAAIISALGLQGPDGWEEELCSVYTKADGKTPDGILNDVWHALFFYDDGKKLSEWLSAALQLDEEKADGLAKFRLSQGYAALSLKAINKILPWLRRGHIYSDAVFYANLPAVLPSSVTQDTAKMADVFENVRTLLEDFSRDPLSRESSKVKNISDYLLGVSDGVHTEKLYHPSMIETYRAVMPDGRGQVHLGSPRTEAFKNPMAMRALFRLRALLNRLLDEGIIDPTTKINIEFARELNDTNMRKAIADWQKDMEEQRKKDAEAIRSIMGDGYVPSEDELLKYRLYEEQNHICLYTGRQISPRMFLGGVSEFDIEHTIPRSRGGDDSQANKTLCENKFNREIKKTQIPSELVDHDVILERIAGWKETIEELSNQISFQRRKARGAQTKEAKDAAIRRMHYLKMKLNYWKGKYERFTMTKVPEGFSNRQGVDIGIIGRYARLYLKTLFRKIYVVKGATTAAFRKEWGLQNEYSKKERVNHAHHCIDAVTIACIGKNEYDRWAQYLRKEEDYQFGKGPKPRFEKPWPTFTEDVLAIPSSLIVSHYTPDNLPKLDKKKVRVRGVIQRNSDGEPMYAQGHTARALLHKDTFYGAIQKDDDVRYVVRKPLDSLDEKKDVPKIVDDAVREKVLAAIAEHGSLKKAVAETIWMNKEKGVPIRKVRVYTPTITSPIALKPHRDESDKEYKRNYYVANDSNYCMAIYGDDKPSFKLFNALSAVNHFNGKDGTWIDEVNEKGQPLRCILRTGTMVLLYEKSPEELYACSQEELSLRLYKVTILSSMTVQGKYRYGTITLKHHLEARPSTEIKEKKGLWRIDEDFRPVIGLNHNQTKFLVEGVDFHLTVTGKIFFKKKGK

SEQ ID NO: 4839 - protein, 1275 aa, synthetic construct
  REGION 1..1275: note = Synthetic
LKTVLFLYSAFYCVLRFFILSSFVTVTTLMLRRLASFLPFFEVIPAFFCKFADKAKKPMEKVLGIDLGTNSVGWAVIEREGDARRLVDKGVSIFQEGVARDQGVEKPAVQQRTEARALRRTYRRRRKRKIDLLRVLVRHELCPPLTDEQLDRWQSHKKYPLDDAFIAWQRTDETSDKNPYRDRYRALTERLDMSVRADRYALGRAFYHMAQRRGFLSNRKDETEKSEGDVKQGIASLTEAMREAGCEYLGEYFYRLYRDGGKIRGTYTSRNEHYKAEFDAVCRRQELPPELTEALRKAIFHQRPLKSQKGSVGKCTFERSKSRCPLSHPRYEEFRMLSFLNNIRITTPHDDTTPRRLVAEERAAIMPLFMRKSKPMFDFEDIAKRIAGRKSAYAYDGDASEAPYRFNYRMSDSVAGCPMTTALKEIFGEDYIATICSLYTLADGKSPERIVDDVWHALFWFDDEDKLKQWAADRLRLSDDDAARFAAISTKQGYASLSLNAIDKILPYLRNGYRYDEAVFCANLKAALPTDARNDESLRREIVGDVAAIVADFRPNPYMKGDTKESRIDEYLRRRGIEADMRRIYHPSKTETYPDAEPNAEGMRLLGSPRTSSVRNPMAMRALFRLRTLINRLLNDGRIDPSTKINIEFARGLNDANKRKAIERYQRERENEHNKFADEIRNLYGRPIDPSENDILKYRLWEEQNHICLYTGRQIGITDFIGSDTTCDIEHTVPRSRGGDDSLQNKTLCDNRYNRDVKRGKLPSELPDRDAIMARIETLGWAQKIEDLRRQIERAARNSKSAATKEDKDNAIQRRHKLRMELDYRVGKYERFTITEAPDGFSNRQGVDIGIISRYARLYLKTVFDRVYTVKGATTAEFRKMWGLQEEYAKKERTNHVHHCIDAITIACIGRKEYDLWAQYAAEEEYYRYCKGRKPVFEKPWPTFTEDVKAATDELLVAHHTPDNMPKRTRKRLRKRGKVQHNAAGKIKYATGDSARGSLHKDTFYGAIERDGVIKYVVRKRVADLGPKDVEKIVDEAVRQKIRDAIDKLGFKEAVASTIYMNEEKRIPINRVRIFVPSVTSPIELKEHRDLSAKEYKRHYHVVNDGNYCMAIYEGADKKGKPKRSFEIVNNLEAAEYFKRGADRTSRPDLVPQSDANGYPLKCILKTGTMVLFYENTPAELYDCSTKELGARLYKLTELSSMTVNNNRYGLITFRHHREARPAKDLKAKNGEWKTDEEYRPRIKILHTQLNAFVEGYDFELTVAGDIIFKRTRHD

SEQ ID NO: 4840 - protein, 1219 aa, synthetic construct
  REGION 1..1219: note = Synthetic
MEKILGLDLGTNSIGWAIINRDEDSRTLVNRGVCIFQEGVARDKSGEKPAVQDRTNARALRRHYFRRRLRKIELLQVLIRHDLCPALSDAELEEWRAHKKFPLNDEFILWQRTDDNADKNPYHDRYRALTEELNLSTQHDRYTLGRALYHLGQRRGFLSNRKEAGKDSEDGKVKESIRELSEEMHAAGCNYLGEYFYRLYGVEQIRKHYTARNEHYLAEFNAICEKQHLSEALKKELHRAIFFQRPLKSQKGLVGKCTFEKRKSRCPVSHPRFEEFRMLQFINNIRIQTPSDEDPRSLNQEEYEMIEPLFYRKSKPHFTFEEIAKKLAGKGKYTCKGDRTDLPVHFNFSATTTVSGCPVTAQLKDVFGDDYIAGIRSLYMLGANKTEDQILNDIWHVLFSFDDDEYLKEWAGRNLQLPEEDAEKFVKITLPQDYAALSLNAINKILPDLRRGYRYDEAVFMANLQNVLPPEIRTDKQQVDQIRKNIRIELEDNVQAGHLTQEKVIINYLEHQVGIDKRHMQRLYHPSMIETYPAVHPDDEGRIRLGSPRISAIRNPMAMRALFRMRALINELLDKGEISPATKINIEFARGLNDANKRKAIENYQRHREQQRDEYKKEIIKLYKAETGREIEPSESDLLKYQLWEEQNHICPYTGKTISIRDFVGSDVSFDIEHTIPRSMNGDDSQMNKTLCESHFNRDIKKGQLPSSLANYNEIMARIETFKWQEEIDELEKQISKLKMRSKSAATKPEKDSAIQRRHELQMELDYWRGKMERFTTTQAPEGFTNRQGVDIGIIGRYARLYLKTVFEKVYTVKGATTAEFRKMWGLQDIYSKKERVNHIHHCIDAITIACIGAKEYTEWAHYASAEEYYRWGQGARPSFPKPWPTFTEDVKNIGEELLVAHDTPDNMSKPSRKKLRKRGIICSNKAGEPLYIQGDTARGVLHQQTFYGAIKRDDEIKYVIRKSLDQIAKKDIANIVDEVVRQKVQDAVEQYGERILKDSGHTIWMNEEKRIPIRKVRLFTPSITQPIHLKEQRFRSPQPHKRDYYVANDSNYCMGIYEGTDSKGKTKRGFRLVNNLEAARYFNEKRKGNSLCDLVPLSDEHEYPLKYILKVGTMVLFYENTPEELFEASEEELSKRLYKVTGMSSTTVDQIYNYGRIIFKHHQEARSAGELKAKNGLWKINEDYRPVIGINHTKFNALVEGYDFDLSVTGKITFKHVL

SEQ ID NO: 4841 - protein, 749 aa, synthetic construct
  REGION 1..749: note = Synthetic
VLPPDIYSDESERNAIEADIAALITDFRRNPLNRGTTKEQCVRDYLRNCRGIDEKRLGRLYHPSMIEIYQTAQPDAQGVLQLGSPRTPAVRNPMAMRALFRLRVLVNRLLRDGKIDRETKIHIEFARGLNDANRRKAIELYQRDREAERKAYADEIRRQYASESGREIEPTDDDILKYRLWKEQNHICPYTGKRIGLSDFMGDSARFDIEHTVPRARGGDNSQMNKTLCENRFNRELKRDKLPSELPNHADVMARIDELGWPKEIASLQKQIEIQRRKSKSATTKSEKDGAIQRRHILQMRLDYWRGKYERFTMTEVPDGFSNRQGVDIGIIGKYARLYLKTVFERIYTVKGATTAEFRRMWGLQEEHTRKERVNHVHHCIDAITIACIGKREYDRWARYVCQDERYRRGEADRPQPEKPWPTFTEDVRAVAEELLVSHHTPDNMPKQSRKRLRVRGRVQKNDKGETKYMQGDTARGALHEQTFYGAIEREGEIRYVVRKSLDQLLPTDVDKIVDETVKRKVQEAIEAFGFKEAMDPQKHTVWMNKDKNVPIRKGRILTGVKNPILLKPHRDVSVKEYKRYYHVVNDGNYCMAIYEGRDRQGRLKRTFEIVNKLEAARYFKRSADRESRPDLVPLSDVNGYSLKYLLKTGTMVLFYENSPDELYECSVGELAKRLYKVVGMAQDGRVQFLFHQEARDRKAVTAECGMGISVFDARHPAPKLRIRVSNFKMFVEGYDFELTVTGEVKFKR

SEQ ID NO: 4842 - protein, 1215 aa, synthetic construct
  REGION 1..1215: note = Synthetic
MENILGIDLGTNSIGWAITERQGEGFLLKKSGVNIFQEGVAREKNEEKPSVALRTASRGIRRHYFRRRLRKIEVLKVLVKAKLCPPLTDEMLEKWRYEKIYPLDEAFMNWQRTSDNEDKNPYHDRYEALTRELDLSCVSERYLLGRALYHLSQRRGFLSNRKDTTEDSDGKVQSSIEEIDMEMEAMGCECLGEYFYRLHLSGEKVRGKYTSRNSHYRKEFEAICRKQHLSDELSEELRRAIFFQRPLKSQKGSVGKCTFEKTKSRCSVSHPLYEEFRMLSLLNNIRIRTRNDSDYRPLTEEERNRIKPKFFRKTKDRFDFKELAKELCGKRISYGFRDDKEDLDVRFNYRMSASVSGCPVTAGLMDVFGEDWLSSMCSVYQLSAGKTEEEILQDVWHALFSFDDNERLRRGAELKLQLTSEQSDKFAKIRISREYASLSRKAIARILPYLRTGLRYDEAVFCGNLQGVVPAYVWTDRDRRRLAEGGVVGVLSNLRDNPTMRGKTNMQVVSDYLREVFPDETLRCERLYHPSMIETYQKAEPNDYGLRLLGSPRTQSVKNPMAMRALFRLRALVNQLLRDGDITPETKINIEFARGLNDANKRKAIMAYQEEARRRREKYADAIKEFFLKETGKEILPSEDDVLKYQLWEEQGHICLYTGTKIGLADFLGPNPKYDIEHTVPRSRGGDNSQENKTLCDRRFNREIKGAKLPAELACHAEVMDRVEVEWLKKIDALSAQIARKKGGGGDKASKDRRIVERHRLTMERDYWRGKLRRFTMTDVPEGFSLRQGVDIGIIGKYARLYLQTVFDKTYVVKGATTAAFRKMWGLQDDYSKKERVNHTHHCIDAITIACIGKREYDRWAQYERDSERYERGLGEKPSFKKPWPTFTEDVKSLVPSLLVFHHTPDNARKATRKLVRIRGKVRKTADGRAMVARGDSARLSLHQQTFYGAILKEGEVKYVVRKALSLLQPSDVDRIVDPEVRAKVQTAVEAKGFKEAMAGEIWMNEQKRIPIKKVRIFTPNVVAPIRLKKHRDESVFNHKRHYHVANDGNYCMAVYEGTDNKGQRKRTSRVVNNLDAAGYFKRKARGEDGDLVPMSDDSGNPLLWILRTGTMVLFYEHSPEELFNCDKSELSKRLYKIVGMSTMTVSGRYQYGILTLRHHQEARQSFLLPRAKKGLWKEGEDYRPLVGVNNNQLNFLVSGYDFDLSLTGEIKFKQ

SEQ ID NO: 4843 - protein, 1017 aa, synthetic construct
  REGION 1..1017: note = Synthetic
MRIFGFDLGVASIGWAVVDIDKENDNPEAGRAAIGKIQQSGVRIFSKAESTDGSSLAAPRREKRLVRRALRRKALRMKEIRALLENSGLGSQNIVVNADDIDVWALRAQDAFCRKLSARELSRVLIHMAKHRGYKSMRKSAEENDKETGKVLVSIARNRESMGEYKTMAQMIYKSNCDGARKYRNGDGVYDNSIPREEIERELNYIFDAQQKYGVFTEDLLEQYKKIAFRVRPIQSVGKMVGLCTLEPNCLRAPKESPTAELFVALTKINNMKIVIDGEVRSVDDAERAAILELLSKTQTVKYKTLHNKIWKGKDVVFRGVKEESQDFYSMTGWHKLKKIMDEADMADTRMLDRIMKVVATQKDDSAIEKELRRKKVPEKYIVELKKLCTSKFINLSLQALYKIVPEMMRGLTYDKACDGAGYDFKSKVSGEVKADNGCIAEISEWTHVPVVNRTVAQFRKVYNALVRKYGIPDQVNLEVGRELKNNFDDRKKIERKQNENRDKTEKARAEYEALISRKVTTKEVLKYKLYQDQGGKCMYSGESIDLEHLDNYEVDHILPYSRSLDNSYMNKILVKYTENQIKGNKTPYEYFGNTLRWDDFVVRVSATKTLGARKIYNLLNKDFETTEDDFRKRNANDNAYAARYVRQVLNTAFPDLRVDVRAGALTHYLRGQWGLEKSRTESDRHHAQDAIVIACATPGMVRYLSTISGLFENKRNEKGKPWWNNLKQNIQEPWAGFRADVFRSVDDVFVSRTVRGKATGSVHKDTINSPKSSKGSLILPRGRADKENMFRMDVFKKDGKYVVVPIFVADTVDKKRQDIFYPQPAKAEHSVAIDGTYEFVMTLHKEDYIKIVTVDDKVYEGYIIQCDMPRGKFVFRNSDNSAVFSVKTDTFEPGDFIVIDGNLCKVMDYLAGKLRALSPNGIVEEVEAVKKQTRKGKQIQTIDKYEKRSKQKTINIGTVKNLQKFQIGVLGDMSEVKSGHRAPVCAIKLQSEKRKGRKQPKRNKNGLANPSTNETM

SEQ ID NO: 4844 - protein, 1022 aa, synthetic construct
  REGION 1..1022: note = Synthetic
MRIFGFDLGIASIGWAVVDIEKENNNPETGRAAVGKIQQSGVRIFSVAENPKDGSSLAAPRREKRSIRRALRRKALRMKELRGVLENNGLGNQNIVVDAGDVDVWALRAEDVFCRKLSPRELSRVLIHMAKHRGYKSMRKSAEENDKETGKVLASIALNRERMGGYKTMAQMIYKNNCDGAKKYRNGDGVYDNSIPREEIERELDLIFEAQHKYGMFTADLFEQYKKIAFRVRPIQSVSKMVGGCTLEPNCLRAPKEAPTAELFVALTKINNMKIVIDGETRSVNDEECAAILDLLRKTQTVKYKTLHNKIWKGQDVVFRGVKDETQDFYSMTGWHKLKKILDDPDMSDTRMLDRIMKVVATKKDDAAIEKELRRKKIPEKYIDKLKALSTSKFINLSLQALYKIVPEMIRGMTYDKACTAAGYDFKNKISGEVKIDNGCIREIAEWTRVPVVNRTVAQFRKVYNALIRKYGVPDQVNLEVGRELKNNFDDRKKIERQQNENRDKNDSARTEYETLTGRKATAKDALKYKLYRDQNGKCMYSGEAIDLEHLDNYEIDHILPYSRSLDNSYMNKVLVKYTENQAKGNKTPYEYFGNATRWDDFVGRVSATKTLGARKIYNLLNKDFEASEEDFRERNVSDNAYAARYVRQILNTAFPDLRVDVRAGALTHYLRGQWGLEKSRTESDRHHAQDAIVIACATPGMVRYLSTISGLFENKRNEKGKPWWDNLKQNIQEPWEGFRTDVLQSVEDVFVSRTIRGKATGSAHKDTINSPKSGKGSMILPRGRADKDNMFRMDIFKKDGKYVVVPIFVADTVDKNRQDIFYPQPPKAEQPVAIDDTYEFVMTLHKDDYIKITTVDDKVYEGYIIKCQLPAGQFFIRNSDNSAVFSVKTDTFEPDDLIVIGGNLCKVMDCESGKLRAMCPNGLIEEVEAIRKQTRSGIDSKKQIKTIGKYEKCDVQKTLSVGTFKKLQKFQISVLGDISEVKSERRALVCAIKSQSEKRKGRKQPKRNKNGVAHPSTNKTV

SEQ ID NO: 4845 - protein, 1354 aa, synthetic construct
  REGION 1..1354: note = Synthetic
MATSLGLDVGSNSVGSAWIDFQTGQITAGVSVFPAGVDESEDKRGEPKNAKRRMTRQTRITLARRAARKRMLRLKLIDAGLLPKSATEFKKLLEETDPWELRRKCLDTELKPHEFGRVLLHLAQRRGALGLKIVDESDEDGKAGAKDDGKVKAAISEVRAKMKARSARTFGEFISMVQAERVTPITTVDHRPEKARKGPREWRLPVRNKAGSYEHCADRNMLRDEFKKLWDKQTELGGPLAKLLTEDLRLVLDNEAGDAVWRHKGLLFGQRRNTWDLGTLGRCVLEPTERCVPHADRYASRYLVAETLNNLKIIEWGKLPRALTPEERDKIKDYLSGPLGVEKGRKVKGVLLPDKPKMTVNVTDLRNLMGWGKATKTTQFRFNIESDPDRTINTDWFSREIIHGAITLQKWNAMSSRVQEGTNHAILKYDPDVEGDSEKLKAGVMNWGGLDETQAVALVAAWKRRPRPDAKRLNLSRRAVRNLLPYMEEGFVLADRNSEEPLRWWSIKDHAFDPYRHRWPTQIEARKLIAQNPNFKDATTGKTLDEHGRRRYATGAKGATARDRHYMKKHLLKKNGNPLYGPDGLTLHEPPPAPLVSNPVVRKAIHEVRRHLVEHLLASGRKPDEVHIELSREAKMGKKDADRLLLRNRLRNRIRNSIIADLNLDSLSSTQQRAAVDRVVLCVQQAGVCPLCGKDGLTALSAAKREGCEMAHIIPRACGGHNGLANIILAHEKCNREMGRRTPRQYWDVILPGKFEEGLRFVSAIYQDIERPKFSEVKSLTGDSLWNCYFTSKDDRAKLERFSKDIKDEDIQGMTLRQDAATKYAARQVMTYLADAFYEGEGLPERGGRRRIFTTDGIWTSRLRREWGLFFDPHEFKAKGLTNEAEQERKEKDRGDHRHHAIDAVVIALCTRQIQMEWEAREKQADTEGLDTADEETMAAYRREHPIKPPAPFKDREQMREAVKKALFGTGFVERPVCHRPVKRKMIGALHEETLFGPVLDSNGELTECYTAKKNVLALDPNHLRMPRPETEKEAIERLALRRQRERKVDEKAARKWARKVVASKGYKPAIVDPPPGKSGIVRDIALRTRLRQCLEEVNLNPDDFTDKQLKKTVESGALKQASGVPIRTVVLLRTMSDPVVIPRKQTEYESGRTDKSNDPASQRAYVGGNNHHIEIRLKLDKKGKETWSGTMVTAFEAAQRKLAKLRAIHQAGIPDLKAFRKLPKAERAKFTPTLREIEEAHPMVDRSDNQEGQFVMSLSEGETLFMKHKQTDKVGYFVVAKLDKPQSIVVVPHWDARAAGERKDAEGNKVPNSKRDQFAVVPNDLKELAPPGHPHAVKVRVSPLGVVKILQRD

SEQ ID NO: 4846 - protein, 1348 aa, synthetic construct
  REGION 1..1348: note = Synthetic
MGNSFNVLGLDIGSNSVGSAWVDLGRGTIDVGISIFPAGVDESEDKRGDPKNAKRRMARRTRITLARRAERKRQLRRRLVDVGLLPHEADAFKRLLEETDPWQLRRRGLIEPLAPHEFGRVLLHLAQRRGALGLRLPEPGDQEDGADQNAREDGKVKAAIGEVRARMLQRKARTFGEFIAMVRDERVTTITSEDRRPEAKRRGPREYRGAVRNKAGSYEHCADRAMIREEFAKLWDAQKSFGGQTAQLLTDDLRLALDDESGDSTWRHKGLLFGQRRQSWDLGTLGRCVLEPTDRCVPHADMYASRYLVVETVNNLKVIEPGKEARALTPAERQKIRDYLSGPLGMEKPRKKKGDTGQSAERPKTTVSVTDLRNLMGWGRASNTAAPRFNIENDEDRSINTDWFSREIIHGAVTPETWAQLPERVREGLNRAILKYDPDDESHADKLKAGVMEWAGLSEAQADALVASWRRRPNPHAKRLSMSRRAVRNLLVFMDRPEPWPDPEHPGQSRWLTQIEARKLIAGDGDFKDVTTGKPLDDETRRRYATGAKGATARDRYYMGKHLLCKDGKPIYGPDDLPLAEPPPAPLISNPVVRKAIHEVRRHLVEYMTRFGRKPDEVYIELAREARMGAKDADRLLFRNRLRNRIRNDIINAFDLHAKTPTQQRAAVDRVVLCVQQRGVCPLCGNQTVATAITPRMAANGEGCEVAHIIPKGSGGHNGLGNIVLAHTKCNRDMGRRTPREFWSAGKGFDAGMGWVEKTYGDIKRPKPSEVKGATGKSLWACYFTKLDDTAKIEQFKKDIKDIQEMTPRQEAATKYAARQVMAYLADALYGGGGLPERGGERRIFATDGMWTSRLRREWGLFFDRHAFKSKGLSESEEHERREKDRGDHRHHAIDAVVIALSSQGIRNDWENREKQADRAGVNTADEAAMENYRRNNPLPPPGPFKTREVFREAVRKAVFGDGELERPICHRAVKRKLTGALHEETLFGPVLDMAGKPTGNYTARKSVLQLEPNHLRMPRPETEREGVERLAIRRQRERGVDERTARKWARAVVSSPGYRAAIIDPPPGKSGIVRDVALRARLRKCLSDEGLNPDDFKPGEIKKLVEDGKVRHASGVPIKSVVLLRSMSDPVIIDRKRPEHVTGSMVADENPRSRRAYVGGNNHHIEIRAAQNGKGVEVWSGEVVTAFEAARRNLGRLRALREAGIPRPDAFRKLPRAERARLTPVLRAIEKDHPIVDRSDNDEKGGRFVMSLCEGEMLQMRHKHTREPGYFVVAKLDKPQSIVLVPHWDARAAGERKNAEGVKVPHSKRDDFSVTPNDLKALAPPGRTHAVKVRVSPLGRVTVLDRD

SEQ ID NO: 4847 - protein, 1370 aa, synthetic construct
  REGION 1..1370: note = Synthetic
VSRYVLGLDIGSNSVGSVWIDRETGRTQTGVSVFPAGVDESDDKRGEPKNSKRRMARRTRITLARRAERKRELRLKLIEVGLLPKDEPGFQALLESTDPWGLRQKGLDERLAPHEFGRVLLHLAQRRGALGLKLADPEEGDEANDSAAEDGKVRAAIREVRAKMLERKARTFGEFIAKVREERVTPITTEDRRKPSDRKGPREWRSPVRNKAASYEHCADRTMIRDEFTRLWETQKKLGGETSKLLTDKLRTALDNEKGDSVWRHQGLLFGQRRTTWDLGTLGRCVLEPTERCVPHADMHASRYRVVETVNNLKIIEGTSPPRPLTREERDRIKGYLSGPLGEETKGKRKGQPKRTVSVTDLRAKMAEWYGKDQWPGGTRRKLSPCRFNIEADEDRAINTDWFRREIVHGSIGEDAWNAMPTSLQEGFNRAILRHDQDEEDAKKLKSGVMAWGGLDEARADKLVAAWKGRPRLDAKRLNMSRRAVRNLLTVMDRDEPWKDDRSPAGFLWMTQIQARRHIAGLGDFCDVTTGKPLDDVTRRRYATGAKGATARDRYYMGKHVLMKDGKQIIDKATGEPLAEPPPAPLISNPVVRKAIHEVRRHLVEYMIENGRKPDEVYIELAREAKMGKKDADRVLFRNRLRNRIRIDIIDEQKLESMTTTQQRNAVDRVVLCMQQDGICPLCGNQSEQAKITPRMAANGAGCEIAHIVPRSRGGHNGLSNIVLSHTKCNREMGPRTPREFWNDGEGFDQGMRWVEGIYGDVHRPKPSELKNTSGPSLWVCYFNKRDDQSKIDRFKKDISDEDVQGFTNRQEAATKYAARQVMAYLSDALFDGKGLPERATGSGADQRRIFAGDGIWTAQLRREWGLFFDAHHAKAHSTDEEEKQQRREKNRADHHHHAIDAILTALCTGEIRDKWKKREEAGDQAYWVHTRANGSTGSVEDWMETYRRTNRIRPPAPFDFPGISDDGEALERFRDRVQFAVFGEDGLKPICHRAVKRKLTGALHRATHYGPVIEKDGSRSSSLVTTRIDVSQLKPAHLRVPEGWDRLADALHDPSCSPGEQRSIRRQLASLEDPAPGPGLVRDRATRDHIRRYFRSKGLPLGTPDAANYRVRDGFKDNQLRKILAGGVIPLPSGVPMRSVVITRAFSDPIVIPRTEYDYGSLSRQASPEPRTLRIYEGQNNHHVEIRENDKGKWSGEIVTAFQAAQRNLTKLRAFREAGVPSPGVFRKLKTQNREQWMAERRRWRPVIAQIEAAHPLVNRNDDETRGGRFIMSLCEGEMLWMKHKHTGEVGYFVVAKLDKPQSIVLVPHWDARAAGERKDAKGNKVSYSKRDQFAATPSDLKTLAPPDQPHARKIQVSVLGNVTVLDGD

SEQ ID NO: 4848 - protein, 1345 aa, synthetic construct
  REGION 1..1345: note = Synthetic
MNVLGFDIGSNSVGSVWIDRAKGRITAGVSVFPAGVDESDDKRGDPKNAKRRMTRRTRITLARRSQRKRELRLRLIEAGLLPPTEREFRALLEATDPWVLRSKGLDAPLTPFEFGRVLLHLAQRRGSLGLHVPEPSEEEADADEAAQDDGKVKAAIGAVRAKMIEKNARTFGEFICMVRAERVTPITTTDNRRADARKGPREWRAAVRNKAASYEHCADRAMIRDEFARLWNAQSRLGGETARLLTADLRLALDDESGDAIWRHKGLLFGQRRQSWDLGTLGRCNLHPEERCVPHADMHASRYLVVETVNNLKIIDGAKEARPLTPEERERIKKFLSGPLGTEKGRKKKGDTEPPADRPKRTVSVTDLRNFMGTTKDGWGRASKTSRFRFNIENDEDRAINTDWFSREIIHGAVTPEKWAAMPERTREGLNRAILKFDPDQEDDAAKLRAGVMDWAGLTAAQADALIAAWKTRPKPDAKRLSMSRRAVRNLLTVMDRPEPWPDPNRSGQKRWLTQIEARKLLAGDGDFIDVTTGKALDDHTRRRYATGAKGATARDRYYMGKHVLVKDGKPVIDHETGEPLAEPPPAPLVSNPVVRKAIHEVRRHLVEYMKTFGRKPDEVYIELAREAKMGKKDADRLLFKNRLRNRIRNNIIHELGLESQTSTQQRAAVDRVILCVQQGGVCPLCGQGGLTTRQAATGEGCEVAHIIPRASGGHNGLSNIVLAHEKCNREMGRRTPRQFWSDGPGFEQGMVWVEGIFGEVKRPKPSEFKSATGDALWACYFTKRDDTAKIEQFKKDVKDIQEMTARQEAATKYAARQVMAYLADALYGGKGLPERSTGDDGRRIFATDGMWTSRLRREWNLFFDPHCARSKGLANDEERERKEKNRGDHRHHAIDAVVISLCTRQVQIAWEEREKRADNEGINTANEEEMANYRRLHPLDPPEPFTSIEEFREEVKRAVFGDDGSLRPICHRPVKRKLIGALHEETLFGPVLDKAGNLTGNYTAKKSVLSLDPNHLRLPRRETEKEAVERLAARRRCTHGVSEREARKWARAVVSSPGYQPAIVDPPPGKSGIVRDAALRRRLRACLEEAGLDPDNFSAGQVKKLYEAGGFRQASGVPIHSVVLLRTMNDPVVIDRKRPDYASGRMRRDDDPASKRAYVGGNNHHVEIRVDDNGNWTGEIVSAFEAAQRKLARLRALREARIPKPDEFRKLPKAERRALSPVLRAVEEAHPIVDRRDDDARGGRFVMSLAEGEMLHMKHKGTGEVGYFVVAKLDKPRTVVLVPHWDARAATERKDAEGNKVPDSKREQFSVTPSDLKALAPPGRDHAVKVRVSPLGVVTILEKD

SEQ ID NO: 4849 - protein, 1387 aa, synthetic construct
  REGION 1..1387: note = Synthetic
VPAISLVAGKRGLRSGTLSASSVIHFVLSRGYPMIRLGFDIGSNSVGSAWVDTATGQLITGTSIFPAGVDESDEKRGDPKNAKRRTTRRTRITLARRSQRKRELRLKLIEVGLLPVDPDTFKALLDRTDPWELRRKGLDHALTPHEFGRVLLHLAQRRGALGLNIPDEPEDGESAADAEDGKVKAAIGEVRAKMRERNARTFGEFMAMVRAERVTPITSEDRRPISKRKGPRLYRGAIRNKAASYEHCADRAMIRAEFAALWDAQRACNPEMSRVLTDDLRTVLDDESGDSVWRHRGLLFGQRRQSWDLGTLGRCVLEPTERCAPHADMYASRYRVVETVNNLKIIERGREPRPLTPEERAKIKDYLSGPLGMEKPTKKRPDPRPKTTVSVTDLRNLMEWGRSSPTAQYRFNIENDEDREINTDWFSREIIHGAVTPATWRSMPESIREGLNRAILRHDPDQDGDAEKLRQGVMSWAGLSESQANALVEAWKRRPRLDSKRLNISRRAVRNLLALMDRDEPWPDPHRPGQNRWLTQIEARKLIAEDADFRDVTTGLPPDEHARRRYATGARGSTARDRYYMAKHILMKDGKPVIGPDGRPLAEPPPAPLVSNPVVRKAIHEVRRHIVEYMMTFNRRPDEVSIELMREARMGAKDADRLLFRNRLRSRIRKNIVEEFNLGGLTSTQQRAAVDRVVLCMQQGGASAICPLCGKHDGLTPRNAAHGNGCEVAHIIPRASGGHNGLGNLVLAHTKCNREMARRTPRQYWNETVSGGFEEAVSWVEKIYGNIERPTLKGNKDVKGDGLWSCYFTKRDDTAKIEQFKKDIKDIQDMTARQDAATKYAARQVMAYISDAIFDGKGLPERSTAAGAPDGDRTIFATDGLWTSRFRREWGLYFDPHGKRAKELSESEKHERQEKDRGDHRHHAIDAIVIALCDRRMQVKWERREKEADQAGVNTADEEQMENYRRQHPLQPPEPYRTRDEFRDAVRRAVYGDTDVARPICHRPVKRKLIGALHEETLFGPVLDASGNPTSSYTARKSVLALTPNHLRVPEGWDELSVQLDDPNVAESRRREIRRRLIELSRNDPPPGKSGIVRDRTLRDRLRKCLRSAGLDPDGFTANEIKKAVDAKHLQHLSGVPIRSVVLLRTMTDPVVIDRKRPDHATGRMIRDDAPASRRAYVGGNNHHIEIRVSRDKKKREVWTGVIVSAFDAAQRKLEKLRAFRQAGIPKPTAFRALSQPERDRLSPILRSIELAHPIVDRRDDDSKGGCFVMSLCEGEMLFMKHKERDELGYFVVAKLDKPNRIIVVPHWDARAAGERKDAEGNKVPDSKRESIALTPSDLLTLAPPCYPTRSGKPPTRPGGSPWPDAPPHALKVRVSALGVVTVLDRD

SEQ ID NO: 4850 - protein, 1339 aa, synthetic construct
  REGION 1..1339: note = Synthetic
MMAVLGFDIGSNSVGSVWIERKAGTITPGVSVFPAGVDETDDKRGDPKNAKRRMTRRTRITLARRSQRKRELRLKLIEAGLLPPSEAEFRRLLEETDPWELRRRGLGEPLSPFEFGRVLLHLAQRRGALGLHVPEPGEEEDADEAASEDGKVKAAIGAVRAKMLESKARTFGEFIAMVRAERVTPITSKDVRPDGHRKGPREWREAVRNKAASYEHCADRLMIRDEFAKLWDAQRGFGGETAKRLTPELRLALDDESVDAMWRHKGLLFGQRRQSWDLGTLGRCVLHPEERCVPHADMYASRYLVVETVNNLRIIERDKPPRPLTPEERDRIRAYLSGPLRTETKGKRKGQPKRTVTVTDLRNLMSWGRASKSSQFRFNIENDEDRTINTDWFSREIIHGAVTPETWEAMTDRVREGLNRAILKFDPDQEEDAAKLRKGVMDWAGLSEAQADALVAAWKTRPKPDAKRLNMGRRATRNLLAVMDRPEPWDDPKNPTGYRWLTQIEARKIIVEDGEFVDVTTGSPFDDHTRRRYATGAKGATARDRYYMGKHVLMKDGKPVIGPDGHPLAEPPPAPLISNPVVRKAIHEVRRHLIEYMKTFGRRPDEVYIELAREAKMGKNDADRLLFRNRLRNRIRNNIIHELDLESQTSTQQRAAVDRVILCVQQGGVCPLCGRGGLTARLAATGEECEVAHIIPRASGGHNGLSNIVLAHTKCNREMGRRTPRQYWSAGPGFEQGMLWVEGIYGDVKRPKPSEVRTAEGEALWACYFTGRDDRAKIERFKLDVSDAQVQGMTERQEAATKYAARQVMAYLADALYDGKGLPERGGKRRIYATDGMWTSRLRREWGLFFDPHDARSHGLSGDEERERKEKNRGDHRHHAIDAVVIALCTRQVQIDWEDREKQADRDGINTADEEQMENYRRLHRLRPPSPFDRPDLPVDEAIEAFRAAVKRAVFSDDGEVRPICHRPVKRKLIGALHEETLFGPVLDRAGNLTGYYTAKKSVLALDRNHLRMPRPETEREAIERLAARRQRDKSIDERAARKWARAVVSSPGYKPAIVDPPPGKSGIVRDVALRARLRECIEEAGLDPDDFSATEIKKLHEAGRIRHASGVPIRSVVLLRTMNDPVIIDRKRPDYATGRMLPDDDPASKRAYVGGNNHHVEIRINDKGDLSGEIVSAFEAAQRKLARLRAFRDARIPRPDEFRKLPTAERRKLAPVIRAIEREHPLVDRRDDDAKGGRFLMSLCEGEMLLMKHKETGDVGYFVVAKLDKPRSIVVVPHWDARAATERKDAEGDKVPNSKREQFAVTPSDLGTLAPPGREYAVKVRVSPLGVVTELEKD

SEQ ID NO: 4851 - protein, 863 aa, synthetic construct
  REGION 1..863: note = Synthetic
MTVRHVLGLDIGTNSVGSAWIDTQTGEITAGLSVFPAGVDETDDKRGDPKNAKRRMTRRTRVTLARRAARKRELRLQLIRSGLLPADPAVMKAMLETTDPWQLRRKGLDAALTPHEFGRVLMHLAQRRGALGLRPAKAQEEATAAESPKAGRKEPKADVGGDEVEEDGKLKAAIDAARSHMIERKARSYGEFIWMLRKERVTPVTTTDQRSPDQQQKGGPRMWCDPVRNKAGKYENAADRAMIREEFHKLWAKQASLSGPLAALLTDDLRRQLDDPDRTAWDKDPSKSAEDRLWYKHTFKEGGLLFGQRRQTWDMGTLGRCVLEPTERCAPKADMHASFFRVVETVNNLMVIEQGRTPRPLTKEQRDEVMKCLRGPLGVHTSGKFKGQPRRSVTVTDLRCLPAFGWGKASKHSKFRFNIESDPEREINTDWFHREIVIPAFGESAWDAMTQQQRESVNRAVLKFDPNEPQEAARLHAGAMAWWKLSPAQADALIAGWMTRRPLEERLSLSRKAIRNLLPIMKQMWSEPGGGHRWLTQIEARKLIAEDQDYRDVTTEKALDHWARRRYATGAKGLNAADRYYQKKHPLSLPPAPMLSNPVVRKAIHEVRRHIEAHIQRAGFIPDRIVVELAREARMGGKDADRILLRNRLRERIRKNIIATFELSPREPSQQRAAVDRVVLAVQQNGVCPLCLNKTVTTSITPRMAAAGQDCEVAHIIPRGIGGGNGLRNLVLAHTRCNREMGRQTPRQFWDNRFDEMMSIVERMYCDIERLRGKAVDKAAEDKLWAAYFDKADDEAKVNNFKKTKQDLEGHTERDLTDTRYATRQVLAYLADALYEGKGLPERGGDRKIFTTDGRWTGELRRE

SEQ ID NO: 4852 - protein, 1436 aa, synthetic construct
  REGION 1..1436: note = Synthetic
MLSGSRPHHARKKAAGRGSASCGGRLSTVPAVPRTLLRETAGRDRLHSVHVISVGGPTQDDIVGIRGLKMGRYILGLDIGSNSVGSVWIDRETGDITAGVSVFPAGVDEADDKRGEPKNAKRRMTRRTRITLARRAQRKRALRLRLIDAGLLPADEAGFRALLEATDPWELRRRGLDESLTPHEFGRVLLHLAQRRGALGLKIAELEEGEEETPDSAEDGKVKAAIGEVRAKMLERKARTFGEFIAMVRDERVTPIESADKRKTGQRKGPREWRRAVRNKAGSYEHCADRAMIRHEFDELWTKQRALGGDTAALLTDELRLALDNPERDSEWRHKGLLFGQRATNWDLGTLGRCVLEPTERCVPHADRHASRYRMIETVNNLKVIEGTRPPRPLTTEERERIIAYLSGPLGEETRGKRKGQPKRSVSVTDLRAKMAEWYGKDRWPGGAKRKLSPCRFNIEADEDRAINTDWFSREIVHGAIGLEAWEAMPENLREGFNRAILRNDPDEEGHAERLRDGVLTWGGLDGARADALVAAWRARPRPDAKRLNMSRRAVRNLLPVMETGWPDEASPTGQRWPTQIEARKAIAGDAEFRDATTGKPLDKVTRRRYATGAKGATARDRYYMNKHVLTKDGKPVIDDTTGEPLAEPPPAPLISNPVVRKAIHEVRRHIVEYMLAHGRKPDEVVIELAREAKMGKKDADRVLFRNRLRNRIRNDIIETHGLEDLSSNQQRAAVDRVVLCVQQGCVCPLCGEAGLSPEKAAAGTDCEIAHIIPRASGGHNGLSNIVLSHTKCNRDMGRRTPREFWSAGGGFDAGMRWVEGIYGEVKRPKPAEVKKAKGPALWACYFDARDDRNKIERFKKDISDEEVQGFTERQAAATKYAARQVMAYLSDALFDGKGLPERSTGSGRPEDARRIFASDGFWTKRLRDEWRLKFDSHAAKAHGLDPAEESERKEKNRGDHHHHAIDAVVIALGTRDVQVKWEQREKAGDAAYWDHVKANGNAGSYEDWMHDYRRKNRLRPPGPFERPGLSVDDAIEKFRAEVKDAVFGEDGAKPICHRPVKRKLIGALHEETLFGPVLDADGGLSGNYTAKKSVLALTPNHLRMPRPETEKEAVERLAARRMREKGSGERDARKWARGIVRSASYTPAIVDPPPEKSGIVRDRGLRARLRACLEEHGLDPDRFTAAEIKRLAESGKITQASGMPIRSVVLLRTMSDPVVIDRRGPEYGTGRIVRDADPASKRAYLGGNNHHIEIRVDERGRWSGEVVTAYEAAQRKLAKLRAFREAGVPRPKHFRNLKREDRAAWKAEREHWRPIIARIEAEHPLVDRTDNGNGRFVMSLCEGETVWMKHKQTGVVGYFVVAKLDKPRSVVLVPHWDARPAGERKDADGRKVPGSKRDQFAATPADFTTLAPTGQPHARKVRVSALGEVTILEHD

SEQ ID NO: 4853 - protein, 1061 aa, synthetic construct
  REGION 1..1061: note = Synthetic
VRAAAVARRRCLRFVSCCVKPQVRVGYTRSHSSPPKTAVKQGGNNMTISMGLDVGSNSVGSAWVDHQTGNITVGLSIFPAGVDESDEKRGDPKNAKRRATRRSRITLARRAQRKRLLRLKLIAVGLLPTDAAEFKALLQETDPWELRRNALSISLTPFEFGRVLLHLAQRRGALGLRIVDPDDPDATDSDRDDGKVKKAIGEVQSQMRKCGARTYGEFIAQLRDKSITPITTPDHRAKDRRKGPREHRSAVRNKAGSYQHCADRKMIRDEFAKLWDAQKRLGGPLAEILTDELRLALDDDSRNSNWRHKGLLFGQRMQTWDLGTLGRCVLEPTERCAPHADMDASRYLVVETINNLKIIERGKQPRSLTVAERSQIKNYLSGPLGEVTRGKQKGQPKRSVTVTDLRDLMDWGNASKTSAFRFNIEADKERTINTDWFSREIIHGAVTAARWQQLPLRSREGINRAILKHDPDDETHDEKLKALVMQEWAGLNASQADLLVAAWKKRPRPDAKRLSMSRRAVRNLLTVMDREEPWPDAEQPGETRWLTQIEARKRIAKDQNFLDVTTGKPLDEHARRRYATGTKGATARDRHYMKKHLLMKNKEPVYGPDGLPLHEPPPAPLISNPVVRKTIHEVRRHIIDYLTNLGCKPDEIHVELAREAKMGKKDSDRTLFMNRLRNRIRNDIIEVHKLSAVSATQQRAAVERVVLCAQQDGVCPLCGNQKVKTKITPRMAANGEGCEVAHIIPKASGGHNGLGNLVLAHTGCNRDMGRRTPRQYWEATLSGGFDEGFRWIEGIYADIQRPSPWDVKEASGDALWLCYFAGGPSRWGPTYDGLKIGQFKKDIKDIQQMTERQGAATKYAARQVMTYLANALYDGKGLPEHSTGTEQNPETRRIFANDGLWTSRLRREWGLFFDRHGAKAHGLTNEQEHELKEKNRGDHRHHAIDAIVIALCSEQVRKAWDARELAADQADINTADEEAMDNYRRQHPLPLPVAYKSRDELRTAVQRAVFGEGPLERPVAHRAGETQADRRTTRRNPLWSGRRSHRQSDRQLFGEEKRTAT

SEQ ID NO: 4854 - protein, 1356 aa, synthetic construct
  REGION 1..1356: note = Synthetic
LERAMAIYLGLDIGSNSVGSAWIDTHNKTITPGVSVFPAGVDESDEKRGEPKNAKRRMARRTRITLARRAERKRLLRWKLIEVGLLPRDAGEFKTLLDNTDPWDLRRKGLDEALSPHEFGRVLLHLAQHRGALGLKMPDPDDADSPDLADEGKVKAAIGEVRAKMLQRKARTFGEYIAMVRAERVTAITTEDRRPLNARRGPREYRAAVRNKGRSYEHCTDRDMIRDEFGKLWEAQVKIGGDTARRLTQDLRTALDDPTGDSEWVHKGLLFGQRRQSWDLGTLGRCVLEPTERCVPHADMYASRYLVVETVNNLKIIEWGNEARPLTPEERQKIKNYLSGPLGTEKGRKKKGDTEPPKDRPKTSVTVADLRNLMGWGRVSKTSQFRFNIESDKERTINTDWFSREIIHGAVTPEKWAHMSERVREGLNRAILKYNPDNEADAAKLKKGVMAWGGLDEAQADALVAAWRKRPRPDAKRLNMSRRAVRNLLALMDRDEPWSGRMRWLTQPEARRRIAQDADFKDVTTGQPLDWYARMRYATGAKGATARDRYYMKKHLLLKNGKPIFGPDGNPLAEPPPAPLISNPVVRKAIHEVRRHIVEYMTTFGRKPDAIYVELAREARMGKKAADELLFRNRLRNRIRNDIIGAFELDRLTSTQQRAAVDRVVLCVQQGGVCPLCGNQRVTTKITPRMAAAGEGCEVAHIIPRACGGHNGLGNIVLAHTKCNRDMGRRTPRQFWEAALPGGFDEGMRFVESIYRNVERPKPSDLKSATGDSLWACYFAGKPSRFGPTFDELKIEQFKKDVTDIQEMTPRQEAATKYAARQVMAYLADALYGGRGLPERGGEHLIYATDGLWTGRLRREWGLFFDPHQRKAKGLNEQQEHERKEKDRGDHRHHAIDAIVTALCSRQVQIAWEEREKQAEREGVNTADEVEMENYRRLHPLDPPAPFKTREEFRDAVAKAVFGDGQVERPVCHRPVKRKLIGALHKETLFGPVLDEAGRLTDTYTAKKSVLELKPNYLRMPRPETTNEAVERLTARRLRRNGGDERAARKWARGVVASAGYKPRIIDPPPGKSGIVRDVALRTRLRECLTAGGIDPDDFTANQIKKLVEAGGLRQASGVPIRSVALLHTISDPVIVSRWASDHATTKRRKLYDAATGQGDASAARAYVARNNHHIEIRAAKNKKGEEVWRGEVVTAFQVAQRKLAKLRAFRQAGVPRPDVFRGLPRAERARLMPVIRAIEKDYPLVDRSDDETKGGRFVMSLCEGETLLMKHKATGEVGYFVVAKLDKPQGIVLVPHWDARAAGERKDAEGKTVPDSKRDQFTATPTDLLKLAPPGRPHAVKVRVSPLGEVREVHD

SEQ ID NO: 4855 - protein, 1357 aa, synthetic construct
  REGION 1..1357: note = Synthetic
MYQQRVLALDIGSNSVGSVWIARHTGAMTTGTSIFPAGVAEADDKRGEPKNANRRMTRRTRITLRRRAERKRELRLRLIAAGLLPGTAEEFRLLLESTDPWALRRRGLDHALTPHEFGRVLLHLAQRRGALGIKMASADDGDEPDASEDGKVKASIGEVRAKMLAAKVRTFGEYIASERDRRRTPLSDAGMRPEGPHGGPREFRGAVRNKKGGAHGGYEHCADRAMIRDEFAKLWDAQRRLGGASAALLTEALRQELDNERGNAVWKHKGLLFGQRRQTWDLGALGRCVREPTERCAPHADMHASRYRVVETVNNLKVIEHGRPPRPLTPDERTRIKAFLAGPLGTHTKGKAKGKPKSTVNVTDLREFMGWGKATKASRVRFNIEADEDREINTDWFSRAIVHGGIGPDVWAAMPARLKDGINHAILKFDPLQDGDEAKLRAGLMTWGGLSRVQADGVIAGWRTRPKPDAKRLTMSRKAVRNLLAVMDRAEPWPDANSTTRYRWLTQIEARQLLAGDGDFHDQTTGLALDEHARRRYATGAKGATAADRYYMAKHVLMKDGKPIIGPDGRPLAEPPPAPMISNPVVRKAIHEVRRHLVEYMTTFGRRPDEVRIELAREARMGAKDADRLLFKNRLRSRIRNDIIDAFSLHGRTASQQRAAIDRVVLCVQQRGTCPLCGQPGLPARGAAAGEGCEIAHILPRASGGDNGYRNIVLAHTKCNRDMARRTPRQYWADTCPGGYDEGYSRVKAIYTDIERPALKQTKSLSGDALWLTYFDRREDARKLEQFSKDIADIKDMTLRQDAATKYAARQVMAYIADAVFDGKGLPERSPGASAEDRERQRRIFSSDGLWTSRLRREWGLFFDPHKGLSNAEEHERKEKNRGDHRHHAIDAIVIGYCTAAVQRRWEAREQAAEIAGVNSADGEQLEAYARSHPIPPPSPYWDWSGGSADAATRFVHATENDRKDARDRFRNAVKAAVYGDDQTPRPICHRPVKRKLIGALHEETLFGPVLDGQGQPTGKYTSKKGVLDLTPNHLRMPEGWDDLGASLPPLTGDKHADNLARNPTLRRLAAMEDPPPGKSGIVRDRALRNQLRRCLRSAGLDPDDFTAGELKKAVDAGKIRHASGVPIRSVVLLRTMSDPVIIDRKAPDYATGAMRPDPDPASRRAYVGGNNHHIEIREKKDKKGNVLWTGVIVSAFEAAERKLAKLRAFKAAGVPKPADLRALPRKQRAAWRPIIAEIERTHPIVDRRDDDALGGRFVMSLCEGEMVSMLDKRTREPGYFVVAKLDKPSTVVLVPHWDARPAGQRKDADGKKIPNSEREQFSANPSDLAELAAPGHRPAAKIRVSPLGVLTVLDRD

SEQ ID NO: 4856 - protein, 1365 aa, synthetic construct
  REGION 1..1365: note = Synthetic
MPAYLGLDIGSNSVGSAWIDTDEKTITCGISVFPAGVDESDYKRGEPKNVKRRMARRTRITLARRAARKRLLRQKLLAVGLLPRDEGDFKRLLETTDPWELRSKGLDHELTPHEFGRVLLHLAQRRGALGLKLPDAEDGQVDTTDDEGRVKAAIGHVRAQMLERKARTFGEFIAKVRAERVSPITTEDRRPPARRKGPREYRDPIRNRAGSYEHCADRAMIRDEFTKLWEAQTAFNGETARLLTQANGLRTALDDEAGDSIWLHKGLLFGQRRQSWDLGTLGRCVLEPTERCVPHADMYASRYLVVETVNNLKIIERGREARPLTPEERQKIKDYLSGPLGTERARKKRGDTGPVADKPKTSVTITDVRNLMGWGRATRTSQFRFNIESDPDRVINTGWFSREIIHGAITPAKWAEMPQRLRDGINRAILKYDPDHEGAADKLTLGVMQWGGLNETQADALVAAWKRRPRPDAKRLNMSRRAVRNLLALMDRDEPWPNPRQPGQTCWLTQIEARKLIAEDADFKDVTTGAPLDLQTRVRYATGAKGATARDRYYMQKHLLLKNGKPIFGPDGLPLAEPPPAPLITNPVVRKAIHEVRRHLVDYMLRFERKPDAIVVELAREARMGKVDADRVLFRTRLRNRIRNDIIASFGLGALTSTQQRAAVARVVLCVQQGGICPLCGNQIVTTQITPRMAASGEGCEVAHIIPKACGGDNGLGNIVLAHTKCNRDMGRRTPRQFWEGTFQGGFEEGMRYVEGIYRDIERPKLSEVRSATGQSLWACYFSGRPGRFGPTFDELKIEQFTKSVTDIQEMTPRQEAATKYATRQVMTYLANALYGGQGLPERSGQRRIFATDGLWTSHLRREWRLFFDPHASRTNGLSEEQEHVRKEKDRGDHRHHAIDAVVIALTSPRVQNAWEQRERMADRDGVNTADEVALENYRRAHPLPPPVPFANAQELKQLVHAAVFGSDSLERPVCHRPVKRKLIGELHEAFPRGPVLDRAGSLTDRFTRRISILELDPNHLREPRPETKNEAIKRLAERRRRQTGEDESAARKWARAVVSASGYMPAIVDQPPGKSGIVRDLALRRRLRDCLSAEGLDPDNFTANQIKKLAEAGKVRHVSGVPIRSVVLLWTISDPVLASRWATDHGTGKRRMLFDAVTHQGDARAARAYIGGNNHHIEFRVAPQPDGTEIWSGKIVTAFEVARRKSQRLRAFRQAGIPKPGDFRKLPKSQRAQFKPTLRAIEAAYPLVDRSNDDAKGGEFVMSLAEGEMLMMKHKVTGKLGYFVVAKLEKRGGNNRDCAVLVPHWDARAAGERKDAEGKRVPDSKREQFTITPVDLKLLAPPDHPHAIKVRATPLGDVYPLQRD

SEQ ID NO: 4857 - protein, 1367 aa, synthetic construct
  REGION 1..1367: note = Synthetic
MPVQHLLGLDIGSNSVGSVWIDLGCGQILTGTSIFPAGVVESDEKRGDPKNAARRMARRARITLRRRAQRKRQLRLRLIGAGLLPSTAEGWKTLLGGTDPWELRRVGLDRALSPHEFGRVLLHLSQRRGASGLATTGPLDGDEPGGATQEDGEVIRAIGEVQAKMLAAKVRTFGEFVASQREQRVHRLPGAERGPSGGRREYRDRVRNTRDVYEHCADRAMIREEFGRLWAAQKRMGGPTAALLTDELRLALDDPDRTALDKDPTATEEQRRAYKQMFKEGGLLFGQRRATWDAGMLGRCDLEPTERCVPHADRHASRFRVVEMVNNLRVIERGKPVRPLTPEEREKVLAYLSGPLGMTPARTVKGKQHPPRPKQSVSVTDLRELMGWGRATKNTPVRFSIESDENREINTDWFAREIVHGAIGVEAWSGMSESLREGINRVLLKRDPAEGADEAALRAGLLSWGGLSATQAGAVIEAWKRRPSIKSKRLKLGRRAVRNLLTVMDRPEPWPDPHCPSSYRWLTQIEARKVLAEDGDFRDVTTGEPMDAITRRRYATGAKGATARDRHYMGKHVLMKDGRPVIGPDGRPLAEPPPAPLIANPVVRKAIHEVRRHLVEFMTTFGRKPDQIRIELSREARLGAKDADRALFRNRLRDRIRRDIIEHFGLDGRTPTQQEAATLRVVLWAQQGGRCPLCGGTSGTLTPRAAADGEGCEVAHIIPRGGGGDNGQSNLVLSHTECNREMARRTPREYWNATLPGGFAEGYARVEGLYGEIARPRPTDAVRKAGGAPLWACYFDVRDDRRKLEQFAKDVKDIQGMTPRQEAATRYAARQVMAYLADALYDGKGLPERSMGEGDPEGQRRIFTTDGLWTGRLRREWGLFFDAHGAAAKGLEEQEEHRRKQKNRGDHRHHAVDAVVVALSTRAVQLAWDERERAAEAAGINTADAEAMERYRRANPIPPPEPFGTREEFREAVRRAVFGDGSTPRPICHRPVKRKLIGPLHKPTMYGPVLNPDGTRHPSFVTVRMRIADLKPAHLRVPPGWDELTARFHAQNVPISERTRLRASLAALRDPAPGPGLVRDRTTRDFLRRWLRDTGLSLGVAENANYRVRGGFTDADLRRVLPRDQAIPTPSGVPLRTVVVIRAIAEPPDIPRRRWDPKTNEEIKESCAAAVRLYDLQNNHHIEIRMSTGRTRKTKWTGTVVTAYEAAMRKLARLKQFKAVGVPKPDEFRCPGVMSEADKRSWRPIIAAIERAHPIVNRADDEALGGRFVMSLCEGETLYMRHKWTKEPGYFVVAKLDKPQSVVLVPDWDARAAGPRKDSSGKPVPDSQRESFTATPSDLASLAPPGHPHAVKVRVSPLGVVTVLHRD

SEQ ID NO: 4858 - protein, 1413 aa, synthetic construct
  REGION 1..1413: note = Synthetic
VRAAAVARGRCLRFVSCCVKPQVRVGYTRSHSSQPKPVVKQGEDNMTISMGLDVGSNSVGSAWIDHKTGKITVGLSIFPAGVDESDEKRGDPKNAKRRATRRSRITLARRAQRKRLLRLKLISVSLLPADAAEFKELLQDTDPWELRRKALAVALSPFEFGRVLLHLAQRRGALGLRIIDPDDPDATDSDREDGKVKKAIGEVQSQMRKCGARTYGEFIAQLRDTSVTQITTPDNRPKGRRNGPREYRSAVRNKAGSYKHCADRTMIRDEFAKLWEAQKRLGGPLAEILSGELRLALDDDARNSDWRHKGLLFGQRMQTWDLGTLGRCVLEPTERCVAHADSIASRYLVVETINNLKIIERGKQPRSLAIAERSKIKNFLSEPLGEVTRGKQKGQPKRSVTVTDLRDLMGWGNASKTSAFRFNIEADKERSINTDWFSREIIHGAITAAKWQQLSLRSREGINRAILKHDPDDETHDEKLKALVMQEWAGLKEAQADLLVAAWKKRPRPDAKRLSMSRRAVRNLLTVMDRDEPWPDADQPGETRWLTQIEARKRIAKDENFLDVTTGNPLDEHARRRYVTGTKGATARDRHYMKKHLLMKNKEPVYGPDGLPLHEPPPAPLISNPVVRKTIHEVRRHIIDYLTNLGCKPDEIHVELAREAKMGKKDSDRVLFMNRLRNRIRNDIIDVHGLSAVSATQQRAAVERVVLSVQQDGVCPLCGNQKIKTKITPRMAANGEGCEVAHIIPKASGGHNGLGNLVLAHTACNRDMGRRTPRQYWEATLSGGFDEGFRWIEGIYADIQRPSPWTVNEVSGDALWLCYFAGGPSRWGPTYDGLKIGQFKKDIKDIQEMTERQGAATKYAARQVMTYLADALYDGKGLPERSTGTEQNPETRRIFANDGLWTSRLRREWGLFFDRHGAKAHGLTNEQEHELKEKNRGDHRHHAIDAIVIALCSERVRKAWDARELAADQADINTANEEAMDNYRRQHPLPLPMAYKSRDELRAAVQLAVFGEGPLERPVAHRPVKRKLIGALHEETLFGPVVDRAGSLTANFSAKKSVLQLDPNHLRRPRRETEKKAIERLALLRLKEKSGDEKTARKWARSVVSSLGYQPAIVDPPPGKSGIVRDIALRLRIRDCLSGFQYAKRNKNGEQVGEARSINPDDFTDYEIKQAFEAGAICQASGVPINSVVLLRTMSGPVVIDRKRPDYATGKMVHDDDPASKRAYLGGNNHHVEIRVAKNKKGDEVWSGQIVTAFEAAQRKLTKLRAFREAGIPKLKVLRKLSKAERAKFHAELRRIETAHPVIDRCENVDNGGKFVMSLCEGEMLKMKHKQTGEVGYFVVAKLDKPQSIVVVPHWDARAATERKGSDGKKVADSKREQFAVTPSDLKDLAPPGEDHAVKVRVSPLGKLVVLTD

SEQ ID NO: 4859 - protein, 1352 aa, synthetic construct
  REGION 1..1352: note = Synthetic
LPIFDRFTRPLFTISPENSPSLSQSTPPPSSHPTAPFFTSVSIFRLMPKAYQDSTICRAGRTSGQPLRLAYSQPLPNKKGRGTSPRPWVRSDVSKGRSSRQTEVMPYCVRPTTDAHIHCGYGRLCPRGVKATTCQIFCGEISDMANPHRPWILGIDLGTNSLGWAALALEDDGSGHPEQAKVTGFLSNPHDPKAPPTVGSRIFEAGKEKLGQGQGKESTRNAARRQARQVRRNLMRRERRLRKTFNLLVHAGLLPDVGRHETDPSTHGGSLERDGVIKNLDAQLHAHYRSQVLESGGAADSLRMLENLPYFLRARGLDQPLTAHEFGRVLYHLAQRRGYKSNRKAANADEEEDGDKSPASGRSDAPSKKGKVAQGISQIDEAMKAANHRTLGEHLLHETPYRRRLRARWTARSMYESEFETLWSKQHGLGHLPIDDTIKKALQDAIFHQRPLKSQKHLIGFCTLEDGERMVQLSTGELVRTRRRRRMPQFFIEAQQFRLLQSIHDLRFKAPLEPTILPLSERERELLREELTAFLAGGKEPSAKDLVKSALRDKAPGTLSMDGKRGVKAITAEEIPNLKWICENFGAATPLSEEQKNVLFLHMEITSSCTWAELKAHLGLPKKGKFTAEEGGGNKFLGNHTSAQFYEVFQSRWLTATEEQRIKVVEECYSIDDDVALKQRIKDGKGPWRAIKAEPTDGDKVLRISTPPDYLAYSRTAVKRLLPLMRSGMDLTAAKAALYPESEGQESCELLPPVLSSLGDTRNPVVQRALTELRRVVNMLIKLYGKPSFIRVEMARDLKASVDERKRRQDQMRSNEKERDSARAAIAPLMPGREPSASDIEKYRLWQECGGVCPYTGRSIGMAALFGAGTDVDIEHIIPFSMSQDNSFLNKTLCYAEFNRTRKRNQTPWQTLHGSPDEWNLAVSRMKGNQARRMHPAKLERFLLDDDQLEDFLGDFTSRQLNDTRYASRLAIRYLAELYGGVLERGVDPAGRLRVQAGTGGVTATLRSVLGMSRALGGEIKTRDDHRHHAIDAVAVALAGPRFIQAMARSCGHSYRAAFGKLGPMEPPWEGFMSDLTRAIEVTVVSHQNRNPVRGALHKGTNFGRRRDADTGRVLEGEAEETSGKSRVIYHQRVPLKSLKQKEIEQIVDPVVRMKVLSAVGGGDPAKVFADESKLPRMDSGVVIRRVRVRYGDERRSSFGKGHRRRDCATSENHHAVIWEEENRGKVRWKCEIVGLAEAARRRAAKEPIFQQDLGMGRRFLFHLQKGDVLNFPGDSRVPFAVVKGISPLGTGSADIELRPLADARSSGNKKQDIAGFERIRKTPGSLADAGARKVTVDCIGRLRPAHAQSNL

SEQ ID NO: 4860 - protein, 939 aa, synthetic construct
  REGION 1..939: note = Synthetic
MKYIIGLDCGIASVGWSVVSLENNQIVDFGIRTFPAPEDPKTGELYSKTRQEQLGKMRNIRRKSHRIIRLKRLLKSNGLPCNPTHNNVWQIRHKALDNLITKSEFSAILLHMIKKRGPILQRIGEEGAILSSVSNNHELIASGKYRTPAELACLTFKNNIRNRDGNYNHTFSRYDIQNELHLIFQKQREFGNKFATVELEDKVDKLLMKQRKSLSGDDILKMVGFCSLEENEYRSPKHTYSFEKFSLLTTLMNIRILNNKLEQKSLTNEQINKLILLAHKKAITYKTIRKELNLSDEDKFKGLLYSSKNDVENKKLPELQVYRDVTKILDEHYLLPNILDAIGIAFTLYKNEDEIVEYLENSVALSYKAIEELLPKLNYTGFANLSLKAIKKLLPHLENGISYSTAVKTEYKDINKQNESVKKEFISSNDILIDTKSKTKITNQTVIRSLSQIRKVINAIIKKYGTPEIIAIETATELGKSAKQRKEIYKKQEQNRLNNKKAFEELKKQFPKQKSFNQKDVLKLKLFKQQNGICLYSGKYIDRSKLLDNNYVEVEHVVPYSRSFDDSQNNKILVLASENQNKKEKTPFEWFGNGEKWNNYVERVSKCYFSLNKKEFLTKQKIDEKEFISRNLNDTRYITSHLVNVIKQHLICNQVVSVKGGFTANLRHKLGIEKTRENKRHHAVDAILVALSGMIFHNKEKYNWLTTNKKEIAKEIKTRVFSDNWIISQMTNHKVTGQAHDETIRSSKFLQDEYSTVRTPLTKIKIKDIERILGYPDREPEFYKQLEEQLIKHNDNPEKAFANGFVKGNTVVKKVKLKSVQKSGVIVRKDENGNRHGIAKNASLIKIKIYRKNDKNYAIPVYAWQINKNIEPNSNYEFLFELFPNDMVSVDGEIMLYKSFDRSIGTCSFSKIDDASGINKRMSISKVDLKLVKFDVLGR

SEQ ID NO: 4861 - protein, 1225 aa, synthetic construct
  REGION 1..1225: note = Synthetic
MRKILGLDIGTTSIGWAIVEASDEKNINDVTGKEALTDINNNRIGIYEDAVGVRIIAQDTERFNRGQTLNDPKGNALTPTANRRKYRSSRRLKSRYKLRRGKLKNVLDFIHMSPDKAYYTNEKGKRGEKNDIGKAIYELRDMAIRSKITLNELGRILVHLNQWRGYSSDRFAVEEKSKFDYYVAEILEVDDTNKIAITDENNKQEIKYYKISIKIRFDEPYNLGDEENKIIITELEGVLFKKEIDFKKGDFVTVKKPELKQNKKGKQILNEYYKISFTTPDPADWNYKYQTLQKTLTEWCEAGNTVGSYFYHNFYKIHSIERIRNQVVNRKWYEDELDKIFNFQYLQHKGFFEQLNIEEIVKVAFKNYQAILNDVLKKDGIKEQLRYLIKDKIIFFQRPWQQAKNKGQCPFEKIKIKKEATIKGTGKKEIIEEYVGRTVIPRSHPLFQEFKIWQQINNVRISLKIEGEKIDLFADEKNFEKYVGKKISEVKQALYDALQKSKTLSWKSFGDNELGLKNKKEIVDKDTGEVLKCHFEYNFRKLKRDKVTWEDIKLKGNNTKASLQNILVDKTEDWFNKIHSEKQNITNLQLLWELIYDITNSDVNKVGTIIENHFKFDKPICLQLANLKFDDAGMGNLSAKAIRQILPLMSDSKGINDKTLAKVNSLLSLNNNEEEKIKDKDEKLENLKDFIPDKKARLRLSKFNSANDFTYLNYWEAIAVRYGSHSTKKITALGVIKPVERHSMNNPIVEKIVNETIAIVNEIKQQYGFDEVRIELSRDLKASMNERQQMHEAMTANADKNEWAKQMLRELKAEFAELDTDSTNKSNLDKIKIIEDVVKYKNAEEYKVKSKEYKLSEPSKAEVKKYLMWLEQNFKCPYTNQPIPFNDVFARGKVVEIEHIIPRERYYLNSYANKVITWREVNQAKANNGNRTAYEFIVSKRVEDKVKVGNNEFSLVTKEDWENHVKSMFPRGGKQTNLLRKEIPEDPINRTLNETQYINKKLKDKLGELVGEQKVWITSGAVTDILRDRWHLNSIMKELMRDRFENFNTGEKKEKQNLTHFTQQYNNKTGNYEDVEIFEGYSKRLDHRHHAMDAIIIACTKQNHIQYINTLNAFNSVDQENDNSKKAKYSSLKADVCIGNSSKRFKTPWVEDKFIPDVRKALSEIVISHKNTRLLISPSKHRVDKDIKPNKIASIRGELHKETNYAKKNYFEGGKIFINKLILKY

SEQ ID NO: 4862 - protein, 1664 aa, synthetic construct
  REGION 1..1664: note = Synthetic
MTNKKILGLDIGTTSIGYSIIEVNNEKRKNLISDKFATSDINNDRVGIFKDAIGVRIINQDTSRFDRGLKLNDPKGSTLTPTANRRKFRGVRRMRNRYKLRRNKLYKVLSILGLTPDESYFTNKKGKRGKENDIGKALYGLRERAARERISLSELARVLLHLNQLRGYSSDRFAKDEETKFDYYLTEVVEVDWENRTAVFDKGSTEDVKYYQFKAKLRFVEPYVIIEDDEKTILYEIEGYIFKKEIDFEVGKFITIKAPEFKQNKKGKVVVEEYYKITPTKPDATDWKYKYQTLHKNLSDWCKAGGTVGSYFYKNFYELATLSRIRNNVVNREWYEKEFDAIWALQYEFHKDFFDKIDVSNLVKDVFKDYSTVLNDVINKSGNKAQLQTLIKDKIIFFQRPWQQAKSKGRCEFEKIKVKREYAIKGTGTKEVREEHIGRTVVPRSHPIFQDFKVWQQINNVRLIWNTTDEKINLFENAELFEKLTGKTIEVVKELLFKKLQGSKTLSWRTFVKEELGLDTYDEIEEKKKVKVSKNQGLDLETGEVVDEFFSVNFRKRKRDGTYDDIKLKGNTTKAELQNILKEKPTEWFESLHDQNKKVTNLQLLWEIIYDITNTDVAKVSSIIKKHFDFDEDVCLTLSKVQFDDSGMANLSAKAIRNFLPLMSDGKNYSKIAKAKVDELISLNSSETDIDVDEKLSGLRDFVTDRKARVRLSKFASENEFKYLNYWEAAAIIYGSHSSKGNSQAGIMKKVKPHSMNNPVVEKIVNETISIVNELKKEYGFDEVRIELSRELRASADERQQMWEGMSNGAAKNEWAKKMLREIKQAMLEDNRDISQLDTEISGSNLDKIKIIEDVVKYQKQAEFKNKEKEYKLTEPTNAEVTKYLLWLEQNFKCPYINQPIPLTDVFARGKVVEIEHIIPRQRYYSNAYANKVITWREVNQEKGNKTAYEFIVSKRNSTGIVKVGKKEISLVAANQWENHVKEMFPKGGKRNNLLRKEIPEDPIERTLKETQYINKKLKEKLGELVGSDKVWVTSGAVTDILREKWKLNDIWKELVEERFVKFNNGESKERLNLKYTTKHYNSKTNQYEDVEKFAGMSKRIDHRHHALDAIIIACTKQNHIQYINNLNAVNSADIENDDSKKAKYKDIKNDVCIGDSSSKFKFPWDENKFIPEVKQALQNVLISHKNSNVLISPSKHRVNKDINSGKLASVRGELHLQTNYTKKKYFENEKIDILKLIPLLFKKKFENQNQTLVRFKSFDEIIKETVLKEKYQNVLISLFEEYEVEKLNTQTVKVFSKKVLKKIEDEKLFIHEKSGEKMTWLSIFTEKNASVRPMGLSMDLNSDKEVKDISNPRLRRIGQYRLNYINKKIADIKALKLTFKEEENTRVREIREIPLYNNAIYEVRIKQKDGKYQWVEIKDLQHSDLENIEYAKPETTIAIKNKLKEFSLEELKERYISKPIFLSEKPTLVKKARQKSFFQDLYELNDGRYVYSRDVFMSYVFVPEDSNRKDAKRELEFLKFFDAVKIVTLEKPDKIDYKNLLKKEGYKLLFTLSKNDIVYLPDEVLTDEQIAEINWENRSEIIPKLFVVKDMNPSRNEILFQHINKSDSIKVSADEAKNILNTDKLEEEIKYGDTNMWKRCIKVSIDKLGREIKPYWESSKIIL

SEQ ID NO: 4863 - protein, 1775 aa, synthetic construct
  REGION 1..1775: note = Synthetic
MKKILGLDIGTTSIGWAIVEATDEKNVNDVTGKEAETDINNNRIGIYEDAVGVRIIAQDTERFDKGLTLNDPKGSTLTPTANRRVKRGVRRMKSRYKLRRDKLGRVLDFIGMNPDKAYFTNEKGKRGENNDIGKAIYQLRDKAVKEAISLNELGRILSHLNQTRGYSSDRFAKEEKPKFDYYVAEVLEVDEANKIAIVDETNKDEIKYYKVSIKIRFDEPYNLGDEENKKIVTELEGILFKKVIDLKKGDFVTVKKPEIKQDKKGKVILAEYYKITLTVPDPTDWNYKYQSLQKTLTEWCEAGYTVGSFFYKNFYKNQSIPRIRNQVVNRRWYEDELDKILDFQYKYHIDFFEKLDIEAIVKVAFKDYQAILNDVLKKDGNKEQLKCLIKDKIIFFQRPWQQAKNKGQCPFEKVKVKKEKAIKGTGKKEIVEQHIGRTVIPRSHPLFQEFKIWQQINNARIFLHIKSERLDLFSNSNDFEKYIGKTIPQVKGLFYNALQMSKTLSWRSFAINDLGLKKGVEVVDKDTGEMTVAFFNYNFRKQKKDGTYEDIKLKGNNTKVSLQNILSTKPADWFNQMHSDKQQITNLQLLWEIIYDITNSDANKVATIIENHFAFDKDICFQLANLKFDDAGMGSLSAKAIRQILPLMSDGKYITDKTTEKVNSLLALNTSNEEKAKDKDEKLESLKEFIPDKKARLRLSKFNTAGDFTYLNYWEATAVRYGSHSTKKGSPIGTMKPVERHSMNNPIVEKIVNETISVVNDIQQKYGFDEVRIELSRELKASMDERQQIWEGMNEGAKKNEWAKQMLRELKADLKEGKDAIPKDVKTWSEKLKNANLETETSNNSNINKIKIIEDVVRFKNAEEYKVKSKEYRLSEPTQLEVKKYLMWLEQNFKCPYTNQPIPFTDVFARGKVVEIEHIIPRERYFLNSYANKVITWREVNQAKANNGNRTAYEFIVSKRLEEKVKVGNNEFTLISKEEWESHVKSMFPKGGKQTNLLRKEIPEDPINRTLNETQYINKKLKEKLSELVGAQKVWVTSGAVTDILRDRWHLNDIMKELMRSRFENFEIPTGKKSIKLKTLAEQQVMFNNIQSVLDNPNGFEVYKIPTGKKFIEIRDIEELKKIHSELETLIKENTITINQKIKSYGYSTSEEAFETKSLTHFTQQYNNKTGNYEDREVFEGYSKRLDHRHHAMDAIIIACTKQNHIQYINTLNAINSADQESDDSKKAKYSSLKADVCIGKSSKKFKTPWIEDRFIPDIRNALSEVVISHKNTRLLISPSKHRVNKDIKPNKIASIRGELHKETNYAKKNYFVEGGRTFVNKLIPQILKDKKENQGQTRVFFKSIEEIIKETVLKKKYQDILIPLFSKYEHDTLDDEKCKTHSKAILKEIEENKLLINSQTKDSLQWLSTYSDKEHSSRPMGLSMDLNKADVIEKIADPRIKRLALYRLKYVNKQKVAIDKLDIEKKDKDKLKRDVETLSLYSNAIYEVRVQLDNHKDKMKRNEKAYKWVELIDFDWNDYDKIWYAKDETTKKIKEKLNERDFEALKQTYFTSPLFLSKTPIEVKKSSQLFSFELYEITKGRYVYASDVFMTYFFRDKNETTKDAKRSIAFLKLLDAARIASFEKPDKLDYSKFISKPESELIFTLSKNDLVYLPVQNLSKEQMDEIDWTNMQSIMPLLHIVKDMNPSRNEIKFQQLSQADSIKITEADSRSLFNNLELKEQTETIKYGDTKTWQRCIKVFTDKLGKKVVPYWEFPNGCWDKEKAIELGLTKNGL

SEQ ID NO: 4864 - protein, 1768 aa, synthetic construct
  REGION 1..1768: note = Synthetic
MKKILGLDIGTTSIGWAIAEATDEKRVDGITGKETETDINNDRVGIHKDAVGIRIIAQDTERFDRGETLNDPKGSTLTPAANRRKYRGARRMRNRYKLRRGKLEHILAFISMNPDKAYYTNNKGKRGTYNDIGKAIYQLRSRAITEEITLNELGRILIHLNQWRGYSSDRFAKEEKPKFDYWVVEVLAIDDMNKVAIYEKNSKEEIKYYEFSIKVRFAEPYNLGDTEKDNTVTELSGFIYKKEIKFKQGDFITIKRPELRQVKKGKTVISEYYTITDTIPDPTDWNYKYQTLEKRLAEWCEAGGTVGSYFYQNFYETTILPRIRNNVVNRRWYEDELNKILDFQYSVHKDFFDNLNIEGLVKAAFKDYAPVLAAVTSKIGIKEQLKCLIRDKVIFFQRPWQQAKNKGQCPFEKIRIKKKVTIKGTGREDVVEDYVGRTVIPRSHPLFQEFKIWQQINNVRIYAKIAGVKVDLFADENDFKNYVGKGIREVKNMLYDALQQSKTLSWKNFAENQLGLRNKKEIVDISTGELIKCDFEYNFRKQKKDGNYEDIKLKGNTTRVALANVLPDEADDWFDEIHSDRQAISNLQLLWELIYDITNGDVLKVAAIIGKHFCFDTDICLSLANLKFDDAGMGNLSAKAIRQILPLMSNGEGLTNKTLTKVNALIDFNNSASEMEAEEKLASLRDIIPDKKARQRLSGFTAISDFSYLNYWEATAVRYGSHSAPKRMVIGSMKRVEQHSMNNPVVEKIVNETISIVNELYKVYGFDEVRIELSRELKASREERQQIWESMNANADRNEWAKQMLREMKREFAGLDTDASNKSNIDKIKIIEDVIKYKYASEYKVKEKEYNLTEPSKADVKRYLMWLEQNFKCPYTNQPIPFTDVFAHNKAVEIEHIIPLERYYLNSYSNKVITWREINQAKADYGNRTAYEFIVSKRKDDFIVLSDGRKVPLVAKDRWEEHIKAMFPRGAKQANLLRKEIPEDPVNRTMKETQYINKKLKEKLGELVGDKKVWVTSGAVTDILRDRWHLNNVMKELVRDRFENFELPTGKKTFRLKTLEEQERVLNEIGKILEGTDDFTTYEIPAGKKVIELTEIEELRTVYAELAEVINENTFTGSKKVTPYVYSTSESAYETKSLVHITSQINTKTGHYQDREVFNGYSKRLDHRHHALDAIIIACTKQNHIQYINTLNAINSADQESDESRKRKYALLKADICIGNSSKAFKTPWVENEFLPRVKEVLSGIVISHKNTRLLISPSRHRNKKGIESGMLASIRGELHKETNYAKRSYFNGGKTPVIKLIPNIFEAKFKNQSQTMVHWKTFSEIIRETVLKEKYQAILIPLFDQYEEIVLSRTLCKEYGSIVLNRIHTENLLVNSGTNQPLQWLSTYAEKDKSARPNGLSMDLNSKKEVDSIADPRIKRIAGYRLNYVNERKAAIDKLEIDKKEKDAHKRKVEALPLYSNAIYEIRIRLNDKEYKWIELKDITQADVEKISYPEPLNHVAGKVGNTERVKKILMEVGIEVAKHTYFDNPIFLSDNPIEVKKTRQLSYYQKSLYEITPKRYVQVEETFMTYFFKEKKSHSNLNISNPLIPKFLKFIDAVNIVNNEKPSAIRYKDLIQQEITNEELQNGVEYDLVFTLSKNDLVYLPDKVLSAEELEAIDWTDFATINKDIYIVKDMNQSQKKIVFQQQFKAESITISAVDASAIFGNEQLKEQVEEIKYGNIPMLQRCIKVFTDKLGKKIVPYWKFPNGCWDRQSARELGLINRDAE

SEQ ID NO: 4865 - protein, 1148 aa, synthetic construct
  REGION 1..1148: note = Synthetic
MNNNDIPQATDTFSQTPDFVPHDPKILKKEIDYVIGLDIGIASIGWAVLALDEEDKPIALIDRGVRLFDKAETKKGDSLSLARRTARGQRRRIGRRVKRLDLARQTLIEHGVLQPNDLNNNPDGNDFVANRPDNAPGNTVWDLRVKGLDHKLKSHEWAAVLLHLIKRRGYLSQGKSEAKADEETGKLLAGTAENHKKLANGNYRTPAELAVNTFAKESGRIRNQAGSYQHTFLREDLQKELQSLFENQRNSKNPYANETLEKAFDDYLTWQKPALSDDALLKMVGPCTFEDGEKRAAKATYTAERFTWLTKLANLKIITNGVSRELTPEERDKLKELPFELTSLTFSQVRKTLGLDENSRFNLASYKSKKKSKKNKQDTQKEKTKTVIKDAEKETFMECKSYHAIRKALGKTLDSEWEAIKNNPDLLDLIGTTFTIYKTDKAIRKELKSHLSPEAINALQKNLSFTKFLHVSLKMIKKIMPYLEEGMRYDEACKEVYGSHYGNSTQRLLKQFLPPMDSEENVLNDVIRNPVVARAVSQTRKVINAIIRRYGSPTKVIIETGRDLGKSFQERKEIKDHQKENRNQKLAAQEEFEKRFGVSPNGGDLLKMRLYEQQQGKCLYSGTTIELNQLLDKGYVEIDHALPFSRTWDDSFNNKVLVMGSENQNKGNRTPYEYLDGEHDSARWQTYVALVNGSNMSYLKKQRLLTKEIKEDEWKARNLNDTRYIAIYLRDFIKANLLLKSSKENNVLTTNGRVTSLLRGRWGLAKDREANARHHAMDAVVVACTTPSFIQRITNYMKRKEANERLETTDPVTGEVKRVHFPKPWDGFRSEVLASIFRENPQEEIPAYRKLVLDQYLDVDSIKPLFVSRMPRRVVTGEGHEATIRSAKRLKEGLSTVKKSINDLSKSDLERFVNKDREPKFYQILKDRLETIENLVNALNESKNTDEEAQIKNKLNEVKEAPVHKLNNHGMPTGPIVKSIRLLVTPKSGVGIRKGVANNGKMVRVDIFKKGESFYGVPIYAWQVAKGILPNKGVNSKKSENDWELMDESAEFQFSCFKNDLIKIVPKTGDHIFGYYVGFDRDRRSFTLAKHDKGSTNGEGDKSGTFRFSITTMAKEIIKCEIDVLGHTITEVKHEKRLDFSKSSKKKD

SEQ ID NO: 4866 - protein, 976 aa, synthetic construct
  REGION 1..976: note = Synthetic
MTKILGIDLGTSSIGWSLLNEENKKPTSIIDMGVRIFPEVTDAKTKTPKNQERRVKRGLRRQTNRKSRRRKKVASILKRFGLLSCTQNNHQKWRDWNFKMGCPYEIRKKALVEKISKEEFAKVMVHFSKRRGFKSNRKVAGGEEGVVKSAISEIRQKMESSGFKTVGEFLYNQEIKRGKYLHRDMFEEEFNQIWAKQSSFDSSTYNDKLKEELWDSIFFQRPLKIQKHLIGNCSLEQNRKRCPKAYLAFQEFRILSELSNLEIKDPITGDHEPLSTDQKERIFEVLNFTEKLTWKKVRKELGLHDGETINLEATGTKHLQGNKTAHQLIKIIGKEFWSSLSLAQKEQLITDLTTIELEKSLENRLTDHWKIQQDAIQSLVKVRLEDGYGNYSHKALNKLLPYLREGKTLSEAKNRAGYQEHEKNEFLNALPLPENLRNPVVMKAFHEVRKVINAIIRTHGKPDIVRIEMARDLKQSKKDRDQYLKIVRAREKENEKISSKLREDSEFSLVKPTRDDRIKYQLWEECGMICPYSGQSISKTMLFGGGIEIEHIIPFSISLDDSIGNKTLCTTALNREKGNKTPHQAFGKQPEWADMLQRVRSSRMSFGKKKRFETKEVNFDNFSSRQLNDTRYICKEVSKYVKKLGVRVDVGRGQLTHAIRHQWGLNRLLSTENQKNRDDHRHHAIDALITALISPRMMQEVSRISQRLDGASLSDRLFILPKPWATFDKDLKQKVFGIIVSHAEDNRISGAFHEDTAYGKRKDGTLSYRKSIEVLNINECQNKIRDPAVKTIIVNQISKYNGDIKKALAEPIFHKDGKTPIKKVRLETRKEDHSLFEVHQNGEPLKYHLLGNNHHLEIFEDKNGKWIPKIISTYEAAKRARVKKENIYSKDFEGNKFIMTLSSNQMLEISNENNLEYYKVQNISVSSGGRVLLKRHYSADIKDLSTTVDKTVNALKKLNFRKITIDPIGRVQSRND

SEQ ID NO: 4867 - protein, 1187 aa, synthetic construct
  REGION 1..1187: note = Synthetic
MLSRQLLGASHLARPVSYSYNVQDNDVHCSYGERCFMRGKRYRIGIDVGLNSVGLAAVEVSDENSPVRLLNAQSVIHDGGVDPQKNKEAITRKNMSGVARRTRRMRRRKRERLHKLDMLLGKFGYPVIEPESLDKPFEEWHVRAELATRYIEDDELRRESISIALRHMARHRGWRNPYRQVDSLISDNPYSKQYGELKEKAKAYNDDATAAEEESTPAQLVVAMLDAGYAEAPRLRWRTGSKKPDAEGYLPVRLMQEDNANELKQIFRVQRVPADEWKPLFRSVFYAVSPKGSAEQRVGQDPLAPEQARALKASLAFQEYRIANVITNLRIKDASAELRKLTVDEKQSIYDQLVSPSSEDITWSDLCDFLGFKRSQLKGVGSLTEDGEERISSRPPRLTSVQRIYESDNKIRKPLVAWWKSASDNEHEAMIRLLSNTVDIDKVREDVAYASAIEFIDGLDDDALTKLDSVDLPSGRAAYSVETLQKLTRQMLTTDDDLHEARKTLFNVTDSWRPPADPIGEPLGNPSVDRVLKNVNRYLMNCQQRWGNPVSVNIEHVRSSFSSVAFARKDKREYEKNNEKRSIFRSSLSEQLRADEQMEKVRESDLRRLEAIQRQNGQCLYCGRTITFRTCEMDHIVPRKGVGSTNTRTNFAAVCAECNRMKSNTPFAIWARSEDAQTRGVSLAEAKKRVTMFTFNPKSYAPREVKAFKQAVIARLQQTEDDAAIDNRSIESVAWMADELHRRIDWYFNAKQYVNSASIDDAEAETMKTTVSVFQGRVTASARRAAGIEGKIHFIGQQSKTRLDRRHHAVDASVIAMMNTAAAQTLMERESLRESQRLIGLMPGERSWKEYPYEGTSRYESFHLWLDNMDVLLELLNDALDNDRIAVMQSQRYVLGNSIAHDATIHPLEKVPLGSAMSADLIRRASTPALWCALTRLPDYDEKEGLPEDSHREIRVHDTRYSADDEMGFFASQAAQIAVQEGSADIGSAIHHARVYRCWKTNAKGVRKYFYGMIRVFQTDLLRACHDDLFTVPLPPQSISMRYGEPRVVQALQSGNAQYLGSLVVGDEIEMVFSSLDVDGQIGEYLQFFSQFSGGNLAWKHWVVDGFFNQTQLRIRPRYLAAEGLAKAFSDDVVPDGVQKIVTKQGWLPPVNTASKTAVRIVRRNAFGEPRLSSAHHMPCSWQWRHE

SEQ ID NO: 4868 - protein, 1170 aa, synthetic construct
  REGION 1..1170: note = Synthetic
MAKKKISYRIGIDVGLNSTGLAAIEVDDDGAPIRILNTMSVIHDGGVDPDAAKVRGTRLAISGIARRTRRMRRRRAKRLDRLEQILEKYGYTDTEPVLEEPYGPWICRAELADGFINDDEQRRMMIGIAIRHIARHRGWRNPYQNVRALLNIDDSDLSEEYKNLKEKVQDQINDGKDLPNFTPSQLVRDYLDNFSGQPAARIRTGKAGPRGNRRDAVGILPQRMRQSDYAYELQRIFDMQKIGRDEAQELLMAVFEAKSPKGSAEKRIGKDPLTGKKRALKASLAFQKYRIVATITNLRIKTGTGSERMLSPTELNDIYTYLLRVQDDNHLPTWEDICEEVLHIGRYQLAGIGKTFEGGERISNMPPVIQTSLAIHGLSEGTLAEKLTKWWDKADDDSRESMIKLLSNTVDIDRVNEVDENFASALDFIDSLDDEELTKLDKIALPRGRAAYSEEALNKLTADMLNTGDDLFSARQRIYHVNNSWRPPQPPIGEPLGNPAVDRVLKITNRYLMNCLNRWGQPRRVTIEHTRSGFTSVKQATEHQKISDKRAEYRRDIVKQLEEAGVESVHEYDIRRWEAVQRQNGQCLYCGRDITFKTCEMDHIVPRKGPGSTNTRTNFAAVCPECNRMKSNIPFASWAETKEAKDRGVSLDKAIKQVRFFNFTKNEYSPQAQRNFKKSMIERLKQKTSDEPLDNRSIESVSWMADELYKRIDWYFNHEQYETSKKAINDDKDNLSGTQVVVYPGSITAEARNAAGLGGNIHFIGGRYKTRLDRRHHAVDACVIAMMEPGIARILTERNQLRQAQRLTARIEDDEVNWKDYPTENTAGYNKYQAWSDRMHALLEYMNNALDYDKIPVVRWERLQLGNRSAHEDTIHPLKKLPLSHEISAIDINHASTPALYEALVSLPDFSEQDGLPADPSRQINVNGERYSGDDLVSFFNSNAAQIAIQGGSAELGTAFHHARIYRCWTVGKNGKKKIFFGMIRVYQHDLLHAKNEDLFTYPLKRSSVSMRYAKKEVVHAILSGNAEYVGYLCVGDELVLDLKGDKSNDEGGSRLSGQVGEFVQKFEEDSKVNSQIVNRWTVDGFPDEAKLRLRPSMFAGEGLKNMKSELVENAAIKNILSKTGWRVSVDVISKKSPVVLRRNAFGEPRWKTNAGLPVSYRWQDTETKE

SEQ ID NO: 4869 - protein, 1157 aa, synthetic construct
  REGION 1..1157: note = Synthetic
MTPLTKKGISMSDKTYRIGIDVGLYSVGLSAIQVNDDDDPVRILNAQSVIHDGGVDPNAQKSADSRRAQSGIARRTRRMRRNRKKRLKRLDQILVESGFPVSSENDLEGFEPWLLRAQAADAFIEDEDIRKRAISVSCRHIARHRGWRNPYLDVRTLLAVDSPSSAFYDKLVENAALEMDGQMPDSDATPAQIVRDVLEYKRGEAAIRLRKSTAENKKNRLALFPEKMMQDDYAYELRLILAKQAVPKDIARKLILAVFQSQSPKGSAEKRVGKDPLDPSQPRALKASLAFQEYRILNILTNLRLQDGGAERRLSIEEKQKLYKMLVEDTGREKKYETWTDIASAMEWKRNWLKGVGSLTADGDDRVTSRPPHIDIVEKLNGIKDTKFRKSILSWWKSATDVNREAMIALLSNTVDIAKKQDDPDFSSAVDFIDSMDDSDLQILDTISIQPGRAAYSSKTLRALSKRMYSTDDDLHDARKHVFGVDDSWRPPQPAIGAPLGNPSVDRVAKIVNRWLLACQSRWGNPLSIQIEHVRDALSSAATATADKRAYERALGKRNAEKMKVKNELRLQGLNEPHESDVRRQEAITRQQGKCLYCGDDITFSTCEMDHIVPRKGHGSTNTRDNLAAVCIQCNRQKSNTPFALWCQTPEAKSRGVSLEAAIHRVKGFFTESKELTGRQAKVFTSSMIMRLKQTTADDPIDSRSIESVAWMADELHRRIDWHFNGDASESDHGRRVLVAVYQGRITSEARNVMRFQAGGDFHFVGGHGKTRLDRRHHAVDASVIAMMTPAAALTLAERINLRDSQRCIGRIREGEIDWKQWPNEPTEKYQHWLDNGKRLFALINDALDNDRIPITHWQRYALGNSIAHEATIHPLRKIPLGSAIDYETISRAATPALYCALTRCPDYSVNDGLPENKQRHITVNGKVYGPEDEVAFFASDHVELAVQGGSADIGKTIHHARVYRCYFVDRRGQKKWFYGMIRVFRVDLIHARHENLFTYPLPSQSISMRYAETRTAEAVLCGHAEHVGNLVAGDEIEVPMIGKLTGKIDTFAKFFNESLNNEYVAERWSIDGFDSESKLLLRPLMLAEEGIANWEDNSHLSIPDDVKGLIARGWRPSVDTVFAKKPRIVRRNVLGEPRWKSRSGMPVSWRVTGSEA

SEQ ID NO: 4870 - protein, 1155 aa, synthetic construct
  REGION 1..1155: note = Synthetic
MAKRAYCVGVDVGLNSVGLAAIQVDNDGNPVRILKAQSVIHDGGVDPNSQKSGDTRKKQAGIARRTRRMRKRRRARLQKLDNILLELGYPKTDNALLEGPEIWKIRAMAADGVIENDAERKTAIALVCRHIARHRGWRNPYHRAESLLGIDSIGSEQYAQMRETAMERIGGEYIPEDATPAQVVCAVLHAEAGKPAVRIRTSTRSKVKGDREGIIRQRLMQTDNAYELNRIFAMQQVPVEDARKLILAVFAAVSPKGSAEKNVGRDPLQPKLRRALKASLAFQRYRIINIITNLRIRVNNSERTLTMDELSAIYNLLTDAKNNDDITWIDVANELGIARNQLKGVGALTVDGDERVSNVPPRLTSLQRIAQLKDKKLSKKLLSWWSAQDDEASCEAMLSLLSNTVDIDAVRDDLEFASAIEFIESLDDAQLTALDKVDLPAGRAAYSSDTLRRLTSRMLVSGEGLHDARKAVFGVGDSWRPPQPSIGAPIGNPAVDRVLKITSRFLLDVRKRWGNPISVQIEHVRGGFASVSSAQQDKRDYELANERRYQYRQEIIQQLQNDDGIDIDSVRDADIRRQQAITRQNGECLYCGRTITFRTCEMDHIVPRKGAGSTNTRDNFAAVCEECNRMKSNLPFAVWANTESAKARGVSLKDAIDRVEMFNIDSRELAGSRATKQFKQGIIQRLRQTEADDSIDNRSIESVAWMADELHRRIDWFFNAGQYSNDSDSESEHTKVAVYRGSVTAEARKASGIDGQIHFIGARYKTRIDRRHHAIDAAVIAMMNASVSRTLEIRSTLRMSQRVLGYIEQDEVAWKDYPTAMSPGYEAYAAWLNRMKSLLILLNDALDNDRIPVLYPVRYSLGNSVAHDATVHKLLKKRVGDAMDAETIRRASSPALYCALTHLPDYSKKDGLPADMERRIRLHDRYLTADEEIGFFEGQAAQIAVQGGSADIGSAIHHARVYKCYKENAKGVRKYFYGMVRVFQTDLVRARHEDLFTCPLPPQSISMRYAEDKVVQAIQSGRAEYKGFLVVGDVIELDLPADIGGQVGSFRAFFAKDALTNPSVVNRWVVNGFFNNTKLRLKPAMTAPEGLEHFSEDSEEGMSSLIADTKKVMDRPGWIPAINVLAELLPTVIRTNELGEPRFVSHNQMPISWTF

SEQ ID NO: 4871 - protein, 1155 aa, synthetic construct
  REGION 1..1155: note = Synthetic
MEGISMSSKTYRIGIDVGLYSVGLAAIQINEDGNPVRILNAQSVIHDGGVDPSAEKSRGSRRLQSGIARRTRRMRRNRKKRLERLDQLLVKSGFPVSTENDLEGFEPWILRAQAADGFIEDDATRKRAIAVSCRHMARHRGWRNPYLSARTLLAVDSPSSAFYDKLVENAAQMMDGQLPEEEATPAQIVRDVLVYRQGSAAIRLRKSTAEKKKDRFALFPEKMMQEDNAYELRLILSKQSVPQDVARELLLAVFQSQSPKGSAEKRVGKDPLDSSQPRALKASLAFQHYRMLNMITNLRLVDNGVERRLSVEEKQKLYQLLLSDTGRDKKYDTWTDVASAMGWKRSQLKGVGSLTSDGEDRVTSKPPHVDIIEKLNDIKDSGLRKRILEWWAEATESERESMVALLSNTVDIAKKQDDPEFSSAVKFIDALNDDDLQKLDGIDMQQGRAAYSSKTLCALTQQMLTTEDDLHDARKHVFHVDDSWRPPQPAIGAPLGNPSVDRVAKIVNRWLLACQSRWGNPVSIQIEHVRDALSSAATLAASKSAYDRAISARNLEKQETKDTLRREMNLSEPHESDIRRIEAITRQGGKCLYCGTPIEFTNCEMDHIVPRKGPGSTNTRDNFAAVCITCNRQKGNVPFAVWCQTPAAVQRGVSLEKAVARVNDFFKESKSVRGRQATAFKKSMIMRLKQTVADDPIDNRSIESVAWMADELHRRIDWHFNGDASSREVEAKVQVAVYQGRITSEARNVMRFQAGGDFHFVGGHGKTRLDRRHHAVDASVIAMMTPAAAQTLAERMNIRDSQRYIGRIEEDEVDWKQWPAKPTEKYQQWLNNSTRLFALINDALDADRIPVTHWQRYSLGNSIAHKDTIKPLLKVPLGSAISKETINRAATPALYCALTGCADYSPTDGLPENKQRHITVNGTAYGPDDVVEFFKDDSAQIAVQGGSADIGNAIHHARVYRCYTLSSKGVKKWFYGMIRVFQADLVHARHDDLFTYPLPPQSISMRYAESRTAQAVLDGRAEYLGNLVVGDEIDIPMNRELKGQIATCVVFFNELPGNHSLIEKWSVDGFYSDSTLRLRPLYLAGEGLPKLGEVLGVEIPADIRKILVHPGWLPSVDKTFSTCPQVIRRNSLGEPRWKSCSGMPVSWRILSSEEA

SEQ ID NO: 4872 - protein, 1150 aa, synthetic construct
  REGION 1..1150: note = Synthetic
MRQKRHVIGIDVGLNSVGLAAIELDETEMPVRILKAMSVIHDGGVDPNSQKSGDSRRQQAGIARRTRRMRRRRKARLARLDKKLSDLGFPIVDEKLLRGFDVWRIRALAASEYIENEDERKRAISIACRHVARHRGWRNPYIRAESLLSVDAPSSEQYQQLRDNAIAILGGEYIPETATPAQIIDAVLAENHGPATRIRTSTGSKKLGTREGLISTRLMQADYAYELRTIFKQQHVPEEVARELILAIFEAKSPRGSAERRAGRDALDTTEMRASKASLAFQRYRIANISTNLRVLDGNALRPLTVGEKQQVYQRLASQQTEEHLLWNDICKELGLPRNRLKGVGSLTQDGEERVTSRPPQLTSVQRIMGLKDPKLRKLLQQWWNETDDSAHEAMIALLSNTVDIDDKREDPIFIEAIEFIERLDDDALTKLDSIDLPSGRAAYSVKTLNKLTRRMLDTDDDLHAARKALFGVDDNWRPPQPPINAPLGNAAVDRVLRIVHRFLVAAQRRWGDPESVQIEHVRNGFSSIPTARQDKRDYESYLTKRNTYRAQQAENLKKEFGLDTVRDYDLRRIECITRQNGECLYCGRTITFKTCEMDHIVPRKGVGSTNTRNNFAAVCEECNRSKSNMPFAVWAQTDVARQRGVSFEDAIARVKMFNIDSSAMSSREAKDFMNSVIARLRQTEQDEPIDNRSIESVAWMADELHRRIDWYYNSARYMGVVPADTPIATRVSVYQGGITAEARKASQIDGRIHFAGARYKTRLDRRHHAVDAAVIAIMTPGAAQSLQIRRNLHIAQNAIGRIEKDEVAWNEYPTPGNQGYAAYGKWAESMHALLNLLNDALDADRIPVTHLYRYSLGNSVAHDATIHSLVKIPLSNAMDAKMVAKASTPALYCALTRLPEYSPKNGLPEDAHREITVNGTHYTVSDNVTFFSRNGAQIAVQHGSADIGCAIHHARIYKWYKENRKGERTYSYGMIRVFQADLLRAVHEDLFTCILPEQSVSMRYAGHNVVDAIRNNRAEYKGYLIAGDEIELDFPDDVSDQLVSFLDLFEQDLHIDSAILGRWVVTGFESATRINLRPSVLAFEGLSKVLERLDVDSKVLADVNTLFSRSWRLTIGKILPYKATVVRRNTLGEKRYVSYNHMPVCWSFD

SEQ ID NO: 4873 - protein, 1149 aa, synthetic construct
  REGION 1..1149: note = Synthetic
MTKRPYKLGIDVGLNSVGLASIEVDNEGAPIRILNMQSVIHDGGVDPEKNKEAITRKAMSGVGRRVRRMRRRRRARLQRVDLALEQAGYPIIEPESLTLPFEEWQVRSDLATHYIEDDEIRREDISIAVRHIARHRGWRNSYKRVDSLLPDVPYSKQYEELLDRAEEKLGKTLPQELTPAQIVHAVLANGFTEAPRLRTKVNTAEKVSVQGLLPVRMMQEDNANELKRIFEVQRVPKEEWLPIFREVFHVVSPKGSAESRVGRDPLDPSQPRALKASLTFQRYRIINVVTNLRIFENGMERPLTVDERQMVFDNLCTPSSDDITWSDVAELLGLKRSQIRGVGKLTEDGEERIATRPPRLTSIQRIYAAEPKIRKPLLRWWNDASEGSQEAMIRLLTNTVDVDRVRDDLDYAEAIEFIDTLDDDGLTRLDSIDLPAGRAAYSVSTLTKLTERMLTAEDDLHEARKSMFDVSDNWRPPSDPIDAPLGNPAVDRVLKIVNRYLINCQRRWGDPVTVQIEHVRNSLGSVASARKAQREYERINERRFASRQELERKLREDESQDSVRNSDIRRLEAVQRQNGQCLYCGSPITFRTCEMDHIVPRKGAGSTNTRTNLAAVCAECNRMKSNIPFAVWARTSAARDREVSLSGAKKRVDAFLADSGASPREQRAFHQAVKARLEQTEQDDPIDNRSIESVAWMADELHRRIDWYFNAERYRNDAPEDSYASVPTTKVWVFQGKVTALARKASGIEGKIHFIGAKTKTRLDRRHHAVDAAVIAMMNHAVAQTMMERDSMRESQRLTRRTSGEVSWKEYPTPTDSGYASYQQWLSSMDRLLALMNEALDEDRVPVSQWRRYSLGNSIVHDATIHKLVKLRLCEAMDADLIRRASTPALYCALTRLPDYSPVKGLPADESRSITVNGQRVSTQETVGFFASKAAQIAVQGGSADIGSTIHHARVYRCWKANARGVRKYFYGMIRVFQTDLRYSRHDDLFSVALHPQSISMRYGEPRTVQAVQEGRAEYLGYLIVGDEIELDLSAAPLSGQIGEFMQFFDGMNDEGRNACRRWVVDGFYSPSKLRLRPRMLASEGLKKLTEFGNIEIPDGVDKIINRQGWFPAIGVIDRYRPRIIRRNAFGEPRWTSSSGLPVSWSWPE

SEQ ID NO: 4874 - protein, 1148 aa, synthetic construct
  REGION 1..1148: note = Synthetic
MIKQPYKLGIDVGLNSVGLAAIQVDDEGMPVRILNMQSVIHDGGVDPEKNKEAITRKAQSGVARRARRMKRRRRARLKKIDTLLEAAGYPIIDPESLTGPFEEWHVRSNLATRFIDDDEIRKEDLSIAIRHMARHRGWRNSYKRVDSLLVDNPYSEQCEELFRRAEERAGEPLPEDCTPAQAVCLVLANGFAEAPRLRTKVNSAEKVAVEGLLPVRLMQEDNANELKRIFAVQRVPRDEWLPLFREVFHVISPRGSAESRVGRDPLAPGKPRALKASLVFQRYRIINVITNLRVVEHGAERPLTVSEKKTVFDNLCSPSKDDITWADVADLLGMKRSQIRGVGKLTEDGDERIATRPPRLTSIQRIYDADAKIRKPLLRWWNNAPEAAREAMIRLLTNTVDVDRVRDDLDYAEAIEFIDELDDDGLTRLDSIDLPAGRAAYSEDTLVKLTERMLNTDDDLHEARKAMFGVSDNWRPPTDPIGTPLGNPAVDRVLKIVNRYIVNCQQRWGDPESVQIEHVRNALGSVASARKDKRDYERQNEKRFGYRQDLEGQLRKGENLESVRNSDLRRLETVQRQNGQCLYCGAGITFRTCEMDHIVPRKGAGSTNTRTNLAAVCAECNRLKSNIPFAVWARTSAARSRGVSLTDAKHRVDMFLFDPRSDNPREQRAFKQGVKGRLEQTEADPPIDNRSIESVAWMADELHRRIDWYFNAASYQNVNSFGEVIPAKVQVRVFQGKVTALARRASGIEGRIHFIGAHAKTRLDRRHHAVDAAVIAMMCHSVAQTLVERDSMRSAQFLTGVRPGEVHWKDYPGPSDSGYGVYHRWLESMERLLLLMNDALDDDRIPVVQWQRYSLGNSIAHDATIHKLLRVRLGDAMEADLIRRASTPALYCALTRLPDYDSKKGLPTDDARHIVVNGERLEADDCVGFFASNAAQIAVQGGSADIGSTIHHARVYKCWTTNAKGVRKYFFGMIRVFQTDLMRSRHEDLFSVTLPPQTISMRYGEPRTVKAVQEGRAEYLGYLVVGDEIEVDFSNTSTNGQIDEFIRFFSELDSLTEELSYTRWVLDGFFSSTVLRLRPRMISSEGLEKLSDVRNLKIPQAVIKILDKGWLPSVGPIGQYHPRIIRRNAFGEPRWSSSSGLPTSWSWN

SEQ ID NO: 4875 - protein, 1148 aa, synthetic construct
  REGION 1..1148: note = Synthetic
MAEQPYKLGIDVGLYSVGLAAVEVDDEGMPVRILNMQSVIHDGGVDPEKNKDAITRKAQSGVARRVRRMRRRRRTRLRKLDELLEAAGYPIIDPELLTRPFEEWRVRSELATRFIEDDGLRQENISIAVRHMARHRGWRNPYKRVDSLLVDNPYSSQYEELVRRAEERLGRPLPENCTPAQVVDAVLSNGFAEAPRLRTKVNAAEKVAAEGLLPVRLMQEDNANELKRIFTMQRVPRDEWQPLFRQVFAAVSPRGSAEARVGRDPLSPNNPRALKASLVFQRYRIVNVITNIRIAEGRTERPLTVDEKKTVFENLCSSSQDDINWTDIADLLGLKRSQIRGVGKLTQDGEERVSTRPPRLTSVQRIHDAKAKIRKPLLSWWAAASDPARESMIRLLTNTMDVDRVRDDLDYAEAIEFIDTLDDEGLTQLDSIDLPTGRAAYSEDTLSKLTERMLNTDDDLHAARKAMFGVSDNWRPPMDPIATPIGNPAVDRVLKIVNRYIVNCQRRWGDPETVQIEHVRNALGSVAFARKDKRDYERRNEKRSAYRDVLGRQLREAERYDHVRNSDIRRLEAIQRQNGQCLYCGRGINFRTCEMDHIVPRKGAGSTNTRTNLAAVCAECNRMKSNTPFAVWARTPAARQRGASLTEAKKRVDAFLFEDKSMNPREQRAFKQGIKGRLEQTESDPPIDNRSIESVAWMADELHRRIDWYFNAAQYQSDSGRADERTHTTTVRVFQGKVTALARRASGIEGRIRFIGANTKTRLDRRHHAVDAVVIAMMGPRVAQTLVERDSIRESQHLMGVAPDETPWKEYPEPSNAGYFSYHRWLASMEKLLCLMNEALDNDHVAVFQWQRYSLGNSIAHDATIHKLLKVRLGDAIDTELIRRASTPALYCALTRLPDYDPVRGLSGDDSRHIVVNGEHLGPDDSIGFFASQAAQIAVQGGSAEIGSTIHHARVYRCWTVNAKGVRKYFFGMIRVFQTDLMHSRQRDLFSVALPPQTISMRYGEPKTVKAVQDGRAEYLGYLVVGDEIEMDLSSVPLGGQIGEFVQFLEELGASGSSSCNRWVFVGFDSPSRLILKPRMIAAEGLENLEKKGVEIPEAVRKVIKLPGWRVVVNGLGDYRARVIRRNAFGEPRWSSSAGLPISWSWQQ

SEQ ID NO: 4876 - protein, 1139 aa, synthetic construct
  REGION 1..1139: note = Synthetic
MNTKRYRIGIDVGLNSVGLAAIEVDDDDMPMRMLNAQSVIHDGGVDPTKNKEAITRKNVSGVSRRARRMMRRRRKRLDRLDAALERAGYPIIEPESLTTPFEEWHVRARLAESFIEDEATRREDLSIALRHIARHRGWRNPYHRVESLLADNPHSAQYGELKTRAEERLGRGIEDDPTPAQLVVAVLSNGYAESPRLRTSTKRGEGLLPQRLMQEDNANELKRIFDVQHVPRTEWEPLFRNVFRATSPKGSAQGRVGRDPFDPSQPRALKASLVFQRYRIANVLTNLRIREAGAVSERPLTVEEKQRAYALLSSASREDITWADVATHLGLARHRLRGVGTMTADGEERISAMPPCMTSVQRIREADRKIAKPLMKWWDDASEAAREAMIRLLSNTVDFDAVREDLAYAEAIRFIDALDDDGLTKLDSIDLPAGRAAYGEETLRRLTERMLTTDDDLHTARKTLFHVSDYWRPPADPIGAPLGNPSADRVVRIVSQWMTGCRNRWGNPVSVQIEHVRSAFDSVATARQYERRTGSRSVYRSALASKLRESEHLERVRASDIRRIEAIQRQNGQCLYCGRPIAFGTCEMDHIVPRKGVGSTNTRTNLAAVCADCNRLKSKTPFPVWAASEPARQRGVSLSDALQRVDNMLYDRKADTPQTWRRFKQEMKTRLKQTEGDEPIDNRSIESVAWMADELHRRIDWYFNSQRYLAERDEDRPSREVAVDVFQGRVTALARRASGMEGRIHFFQARYKTRLDRRHHAVDASVIALMRPSVAKTLVERDSLRESQMIAGGLAEGERSWKEYPYESCTGYDSYQRWRVGMELLLELLNDALDHDRVVVRQPMRLQLGNSIAHDATVKALSRVRLGDAMDADLIRRASTPALWCALTRLPDYDAKTGLPADDTRRIVVHGTEFMADDEVGFFDGQSAQIAVRGGSSDIGSAIHHARVYRCWKQNAKGVRKYWYGMIRVFQADLLRSRGGDLFTAPLPPRSVSMRWGEPRTVQAVQDGNAEYLGWLVVGDEIHVDFAQGKLKGQIGEFAEWCGDSDSADTARCVWVLAGFYSNSKLTIRPRLLAAEGLKKFQGQQEVPDSVRKIVDAKGWIPSVDVVSSYSPVVIRRNSMGEPRWHSQSGLPCSWRWSD

SEQ ID NO: 4877 - protein, 1138 aa, synthetic construct
  REGION 1..1138: note = Synthetic
LNSVGLAAIEVSDEDMPMRVLNAQSVIHDGGVDPQKNKEAITRKSISGVARRTRRMRRRRRERLHRLDMLLNKLKYPIIEPDTLDKPFEEWHVRSELASRYIEDDALRRENISIAVRHIARHRGWRNPYRQVDSLLNDNPYSKQYAELREKAQLYVGAVDGGSLTPAQLVVAMLDAGYAEAPRLRWRTGSKKPDAEGYLPVRLMQEDNANELKQIFTVQRIPRDEWVPLFRSVFYAVSPKGSAEQRVGKDPLAPSQPRALKASLAFQQYRIANVITNLRIKDGSADPRKLTVEEKQSIFDQLISLSSEDITWSDLCDFMEIKRSQLKGVGTLTEDGDERISSRPPRMTSPQRIYSADKKIRKPLVAWWKNASEDEQEAMIRLLSNTVDIDNVREDVAYAAAIDFINGLDDEALTKLDSIDLPSGRAAYSVDTLQKLTHQMLTTGDDLHEARKTLFHVTDTWRPPAAPIGEPLGNPAVDRVLKIVNRYLVNCQRRWGNPVSVNIEHVRSSFSSVAFARKDKREYEKNNERRSVFRDSLAEQLRTDEKRETVRESDLRRLEAIQRQNGQCLYCGRTITFSTCEMDHIVPRKGVGSTNTRTNLAAVCAECNRMKTNIPFAVWARTEDARQRGVSLAEAKKRVVMFTFNPKSYAPREVKAFKQAVIARLTQTEDDAAIDNRSIESVAWMADELHRRIDWYFNSRKYLNSVSAADDLDGNKGETAVSVFQGRVTAAARRAAGIEGKIHFIGQQAKTRLDRRHHAVDASVIALMNVGAAQTLMERESLRESQRLVGRLMPGERSWKEYPYEGTTRYGSFHRWLDGMNGLLDLLNDALDGDRIVVMQPQRYTLGNSIAHDATIHPLEKVTLGSAMEVELIKRASIPALWCALTRLPGFDEKTGLPEDANRSICVNGLHYGADDEVGFFASTAAQIAVQQGSAEIGSAIHHARVYRCWKTGAKGVRKYFYGMIRVFQADLLHARTEDLFTVPLLPQSISMRYGEARVVQAVQSGNAQYLGSLVVGDEIEMDFSESDAGGQIGEYLQFFSQLNGGDIAGTHWVVDGFFSNSRLRLHPRYIASEGMSKSFADLSVPDGVQKIVAGQGWLPSVNVVAETAIRTVRRNAFGELRFSAKSHMPCSWRWKHE

SEQ ID NO: 4878 - protein, 1137 aa, synthetic construct
  REGION 1..1137: note = Synthetic
MSAKRYRVGIDVGLNSVGLAAIEVDDANTPIRILNAQSVIHDGGVDPTRNKDAATRKSVSGESRRARRMLRRRRKRLNQLDELLQRLGYPIIDPETLDTFDEWKIRSGLADVFIEDEATRKENISIAIRHIARHRGWRNPYHRVESLLVDNPYSEQYRELKTRAEAQIGHALDEDMTSAQIVIAAWPHRTVDNARLRTSSKRGEGLLPSKLMQEDNANELKRIFSVQRVPESEGDLLFHAIFRANSPKGSAEKRVGRDPFDAAQPRALKASLVFQRYRIANVLTNLRIQENKQERPLTIEEKQTIFAMLVSDDSKDITWGDVASHLGYERRQLRGVGKTTEDGEDRISSTPPRLTSFQRICEADKKIAKPLQAWWQNASGQAQESMIRLLSNTVDLDGVHGDISYEEALDFIDGLDDEGLSRLDSVDLPAGRAAYGEETLRKLTERMLTTNDDLHAARKVLFHVSDYWRPPADPIGASLGNPSVDRVLRIVSRWLSNCRNRWGTPVSVQIEHVRSAFDSVATARQYERRTGNRSVYRSSLAKQLRESEHLDRVRSEDIRRIEAIQRQNGECLYCGRPIAFRNCEMDHIVPRKGAGSTNTRTNLAAVCIECNRLKSNIPFAVWADSEAAHARGVNLKESLQRVDHMLYDRNADTSQTWRRFKQDVKIRLKQTYSDEPIDNRSIESVAWMADELHRRIDWYFNAGHYLEECDELRPRIMVEVRVFQGRVTALARRASGLEGRIHFFGARYKTRLDRRHHAMDASVIAIMRPSVAQTLVERDSLRESQLIAGRLANGERSWKEYPYEGCPGYVPFQQWRAAMESLLELLNDALDHDRIVVRQPMRLQLGNSIAHDATVKKLLRVRLGDAMDADLVRRASTPALWCALTRLPDFDAAVGLPANDSRTIAVHGVTYSASDEVEFFDGQSAQLAVRGGSADIGSSIHHARVYRYWKQNAKGVRKYWYGMIRVFQVDLLRARGADLFSEPLPPQSVSMRWGEPRTVQAVQAGNATYLGWMVVGDELRVEFPRETALNGQIGEFVDWCDGSDSASTAQCSWVLDGFFSNKQLRLHPRLLASEGLMKLGKNQEIPDGVQKVVAKTGWISTVDVFGGFSPTVIRRNTLGEARWRSQSGLPCSWRWFD

SEQ ID NO: 4879 - protein, 1136 aa, synthetic construct
  REGION 1..1136: note = Synthetic
MSAKRYRIGIDVGLNSVGLAAVEVDSDGMPTRLLNAQSVIHDGGVDPTKNKEAITRKNLSGIGRRARRMVRRKRRRLADLDALLQRQKYPIVDPGEFSSSIEPWVARADLADHFVIDNTERKRKLSIALRHIARHRGWRNPYHRVDSLLIDNEYSDQYEELRSRVEKHVQRTVPDGLTPAQLVMRAVALGGATQRLRTSTTRGVGILPEKLMQEDNANELKRIFTMQRIPREQWEPLFRLVFAAVSPRGSAEERVGKDPLDPTQQRALKASLAFQRYRIVNMITNLRIAENDRQRPLTIAEKNDVFDMLSADSMQDLNWVDVADLLGVRRSQLRGVGSMTEDGEERVTNTPPRLVSVQRLHEADRKIAKPLIAWWRSASDDAKEAMIRLLSNTVDVDKVSEDPRYMEVIAFFDTLDEDGLAKLDSVDLPSGRAAYSVKTLECLTRRMLTTDDDLHAARKAIFHVSDYWHPPVDPIAAPLGNPSVDRVAKIVGRWLKNCEDRWGMPKSVQIEHVRSGFDSVATARQYERRTGSRSEYRRAAADRLHNEEHLDRIRDSDIRRLEAIQRQNGECLYCGRAIAFRACEMDHIVPRKGVGSTNTRTNLAAVCITCNRAKSKLPFAVWAATDAAQALGVSMKDTLERVRYFNRDARLYDASSWRGFKQAVITRLKQTEEDDPIDSRSIESVAWMADELHQRIDWHYNATRYQSDDRNLPADRKVSVCVFRGRVTAAARRASGIEGAVRFFGPHMKTRLDRRHHAVDAAVIAMMQTGVAQILMERESLRESQRLIGRLAPDERPWREYPYEKTASYDTFMHWHDIMVRLLDLLNDALDHDRIVVRQPMRLSLGNSIAHDATVKSLVKVRVGNALDADVIRRASTPALWCALTRLPDYDEKTGLPEDDARVIMVHGIRYGSNDEIEVFAGQSAQIAVRGGSSDIGSAMHHARIYRCWKANAKGERKYWYGMIRVFQTDLLRARYDDLFTVPLPPQSISMRYGEPRTVAAVQSGKAEYLGWLCVGDEIRIDVGRVPGKGQIGEFAKWCAGLDQRNAAVESWVVDGLFAPAKLRLHPRIIAAEGLSKIEDISAVPDGAGKVIGGAGWLPSIDSLAGTHPVVIRRNTIGEQRWHSKSGLPCSWRWTN

SEQ ID NO: 4880 - protein, 1135 aa, synthetic construct
  REGION 1..1135: note = Synthetic
MKNLRYRVGIDVGLNSVGLAAIEVDSDDNPLRILNAQSVIHDGGVDPQSQKTADSRRQQAGIARRTRRMRRNRVKRLKALDNWLISHNYPVYEADELDWFEAWKVRDQAATAYIEDDEDRQDAISIAMRHIANHRGWRNPYMAIENLLDVQLPESNQYFELREAAEQQCGGQELPEDATPAQLICAVLDYNDGRPIRVRTSTGSKKIGDREGLIHQRLMQTDNAYEVRKILSTQRIPEDQIRELIRLVFAAKSPKGSATERVGSDPLDPSQKRALKASLAFQRYRILNMLTNIRIAENGAERPLTVEEKQHVYEFLMQQTSDKVTWGDVAEQLQITRHNLKGVGKQTEDGEDRVSSRPPVVVTTQRIAALKDSKLRKSLQQWWDTNNDDAREAMIELLSNSVDIDKVRDELRYAEAIDFIEQLDDDTLAKLDTVDLPAGRAAYSAKTLKALTERMLTTADDLHEARKVLFNISDDWRPAQPAIGAPIGNPAVDRVLKIVNRYLMNIEQRWGKPASIQIEHVRGGFNSTKTARDMKNKYERSIADRTKYRDEIKQQLASLGVDTVREYDVRRLEAITRQNGKCLYCGRTITFFDCEMDHIVPRRGTGSTNTRNNFAAVCEYCNRAKSNTPFAVWCTTDSAKERGVSLKDAINRVKMFNINPLEYRGREATNFKQSIISRLKQTELDDPIDNRSIESVAWMADELHRRIDWHFNRSNDAQPDATKVGVFRGSITASARKASGIEGRIHFIHSHTKTRLDRRHHAIDAAVIAMMRPGVAQILTERDNLRRSQMITNTPDVVFGDWRNYPTESARGYHLFQAWLGSMNSLVNLLNDALDADRVHVLYPQRLALGNSIAHDATIHALKKIPLGDAIDAETIRRSATPAQYCALTRLPDYDEKEGLPENLDRTIQVNGHHLGPADNVEFFAGPAAQIAVQQGSADIGSAIHHARVYRCWKTQKNGKRKEFFGMIRVFQTDLLKYRHDDLFTCPLPPQSISMRYADPKTTQAVARGDAEYIGYLLINDVIELHFGEAEKSQIGDFLDFARPDSSINPGIANKWVLVGMPEAARLKLRPLYFASEGLQNIENVEKSVCQILGNGWRPTFGVVAEHHARILRRNALGDQRITSEAHLPVSWELQ

SEQ ID NO: 4881 - protein, 1122 aa, synthetic construct
  REGION 1..1122: note = Synthetic
MSVGLAAIEVDESGFPIRILNLQSVIHDGGIDPQAGKKKSISRKAVSGIARRTRRMRNKKVARLRQLDLLLEELGFPIVEPDSLDARDAWRVRAKLVDSYILDDEIRKEDVSIALRHIARHRGWRNPYSSVESLLIDTVPSKQYEELRSKAEQKLGRKFLGNPTPAEIVCRVWEEQGETARLRTSRHKDKNGKVVAREGLLPVKLMQSDNAKEIRRIFETQRIDDATGRRLLKAVFKASSPKGSAAQRTGRDALAPELPRALKASMAFQEYRIANVLTNLVISVKGVERKLTVEEKRRVFALLSSDKRNDVTWIDVAEELGVERNQIQGVGRLTADGEERISSMPPRNVTVSRIRSVKLVRKKLAAWWKSASVAERETMVEILSSAVDIDRVREHMDYASASTFIDSLDDEELVALDSMNLPSGRAAYSIQTLKCLTERMLNTDDDLHEARKSVFGVGDDWKPPVDAIGVPVGNPSVDRVLKIVNRYLLACQRRWGNPQSVQIEHVREGFSSVAKAKKTEKAQAERAQYRNDLKEQIRREKLAKIRESDIRRWEAVQRQNGECLYCGRPIDFNTCEMDHIIPRKGAGSTNTRVNLAAVCAVCNKLKDNTAFSVWARTQEAIAQDTSGYKVSLRDAIERVKVFNFDQSVPSPRDQRVFRQAMISRLKQTESDPAIDNRSIESVAWMADELHRRIEAYFNRDADTSKNTIKTKVWVFRGRLTALARKACGIEGRIHFAGKQRKTRLDRRHHAVDAAVIAMLNHSVAQTLVERDSLCLSQWITRRPETWTEYPFVEGQKKTRFEEWLCRMDGLLDLLNNALDADCVHVIRNQRLALGNSQAHDAIIRKMEHVELLSSMDSDLIRRASTPALYCALTRLPDYSPENGLPENHNREIVLNGRRIRSTEMVDFFASGAAQIAVRNGSAEIGNAIHHMRIYRYRKNGKSTQEYTYGMIRVFQVDLIHASSKDLFTVQLPPQSVSMRYGDRNTVQAIQEKRAEYLGYVVPNDEIVIDFEGVQMKDSEKIGAYARDFSGTASELAQRRHWVVVGSDVSKLALRPAYLAEEGLENLESDRFSEQTRKVIGKGWVVAINVLAKYRPVVIRRNALGEPRFRSNSGMPISWRWNG

SEQ ID NO: 4882 - protein, 1121 aa, synthetic construct
  REGION 1..1121: note = Synthetic
MSVGLAAIEVDETGFPIRILNIQSVIHDGGIDPQLGKKKSISRKATSGVARRTRRMRRRKAVRLRQLDATLESLGFPIVEPDSLDTWEVWLTRAKLAGSYIQDDEIRKEDISIALRHIARHRGWRNPYSNVESLFVDVAPSEQYEELRRKAEEKLGTSLSGNPTSAEIVECILKRQVGEVQLRTRSHKGANGNAAEKEGLLPTKLMQSDNAAEIRRIFKVQRIDDETGRKLLRAVFKACSPKGSVERRVGRDALAPGLPRALKASLAFQEYRIANVLTNLVISEDGTKRKLTIAEKQRVFGFLSSNETDDITWIDVAEKLGLERRQIQGVGCLTADGEERISSTPPRNVTALRIHSAKPVIRKKLVAWWKAASPTVRETMVELLSNTVDIDRVREDMDYSSAVAFIDSLDDEELTALDSVDFLSGRAAYSPQTLKQLTERMLNTDDDLHEARKAVFGVDDNWKPPVDTIGTPVGNPAVDRVLKIVNRYLLACQKRWGNPQSVQIEHVRESFSSIAKAKETERAQDERARYRNDLRQKLYEQEGLNKIRESDIRRWESVQRQNGTCLYCESPITFKTCEMDHIVPRKGVGSTNTRVNLAAVCAECNKLKSDTAFSVWARTEDAALRKVSQRDAIERVKTFIFDKSVPPREQRAFKQAVISRLRQTESDPAIDNRSIESVAWMADELHRRIEAYFNQDTDTSGNAPATRVWVFQGRVTALARKASGIEGRIHFAGEWKKTRLDRRHHAVDAAVIAMMNHSAAQTLVERDSLRLSQWITREPETWKSYPFSEGQKKTRFKEWLDCMNTLLDLLNDALDSDRVSVTRCQRMSLGNSQAHAATIRKMKHVELSSPMDADLIRRASTPALYCALTRLPEYSPEKGLPENRGREIVLNGRHIRSTETIDFFVSGAAQLMVRNGSAEIGDSIHHMRIYRYRKTGAKSQKYMYGMIRVFQIDLLHASSEDLFAVQLPPQSVSVRYGDKNVVQAIQEGRAEYLGYIVPNDEILISYEGVQMKDSEKIGAYANDFSGTASELAQRRHWVVVGSDVSKLALRPSYLSEEGLENSGSESDRLSNQTRKVIEGKGWVVAVNILAKYHPVVIRRNALGEPRFRTDSGMPVSWRWDR

SEQ ID NO: 4883 - protein, 1120 aa, synthetic construct
  REGION 1..1120: note = Synthetic
LNSVGLAAIEVDDDDMPMRILNAQSVIHDGGVDPTKSKEAITRKNISGVSRRARRMVRRRRERLDHLDAKLSQLGYPLIDPESLSMPFEEWHVRARLAGSFIEDESTRREDLSIAIRHIARHRGWRNPYHRVESLLADNPYSGQHAELKSRAEQRIGHVLNEDFTPAQLVVSVLSAGYEKSPRLRTSTKYGEGLLPQKLMQEDNANELKRIFSVQRIPKREWEPLFRYVFCSVSPRGAAEKRVGRDPFDASQLRALKASLVFQRYRIANVLTNLRIRENGHERSLTLGEKRSTYALLSSDSAEDITWADIATHLGIERNQIRGVGRLAGDGEERIANIPPRMTSFQRICEADRKISKPLRRWWAEVSDAARESMIRLLSNTVDFDDVYEDVSYSEAIEFIDSLDDDGLAKLDSVDLPSGRAAYGERTLQKLTERMLTTDDDLHAARKALFHVSDYWRPPADPIGAPLGNPSVDRVVKIVNQWIINCSGRWGDPVSVQIEHVRSAFDSVATARQYERRTGNRSVYRSKIAAQLRETEHRDRVRASDIRRLEAIQCQNGQCLYCGRPITFDTCEMDHIVPRKGVGSTNTRANLAAVCIDCNRSKSKTLFSVWAKTEQAQKRGVSLQDALNRVDHMLYDRNADTPQTWRRFKQEVKTRLKQTEDDAPIDNRSIESVAWMADELHRRIDWYFNAERYLAEHDRERPHVAVTVLVFQGRVTALARRASGLEGRIHFFGARYKTRLDRRHHAVDASVIALMRPSVAKMLLERDSIREAQMISGRLAEGERSWKEYPYEGRDEYGLFQRWRIGMEMLLELLNEALDCDRVAVRQSVRLQLGNSIAHDATVKALKSVHLGDAMSADLIRRASTPALWCALTRLPDYDVKSGLPSDDMRRIVVHGTTYSADDEVNFFDGQSARIIVRGGSSDIGSAIHHARVYRCWKRNGKPWYGMIRVFQVDLLKDHGDDLFSVPLPPQSVSMRWGEPRTVQAIQDGCAEYLGWLVVGDEIRVHFSRSKLSGQIGEFAEWCGDSDSADIVRCTWVLVGFESNMHVIMRPRLLASEGLKNIPEMSSLPESVRKIVEGKGWRSTVNALGSSFPVVVRRNAFAEPRWHSRAGMPCSWRWSQ

SEQ ID NO: 4884 - protein, 1170 aa, synthetic construct
  REGION 1..1170: note = Synthetic
LVCKCPKSYILDISFSKGGEMKQRRYNVGFDVGLNSLGFAAIEIDEQGMPIRILKAASEIHDGGVDPNTQKTGDSRRSQAGIARRTRRMRRRRKARLERLDKTLTKLGFPIVNESSLHGFDVWKIRALAASGFIEDDNERKCAISIAYRHIARHRGWRNPYTRVESLLNVAAPESDQYQQLRDNAIRVLGGEYIPDAATPAQIIDAVLAESSGPAMRIRTSTGSRKLGDRPGLISTRLMQADYAYELRTIFEQQHVPDDVARELMFRVFDAKSPRGSAEKHVGRDPLAPAKSRAMKASLAFQRYRIASMIVNLRVNENGEERLLTVEEKQRIYDRLASQAVEKDLTWADICSDLGISRNQLKGVGSLTADGEERVTSRPPQLTSVQRIAGLSDSKLRKSLLDWWNHSDDSAREAMIALLSNSVDIDDKKDDQTFVAAVDFIESLDDSALSKLDTIDLPAGRAAYSTDTLNKLTERMLTTDDDLHAARKVLFNVDDNWRPPQPAIGAPLGNASVDRVLKIVDRFLMAAQKRWGAPVAVQIEHVRNGFASIPSARKDKRDYEKTLERRKKYRDQQAERLKDEFGLDKIREDSIRRLEAITRQNGQCLYCGRTITLSTCEMDHIVPRKGVGSTNTRDNFAAVCKLCNQMKSNTPFAAWARTDSAKQRGVSLSDAISRVRMFNIDSGEMNGREARNFEQGVIRRLSQTEWDEPIDNRSIESVAWMADELHRRIDWYYNSSRYEGHGTESTEGSTKVRVYQGSLTSEARKASGIDGQIHFAGASYKTRLDRRHHAIDAAVIAMMTQGAAQTLQIRRNLRASQNAVGYIEPDEIAWRDYPAEHNAGYAAYAKWLDSMYKLLDLLNDALDNDRIPVIHAQRYSLGNSIAHDATIRPLDRVLLGSAISVETINKASTPALYCALTRLPDYSAADGLPASENREISVNGIRYSAHDNITFFSGSSAQIAVQNGSADIGSAIHHARIYKCYKENKKGIRTYFYGMIRVFQADLLRAAHDDLFTCQLPVQSVSMRYADKKVVDAILSGRAEYRGYLVVGDEIEVEFNDQGNNAIASFKNFFEHELSVSPDVVNKWVVAGLMEPTKIRLRPSILSQEGMDRIKESHPVDASILHDVESIFDKGWRMAVGTASKYKMRVVRRNVFGEKRYTSKKHMSVCWGFD

SEQ ID NO: 4885 - protein, 1171 aa, synthetic construct
  REGION 1..1171: note = Synthetic
MGAKHYRVGIDVGLNSVGLAAIEVDDDGMPVKILNAQSVIHDGGVDPNQSSNATGEGSLVSRSSSSRKDIAGRTGSQTRKRNAGIARRVRRTLRNRSKRLKELDRKLQQSGYPIVVPESLNAHDEWTIRAELATAFIEDESTRKENVSIALRHIARHRGWRNSFHGVESLLTSNPYSELYDVLRKRAEERIGRPLKTEVTPAQLIVAVSACTDGVMTRIRTTRKKGKIRVGLLQGKLMQEDYANELKCIFEMQHVPRSEWEPLFKEVFHVESPRGSSKRLVGKDPFDDGQYRALKASLVFQQYRIAAVLVNLRIGDNRRNRPLTVAEKRKAFELLVADSHTEISWADVAECLGYAKSQLVGVGKTIDDDMDRISSDPPRIVTLQRIREAKGSIADSLRMWWKSVSEESREAMIELLSNAEGFEDIHDDAVISFVDSLSMDELAGLDSIGLPIGRAAYGAETLRKLTDRMLMTDEDLYQARKSLFGVTDYWRPPATHIGAPIGNPSADRVVKIVNQWLMRCEERWGKPESVQIEHVRSGFASIAATREYERGIKKQSKRRSELAEELRTGGYIDSRSNIRKLEALKRQKNMDDRRQHIQRQNSQCLYCGCEITFDTCEMDHIVSRKSAGASNIKANLAAVCRECNISKSDIPFAKWAESEVARRPEVSLGKALARVDNMLPDCTGKAWDNFIKEIKRRLRQTEEDEPIDDRSIESVAWMARELRSRIDWHYNAARYQAKTEEELPEVSVTVRVFSGNITASARRVDGWGKKIHFFGPRGKTRLDRRHHAVDATVIALMRPSVARVLAIRDSWCDAQRVESRLNVGERPGEDYPYQGDDGYELFQQWCIGMETLLNLLNDALDHNRVVVRQQMRLKLGNSIAHDAKVNALRRVRLGEAMDSDLIYRASTPALWCALTRLPDFDAAKGLPANSARHIVVHGVEYAADDEIGFFKKTAAQKKTAAQVAVRGGSAKIRSAIHHARVYRWWEQNTKGGRKYWYGMIRVFQVDLLRYQREDLFSVPLPPQSVSMRWGEQRTVQAVQAGNAEYLGWLVAGDEIRVDYSALSDDSALKQFSDWCACFDSSTIACTSWVVTGFEDPSRIVLRPRILSSEGLESFGGSLPPEITKLISGKGWRATINKIGNNNAPVVIRRNALGEPRWHSKSGLPCSWRWAE

SEQ ID NO: 4886 - protein, 1187 aa, synthetic construct
  REGION 1..1187: note = Synthetic
MLSRQLLGASHLARPVSYSYNVQDNDVHCSYGERCFMRGKRYRIGIDVGLNSVGLAAVEVSDENSPVRLLNAQSVIHDGGVDPQKNKEAITRKNMSGVARRTRRMRRRKRERLHKLDMLLGKFGYPVIEPESLDKPFEEWHVRAALATRYIEDDELRRESISIALRHMARHRGWRNPYRQVDSLISDNPYSKQYGELKEKAKAYNDDATAAEEESTPAQLVVAMLDAGYAEAPRLRWRTGSKKPDAEGYLPVRLMQEDNANELKQIFRVQRVPADEWKPLFRSVFYAVSPKGSAEQRVGQDPLAPEQARALKASLAFQEYRIANVITNLRIKDASAELRKLTVDEKQSIYDQLVSPSSEDITWSDLCDFLGFKRSQLKGVGSLTEDGEERISSRPPRLTSVQRIYESDNKIRKPLVAWWKSASDNEHEAMIRLLSNTVDIDKVREDVAYASAIEFIDGLDDDALTKLDSVDLPSGRAAYSVETLQKLTRQMLTTDDDLHEARKTLFNVTDSWRPPADPIGEPLGNPSVDRVLKNVNRYLMNCQQRWGNPVSVNIEHVRSSFSSVAFARKDKREYEKNNEKRSIFRSSLSEQLRADEQMEKVRESDLRRLEAIQRQNGQCLYCGRTITFRTCEMDHIVPRKGVGSTNTRTNFAAVCAECNRMKSNTPFAIWARSEDAQTRGVSLAEAKKRVTMFTFNPKSYAPREVKAFKQAVIARLQQTEDDAAIDNRSIESVAWMADELHRRIDWYFNAKQYVNSASIDDAEAETMKTTVSVFQGRVTASARRAAGIEGKIHFIGQQSKTRLDRRHHAVDASVIAMMNTAAAQTLMERESLRESQRLIGLMPGERSWKEYPYEGTSRYESFHLWLDNMDVLLELLNDALDNDRIAVMQSQRYVLGNSIAHDATIHPLEKVPLGSAMSADLIRRASTPALWCALTRLPDYDEKEGLPEDSHREIRVHDTRYSADDEMGFFASQAAQIAVQEGSADIGSAIHHARVYRCWKTNAKGVRKYFYGMIRVFQTDLLRACHDDLFTVPLPPQSISMRYGEPRVVQALQSGNAQYLGSLVVGDEIEMDFSSLDVDGQIGEYLQFFSQFSGGNLAWKHWVVDGFFNQTQLRIRPRYLAAEGLAKAFSDDVVPDGVQKIVTKQGWLPPVNTASKTAVRIVRRNAFGEPRLSSAHHMPCSWQWRHE

SEQ ID NO: 4887 - protein, 1118 aa, synthetic construct
  REGION 1..1118: note = Synthetic
LNSVGLAAIEVDEDGMPVRILNAQSVIHDGGVDPTKNKEAITRKNLSGVGRRARRMVRRRRHRLAELDTMLQQLGYPLVDPETLTKPFAQWRIRAELADHFIENDDLRRESIALAIRHIARHRGWRNPYHRVDSLLAENPYSVLYDELKSRIEEYVGDPIPSGLTPAQLVEEALNRGYAEPPRLRTSTKHGRGLLPEKLMQEDTANELKCILSMQRVDGDEQEKILRMVFFAVSPKGSAEKYVGIDPLDPLQKRALKASLAFQRYRIANVVTNLRVQTGDGQRPLTVEEKNRVFALLTDADVTDVEWIDVAEALGVTRRQILGVGRLIEDGEERIASKPPRMTTVQRLKDADRKIAKPFLEWWQSVDDSARESMIRLLSNTVSFETVRDDLTYADAIAFIDTLDDDGLLKLDTIDLPSGRAAYGEKTLRALTDRMLNTDEDLHEARKSVFGVSDTWHPPVDPIGAPLGNPSVDRVLKIVNRWLLACVKRWGAPQSIQIEHVRSGFDSVATARQYERRTGKRSEYRNVLATTLKSDEHLDRIRDADIRRIEAIQRQNGECLYCGKPIAFSACEMDHIVPRQGVGSTNTRTNLAATCISCNRSKSNTPFALWVQSEAARNLGASLAGAVKRVNHFTREVQLYDAGAWRNFKREVVSRLKQTEADEAIDNRSIESVAWMADELHRRIDGYFNRNDKFDTQVAVHVFQGHVTASARRAGGIEGGIHFFATKHKTRLDRRHHAVDASVIAMMRPSVAQTLMERESLREAQHIAGLDRMKQSWKAYPSAGCVGYVPFQQWKKTMDKLLALLNDALDADRVVVRQPTRLSLGNSVAHDATIHPLMMERLGDALDVELVRRASTPALWCALTRLPDYDQKFGLPRNEHRTISVHGEVYGPDDEIGFFKSSAAQIEVRGGSADIGSAMHHARIYRCWKTNARGVRKYWYGMIRIFQVDLLRASRQDLFTYPLPPQSVSMRYGEVRTVQAIQSGNAEYVGWLCVGDELHVDLSKEVLGGQIKDFAGWCAAQGIPGIANSWVIDGLFAEAKLRLHPRTLASEGLVKFRDIQPIPDGVVKIVSGAGWLPSIDVLGRMGPAVIRRNVLGEPRWHSSNGLPCSWSWAPEEEG

SEQ ID NO: 4888 - protein, 1136 aa, synthetic construct
  REGION 1..1136: note = Synthetic
LNSVGLAAIEVSDDDAPVRLLNAQSIIHDGGVDPQKNQEAITRKNMSGVARRTRRMRRRRRERLHKLDVLLRRSGYPVIDPETLDESFEEWHVRAELATHYIEDDELRRENISIAVRHIARHRGWRNPYRQVDSLLAENPYSKQYEELAKNAEAYVSGLADQELTPAQLVVAMLDAGYAEAPRLRWRTGSKKPDAEGYLPVRLMQEDNANELKRIFVMQRIPKDEWAPLFRSVFYAVSPKGSAEQRVGKDPFDVNQPRALKASLVFQRYRIANVITNLRIKDSSAEPRRLTVDEKQSIFGQLESPSSQDITWSDLCDFLGIKRSQLKGVGTLTEDGEERISSRPPRMITPQRIHSADGKIRKPLAAWWKNATEDEREAMIRLLANVVDIDKVREDVSYATAIDFIDGLNDEALTKLDSIDLPSGRAAYGVETLQKLTHRMLTTDDDLHEARKVLFQVTDTWRPPAAPIGEPLGNPAVDRVLKIVNRYLMNCRQRWGNPVSINIEHVRSAFSSVASARKDKREYERSNERRSVFRDSLAEQLRVEEHKDAVRESDLRRMEAIQRQNGQCLYCGRTVAFSTCEMDHIVPRKGVGSTNTRTNLAAVCAQCNRMKSNIPFAVWSRSAQAQNHGVSLMEAKKRVAMFTFNPKSYAPREAKAFKQAVVARLQQTEEDAAIDNRSIESVAWMADELHRRVDWYFNSQRYLNSSSADEEDGKMSTAVSVFQGRVTAAARRASGIEGKIHFIAQQSKTRLDRRHHAVDASVIAMMNARAAQILMERESMRDSQRLVGRLMPGERYWKEYPYEGSSGYGSFHHWMDGMNSLLGLLNDALDNDRIVVTQPQRYMLGNSIAHDATIHSLEKVPLGSAMEADLIRRASTPALWCALTRLPDFDEKKGLPEDPSRQIRVNGVHYHADDEIGFFASNAAQIAVQQGSADIGSAIHHARVYRCWKTNAKGVRQYFYGMIRVFQTDLLHAHNEDLFTVPLLPQSIAMRYGDTKVVQAVQNGNAQYLGSLVVGDEIEMDFSGVKTDGQIGEYLLFFSQFGGGEIAGKRWVVDGFFSNSRLRLHPRYIAAEGLAKAFEESAIPDGVQKIVAGQGWLPSVNVAGATAICTIRRNAFGERRFLAKGHMPCSWQWKHE

SEQ ID NO: 4889 - protein, 1185 aa, synthetic construct
  REGION 1..1185: note = Synthetic
MNILCVTPHARVLRVIMQTMVSKKTQYVVGVDVGLNSTGLAAIEVDDDGAPIRILNAMSVIHDGGVDPAAKEADSRLATAGVARRTRRMRRRRAQRLARLETVLKNYGYTEVEPVLEEPFGPWICRAELADGFIADDEEHREMIGAAVRHIARHRGWRNPYQKVQALLNVGEDGLSEEYANLKNRIFDEVYSHEADYENIDQVPDYTPAQLIRDYLDSNLGRPAARIRTGKAGPRKKRYDAEGILPQRMRQADYAYELNRIFSMQKVDEDEARAIIKAVFEAKSPRGSAEKRVGKDPLTGKMRALKASLAFQRYRILATITNLMIQDKEKGKRRLSITEKNDVYNYLISIQSDEESPTWQDIANDVLHIERYQLVGVGKTFDGGERVSNVPPVLQSVVAIHELSDKKLREKLDAWWDAADDGSHECMIELLSNAVDIDRIDENDERYASALDFIDGLDDEELTKLDGINLPSGRAAYSAEALTKLTSAMLNTDDNLFEARQRIYHVGNDWRPPQPQIGEPLGNPAVDRVLKIVNRYLMSCLKRWGQPSRVTIEHVRSGFTSVKQAREYQKETDRRAKYRGEIIQELKHCGLGDVRKYDIRRWEAVQRQECQCLYCGREITFKTCEMDHIVPRKGPGSTNTRTNFAAVCPECNRLKSNMPFATWAKTGAAQARGVSLDEAIKRVKFFSFTQDRLPGKAQHNFRNAVISRLKQTVADEPLDNRSIESVSWMADELHRRIDWYFNHDRYEKKAEEAPADGLPETRVAVYPGSVTASARHAAGLGGNIHFIGARYKTRLDRRHHAVDACMIAIMRPGIAKLLAEREQLRQSQRLMEQIEPDEMNWKDYPNENTPGFENFAIWREQAHALLDEMNDALNNDWIPVTRWQRLQLGNGSAHKDTIHPLKKVELCGEISASDILHAASPALYEALITLPDYDPASGLPENPDREINVNGKIDSGSDLIPIFESNAAQIAIQNGSAELGEAFHHARIYRCWTVQKNGKKKIFYGMVRVYQHDLLKAKHEDLFTYPLKRSTVSMRYAEPKVVDAIYAGNAEYLGSICVGDELVVNLAGTEQTGQVGDFCKAFAEDASVNPAVVNRWTVDGFPDPAKLRLRPSMLAGEGLKNTPDLSEDYSDSLGKILNDNGWRPAVNVLAKLGVKVIRRNALGEPRWKSRAHLPISFRWSDGISK

SEQ ID NO: 4890 - protein, 1145 aa, synthetic construct
  REGION 1..1145: note = Synthetic
MKRRYRIGIDVGLKSVGLACIEVDDSGMPIRILNAQSVIHDGGVDPQKNKEAITRKNISGVARRTRRMRRRRRERLEKLDVLLKQYGYPIIDPDTLHEPFAEWVIRAKAADEFISDEEQRKEAVSVAIRHIARHRGWRNPYHRAESLLNENDYSEQYVQLLEKAEDYLDRDLPDGLTPAQIVAEALSAGYTKAPRLRTGSVNREAREGLLPTKLMQEDNANELKDIFFMQRVSEEESRRLLLAVFYAHSPKGSAEHRVGIDPFDHNPRALKASLVFQRYRIASMVANLYITENGSQRPLSVSEKETIYDNLTTQSTEEITWSDIAEVFGWKRSQIKGVGSLTADGEERVTSRPPRLNFLQNIFGCKDKKLRVKLIGWWKNTEDSAHEAMISLLSNTVDVDKVHDDPYYEQAIGFIDQLDDEELTKLDTIDLQSGRAAYSTETLLKLTHQILTTTDNLHEARKHIFGVNDNWRPAAEKIGAPVGNPAVDRVLKIVNRYLICCRNRWGEPVSVQIEHVRDALSSIAVSEKNKRAYENMTGKRSLYREELRRQLRGDEQIDRPLESDLRRMEAIQRQNGQCLYCGRGISFRTCEMDHIVPRKGAGSTNTRNNLAAVCAECNRAKSNVPFAVWAKTSLAISRGVDLKEAIERVKAFLFDPRSYSPSDQRAFKQAVIMRLKQFEADDEIDNRSIESVAWMADELHRRIDWFYNAEHYTGALAQVKQAEPVKVNVYQGRITADARKASGIEGDIHFVGARYKTRLDRRHHAVDAAVIAMMNHGVAMTLSERGSLRESQFLTGLHDGEVSWKQYPYPGSSGYDSYQHWLGRMKELLGLLNEALDCNRVKILQWQRMSLGNSIAHDATIHALDKCELGSAIDANTIRKASTPALYCALTRLPDYDETNGLPENPDRVIHVNGQRFNATDMVSFFMSNAAQIAVQGGSADIGSAIHHARIYRCWKESAKGKRKYFYGMIRVFQVDLLKSSHSNLFTVALPESAVSLRYGEARTIQAVLNGHAEYLGYLLVGDTIRVDFARSSISGQIEELINFFDSGHDEDCNAYNSWVVSGFFSESRLRLRPQLLAAEGISNLQKYNNIEVPEGMSKIVTGQGWLPSVDAIAKFFPQVVRVNTFGESREKSRHGLPTSWKWCK

SEQ ID NO: 4891 - protein, 1137 aa, synthetic construct
  REGION 1..1137: note = Synthetic
MAKRYRIGIDVGLNSVGLSAIEVDDADMPMRILNAQSVIHDGGVDPTQNKTAITRKNMSGVSRRARRMVRRCSKRLNALDDTLQRLGYPIIESDSLTRSFEEWHVRAELAQSFIKDEERRREDISIAVRHIARHRGWRNPYHRVESLIADNPYSTQYQELKSRAESRLGRNVSDGLTPAQLVCAVLSAGYDEAPRLRSSNKHGEGLLPQRLMQEDNANELKRIFTVQRIPREEWEPLFRKVFYAVSPKGSAERHVGCDPFDASQPRALKASLVFQRYRIANVLTNLRIRENGQERSLTITEKNQAFALLASNAQDELTWADVAQELGYSRNQLRGVGKATEDGEDRITSTPPRLTSIQRIAGADKKIAKPLQHWWQNASESSQEAMIRLLSNTVDFDQVRDDIVYADAIEFVDALDDDGLTKLDSVDLPAGRAAYGEETLRKLTERMLTTDDDLHAARTVLFHVSDYWRPPADAIGAPLGNPSVDRVVKIVNQWMQACQNRWGNPVSVQIEHVRSAFDSVATAREYENRTGKRSEYRSNLAKSLKEQEHLDRVRHTDLRRIEAIQRQNSQCLYCGRMITFRDCEMDHIVPRKGVGSTNTRANLAAVCADCNRMKSNTPFAVWAHSEAAQERGVSLKDALQRVTHMQRDPKADTPQTWRSFQQEVKMRLGQTESDEPIDNRSIESVAWMANELHRRIDWHFNSARYLAQSENEWAKTVVSVQVFPGKVTASARRASGLEGRIHFFGAHYKTRLDRRHHAVDASVIAMMRPSVAKTLMERESLRESQQISDAWRILGEREWKEYPYAGCEGYELYQQWRTSMELLLELLNDALDDDRVVVRQPIRLKLGNSIAHDATVRSLQKVVLGSAMDADLIRRASSPALWCALTRLPDYDEKTGLPENRERQITVHGTTYRAEDEIGFFASQAAQIAVRGGSADIGSAIHHARVYRCWKTGAKGARKYWYGMIRVFQADLLRNSGEDLFSVKLPPQSVSMRWGEPRTVHAILAGNAEYLGWLVAGDELLVDFSRGKINGKNAKFVNWCNETGATEAIYESWTLAGFDTNSKLKLRPTVLAKEGLSNVPEHVKVPVEVGGILGDSGWRPSVDMTGTYMPIVIRRNALGELRWKSKAGLPCSWRWAR

SEQ ID NO: 4892 - protein, 1154 aa, synthetic construct
  REGION 1..1154: note = Synthetic
MNQRGDMSKRLYRLGIDVGLNSVGLAAIEVDESGMPLRILNAQSVIHDGGVDPQKNKEAITRKKQSGIARRTRRMRRRRKARLARLDNVLERVGFPIVESESLTEPFEEWAVRGRLAERYIEDDDERLEDISIAIRHIARHRGWRNPYQRVESLLLDTPYSDNYAELKSRVETRIRNVIDDDPTPGELVCQVLQQGFDESPRLRTTTRSSNPKTGLLPTKLMQSDNANELKRIFEVQRVDESHARELLLAIFDSQTPKGSAESRVGKDPLDKTQSRALKASLVFQRYRIANVITNLRIKEGSIERPLNMGEKNIVFDLLASTDKEDYTWGDVAQKLGLERSQLRGIGQQTRDGEDRVSSRPPRMDSIRAIQSCSDSKLRKKLNAWWAQASDDGQESMIGLLSNTVDIDKVQDEVTYSEAIDFINTLSDEELSKLDTIDLPAGRAAYSAKTLQVLTERMLQTDDDLHEARKHVFNVADNWRPPADPIGMPLGNPSVDRVLKIVNRYIVNCVKRWGTPSSVQIEHVRDGMSSVAVARKNKKDYENAIAKRSEYRKDIGKQLHLEEKVERVRESDLRRWEAVQRQNGKCLYCGAMITFKTCEMDHIVPRKGVGSTNTRTNFAAVCAECNRLKSNTPFAAWARSAQAQARGVDLSETIQRVEAFIFTRGSYTSAAQRNFKQEVISRLRQTEADEPIDNRSMESVAWMADELHRRIDWFFNHESYQYPDVLPNTTVGVFRGRLTSDARKAAHIEDQIHFVGGGGKTRLDRRHHAVDAAVIALMRPGIAQTLAERDSLRESQRLARKLYPDEIPWREYPNPGTACYDSFQEWLKQMHKLLELLNGALDNNRVAVVQSMRLALGNSVVHDDTVHKLTKVPLKSAIDVDTIRKVSTPALYCALTRLPEYDEQDGLPENDERSITVHGRYVGPEDEVSFFTSAAAQIAVRGGSADIGSAIHHARIYRCWEQKAKGKTKIFYGMIRVFQTDLMRYRNEDLFHAPLFEQSVSMRYAEGRTAKAVLDNRAEYLGWLTVGDTIEVDFAEAQLTGQIAEFRDFVQSLPNGTSRAYSCWVVDGFFNKTQLRLRPRMLASEGIDTLGRKNGTSISDGVLKTIDRPGWLPAVNALAAYHPVCIRLNVFGESRQESCSGLPTSWQWCRDVLE

SEQ ID NO: 4893 - protein, 918 aa, synthetic construct
  REGION 1..918: note = Synthetic
  SITE 803: note = misc_feature - Xaa can be any naturally occurring amino acid
MSVGLAAIEVDETGFPIRILNIQSVIHDGGIDPQLGKKKSISRKATSGVARRTRRMRRRKAVRLRQLDATLESLGFPIVEPDSLDTWEVWLTRAKLAGSYIQDDEIRKEDISIALRHIARHRGWRNPYSNVESLFVDVAPSEQYEELRRKAEEKLGTSLSGNPTSAEIVECILKRQVGEVQLRTRSHKGANGNAAEKEGLLPTKLMQSDNAAEIRRIFKVQRIDDETGRKLLRAVFKACSPKGSVERRVGRDALAPGLPRALKASLAFQEYRIANVLTNLVISEDGTKRKLTIAEKQRVFGFLSSNETDDITWIDVAEKLGLERRQIQGVGCLTADGEERISSTPPRNVTALRIHSAKPVIRKKLVAWWKAASPTVRETMVELLSNTVDIDRVREDMDYSSAVAFIDSLDDEELTALDSVDFLSGRAAYSPQTLKQLTERMLNTDDDLHEARKAVFGVDDNWKPPVDTIGTPVGNPAVDRVLKIVNRYLLACQKRWGNPQSVQIEHVRESFSSIAKAKETERAQDERARYRNDLRQKLYEQEGLNKIRESDIRRWESVQRQNGTCLYCESPITFKTCEMDHIVPRKGVGSTNTRVNLAAVCAECNKLKSDTAFSVWARTEDAALRKVSQRDAIERVKTFIFDKSVPPREQRAFKQAVISRLRQTESDPAIDNRSIESVAWMADELHRRIEAYFNQDTDTSGNAPATRVWVFQGRVTALARKASGIEGRIHFAGEWKKTRLDRRHHAVDAAVIAMMNHSAAQTLVERDSLRLSQWITREPETWKSYPFSEGQKKTRFKEWLDCXNTLLDLLNDALDSDRVSVTRCQRMSLGNSQAHAATIRKMKHVELSSPMDADLIRRTSTPALYCALTRLPEYSPEKGLPENRGREIVLNGGHIRSPDTIDFFVSGAAQLMVRNGSA

SEQ ID NO: 4894 - protein, 1085 aa, synthetic construct
  REGION 1..1085: note = Synthetic
MSGVARRTRRMRHRRRKRLEKLDALLQQYGYPIVDSNTLTEPFAEWMIRAKAADEFIADEEQRKEAISVAVRHIARHRGWRNPYHRTESLLNENDYSEQYGQLLEKTERYLDRDLPEGLTPAQIIEEVLSAGYAEALRLRTGSVNREAREGLLPTKLMQEDNANELKVIFSMQHVPEGESRKLLLAVFHAHSPKGSTEHRVGKDPFDHELRALKASLVFQRYRIVSMLANLRIAENGFQRPLSISEKGTVYDSLTAPSTEEITWSDVAEIFGWKRSQIKGVGSLTPDGEERITSRPPRLNSVQSIFECKDKKLRAKLIDWWRATDESSHESMIRLLSNTVDVGKVHDDPCYEQAISFIDQLNDEELSKLDEINLQSGRASYSEGTLRKLTHQMLTTDDDLHEARKHLFGVGDNWRPAAERIGTPVGNPSVDRVLKIVNRYLMSCRNRWGDPESVQIEHVRDALSSVATAGRNKKAYENTQRRRTLYREDLIKYLKDDMRIASPRESDIRRLEAIQRQNGQCLYCGAGISFKTCEMDHIVPRKGKGSTNTRDNLAAVCAECNRMKGKTPFAAWEKTVAAQARRVDMKQALERVEAFLPGADTSSEQRAFKQSVSMRLKQTEEDEAIDNRSMESVAWMADELHRRIDWFYNADRYNGKSLAKTEKAFIAVNVYRGRIIADARKASGIDGAIHFVGAHYKTRLDRRHHAVDAAIIAMMDSDSAQTLSVRGSLRESQVFYGIHDGMVSWKRYPEPGSGSYDSYRQWSNRMKTLLVLLNDALDHNRIMVSQWQRMSLGNSIAHNATIHALDKCELGSAIDSDTIRKASTPALYCALTRLPDYDVAHGLPENVDRVIHLNGQRLDAADRVSFFASNAAQIAVQGGSADIGSAIHHARIYRCWKEGAKGDKCFYGMIRVFQVDLLRSASEDLFTVSLPEHSVSMRYGEKKIVRAIYEGREEYLGSLVVGDLIRVDFGEQKITGQIADMLNFFQKDCTQSFNVCSDWTVAGFGDPSKLILRPRFLSAEGLKETAEKKGAEVPDGVQKIVSGKGWRPAIDPLANLKPQVLRFNALGEPRMRSLHGLPTSWRWCE

SEQ ID NO: 4895 - protein, 819 aa, synthetic construct
  REGION 1..819: note = Synthetic
VWVDVCKDLGISRRALKGVGALTSDGEERIASRPPQLTSLQRIAELKDTQLRKALLAWWENHEDAQEAMIALLSNTVDIDAKREEPEYAEAVEFIESLDDAQLTKLDAIDLPVGRAAYSVPTLTVLTERMLKTDDDLHEVRKMVFGVDDNWRPPQAAIGAPLGNTAVDRVLKLVSRFLMDAQKRWGKPAAVNIEHVRDGFSSEPAARRAQKEYERYIDKRTQMNQELESELRNHFGLEKVRPYDLRRLQAIQRQNGVCLYCGCDITFTTCEMDHIVPRKGAGSTNTRNNFAAVCEICNRMKSNTPFAVWAQTESAQKHGVSLAEAIERVKMFNAEGGTKADRIFRTEVITRLKQTEADDPIDNRSIESVAWMADELHRRIDWYFNSDGYAGNLNDDSSGATKVCVYAGSLTAEGRRASGIEGDIHFAAASYKTRLDRRHHAVDAAVIAMMTPAAALSLKTRSNMRRSWLETGDESLRTAWKNYPAEQDPGYASYQQWLDAMRSMLVLLNDALDNDRIPVIHAQRYAFGNSNAHDATVKPLLRIPLRSAMDADLIRRASTPALYCALTRLPDYSSKTGLPEDSAREIMVNGGHYTASDTVPFFEGGSAQIQVQGGSADIGNAIHHARIYKCYKETKKGRVYFYGMIRVFQTDLLRARHEDLFAYPLSPQTVSMRYADPKVAEAVQNGHAEYKGYLVVGDEIEVKFGEAMSDKIGAFVDFFSEQMGVQDEIVQRWVVSGFESSRLMKLRPAMLAEEGLDRIFGICDVSKSMEDDVRNVFARSWRLSVSQISQLALRVIRRNSLGEKRFVSKNQMPTCWSCD

SEQ ID NO: 4896 - protein, 1031 aa, synthetic construct
  REGION 1..1031: note = Synthetic
MNAKTQNYILALDLGVASVGWGVVGLDEQERPNSIIDLGVRLFDKSEDPKTGESLNSARRAYRLQRNAYKSKKVLVKQVKALLLKHNLLQNTELSQHNLSHKTWELRVKALDNKLSNKELASILIHIAKNRGFQTKANNGDDKKAGLVLSSISNNHQLLNAYRSVAELAVKHFQLNDSHIRNKAGNYTHSFARQDIVNEVELIFKNQRQFGNQNATIELEKAYIELINYQKPSLTGDSLLKMVGKCTFEKEQYRAPKASYSAERFILLSSLTGLKILENGEQRTLTQSERELLIQKAYELNKITYAQIRKWLGLSDSVIFNFLRYQKLDKESAETKVFVELKHYHQLRKAFENANLENEWNVIAHNGQLLDEIAFTLTICKEESEIRQKLEKLNELNDKVIDILVNIRFTQFINLSLVCLNKINPLMEMGKTYLEATSEIYGAYNRKTGTKLNQLLPVIPVSDISNPIVLRTVAQARKVINAVIRKYGQPAYIHIESGRDLGKSYQERQEITRQQAKNAKENEKLKERLAKEFNVRATNSNVLKLKLYEQQKGKCLYSGKTIDSNKLFANGYVEIDHALPYSRTYDDSANNKVLVLASENQTKRNRTPFEWLNGADNSAQWQNFKSLVEASDFAYQKKQKLLTKQLSDSEFKARNLSDTRYINAYLSKFIADNLLLVGKGKQKVFTPNGRITSFLRYNWGLTKNRQENARHHALDAIVIACANEYMQKEITQFAQKRECNELAINEYVDIKTGKIKQLTFPEPWAGFSKELTARVYSDAPKAELADMKNIDLNTVKPLFISRMPTRGASGQGHKETIKSIKNTGENRSVKRVDLKSLNLDMLERFVAKDTEKALYKSLKKRLEENKNDPLKAFSEPLKQRGKIVRAIKVWDTQKSGLQVRNGIADNGDTVRIDIYAKDGKNYIIPVYAHHIAKKVTPNAMITNGKTEDEWDKLDDTYQFKFSLFPNDLIKISNKKESFIGYYKGADRSNGGLTLLSHDCVDANKIKRFGPKTATIEKLEVDVLGNVMSFKA

SEQ ID NO: 4897 - protein, 1160 aa, synthetic construct
  REGION 1..1160: note = Synthetic
LNLSKLRLVSEVECSAFWLLFPLHLLRWKCVLPHFAAWFAYLCSMNDKVITPKDKRRYRIGIDVGWNSTGFCALEIDDDDNPISFLNLSVLLHDAGVGKDGGKIQETRKAISGRTRRARRLIRNRRRRLAELDKFLVELGWPLPDLEKYPDPHEPWKVRALLVEEYIEDERLRQEKLAIAIRHIARHRGWRSPWVSVSSLHVSHPDSDELIALRARVAEKTGRILPAGLTPGQLLYLLDSGEKIRGDAGILAGKLLQTDYATELKKIFSRQRLSEDFGNQIIDKVFAVKSPKGSAAEKVGKDALPGQEHLDRAEKAHPAFQRYRIATIIANLRIREGEGGQNERRLTGEETTSLFEFLSNPDRKKLPTWIEVAKVLGIERQDLFGTGKLTADGERTGNTPPVDETNIRLTKCGIKPVQQWWRAASYLERCAFIDQISRASSPGEATNREEQIAADFIASLNDEDLEKLEASVRLPIGRAAYSVESLERITERILVDNVDLQQAREVEFGVSPEWKPPAVPVGEPVGNPVVDRVLKGVNRWLLRAEAEWGIPQQVNIEHVREAFMSKAKANELQRFQAQRFKKNEEARQQIEGSQNLSGLPRIAAIRKQQALQRQHCECLYCGTHITFATAEMDHIVPRRGVGSTNTRDNLVAVCRRCNQEKSNIPFAVWAAQTNIPGVSQKEAISRVKGWFTDTSVKDDKSLRAGVIDRLSRTKADPEIDNRSMEAVSWMARELAHRIEQRYRIPLGQSATAIDTSEGEDADSENQVKVRVFNGSITAAARRASGFEGRVNLIGGRGKTRLDRRHHAMDAATIAMMRPAVAQTLVERENLRRGQIMAGGEQNWKSWKGSTFAQQKIYAVWLEQMRYLAEIYNQALADDQIPVFSNFRLRLGDGKLHEEVKKLHSKQLGDAWSMNDIDRAETPALWCALTRLPDFVWAEGLPANPERKIVVNGSHFAADDSVGIFPTNAPTMKLRNGCVEVGTSIHHARIYRILGRKKPVYAMLRVFTVDLPNKAGVDLFQVHLPEQSISMRNAEMKLREAFREGNAKYLGWLVVDDELELDLSAERKGAIAELLSEYPGISHWSVDGFPMKITLRLRPLYLAGEGMPEDALPGTKEILQGRGWWPAINKLFNAAKPRVIRRDVLGNIRDNSSRLPNSWSI

SEQ ID NO: 4898 - protein, 1109 aa, synthetic construct
  REGION 1..1109: note = Synthetic
MATSHLKYRVGVDVGQNSIGFAAIELNDQDLPIRILNSCVLKHDAGIDPEQAKTQTTRLASAGVARRARRRLVRKRKRLEKLDRLITDLGWPLINLEDQSDPYYPWRVRAELVEGFIDDPDERAQKLSVAVRHIVRHRGWRSPWIHERTLLQPAEPSDQYVAFKQRVEDLIGYELPNNLTLGELVVAAGLSPKVNLRRTGPMDKPKNPILGKTLQSDNANELLEIARVQGLDDQTVRKLVLAVFESKSPRGSAAKRVKKDALPGQGAHYRAEKAHPAFQKYRIATVVANLRIKNPNTGEVESIPLEVKNQIVGYLNTWSKRQAPTWIDIADYIGVERQYLRGTASATADGERAAARPPINETHVRILNASKLKPVKDWWKKADEQNRGALVDCLSNSSVIDEEDVKYADALELIGSLDDEQLATLDALKLPIGRAAYSVNSLERLTQRMLVHGDDLHQARKNEFGVDDDWAPPADSIDEPVGNPAVDRVLKAVNRWLLGAEEAWGAPVSVNIEHVRDGFMSKRQAHEIERQNEHRYKQNQAARERLKDSFNVESNRTSDIRRLYALQRQNGECAYCGGAITFQNSEMDHIVPRKGVGSRNTMDNLVAVCSRCNESKTNIPFSVWASSRPFPGVSVEEAVSRVEFWNNDGGIPNADFKKLQQSVKDRLSRTELDPEIDERSMESVAWMARELAHRIRYHFLESGNETKVFVFRGQVTAWARRASGMENRLNFIGGPGKTRLDRRHHAMDAATVALMRNSVAKTLLQRNSLRQQERFSEGTETWKTFRGDPADPGARVIYEKWLEQMRILSELFNEALANDGIPVFSNVRLRLGDGRAHADKVDRLVRHKVGATWSMKDIDRVSTEALWCALTRQPDFVWSKGLPENPQREIVVNGTHFRADDEVEMFPSYSAYLKVRGGAVALGNTIHHARIYRYKAGKKTSYGMVRVFAQDLQRHRHEDLFKAPLKPQSVSMRDAGIKLRTAIQNGEAEYLGWIVVGDEFVVDSSLFSTDKIVEFNKEFPDITRWTLIGLEDNRRINLKPVLLSSEGLPEEVSRNLAEIISVKGWRVPLSQLISAGGLTVVRRDSMGRVRYKSRANFPVTWTIDPEQDV

SEQ ID NO: 4899 - protein, 1105 aa, synthetic construct
  REGION 1..1105: note = Synthetic
MERKRYYVGIDVGLASIGFAAIEVDDDGFPSEILCQNVLIHDSGIDPDGHQYAITRLKASGAARRVRHGRRNRQKRLAQLDDLLRELGWPVEELGGPVSDFFPWRVRAGLAETYVEDPARRAEALSVAVRHMARHRGWRSPWQRTESLLVPAEDSEYMVKLRERMDAAAGRKLPREYTTAQMVCALQLSPKVNLRRKGTDKNVKTPLFERLHQSDNANELRAIARRQRLDDETLRKLILAVFYMESPKGKAEKRAGKDALPGQGHLIRAEVSHPAFQRFRIAAQVANLRIENPATGDREKLPREVRAQLIDYLCNLTAKEGPTWPDVAEFVGVERSQLSGTAARADYGDRPANRPLVDSTNRAFNQCKVKSVQKWWRKAGPEARGCLVTALSNSSSVDEGAPGWNEVEELLLSLSDEDLEKLDKMSLPAGRAAYSVDSLERLTERMIATGEDLHEARKAVFGVDDDWRPPAEPLGTPVGNPAVDRVIKAVNRWLMMAEYRWGAPERVTIEHVRKGFVSEDAARRIDNEMNKRARAREKLNEDILAATGIEHPRQSDVRRYEALQRQNGQCLYCGAPITFKTSEMDHIVPRKGPGSTNTRFNLAAVCEPCNRAKSNIPFAQWAKEKQRPGVSLEDALVRVQAMICDSGMSARDFAKFKREVQLRLKREEDDAPIDNRSIESVAWMARELAGRVKYHYGDSGTKVHVFRGGITAEARKASGFEGRVELIGGGVKTRFDRRHHAVDATVIAFMRSSVAMVLTQRSNLRITQHMDPHSVDEYGPWQEFEGERVSDRQLYRQWKKAMAKLADLTCQAVSDDAIPVQQNLRLRFGNGKVHDDTVSELVTKRVGEAWTLADIDRAATPALWCALTRCPEFSWPSSEKVVCLPESDTRCIVVNGMHYGSSDSVELFPTSAASMKVRGGAVAVGSSIHHARFYRVKSGKKDSFYMVRVFVPDLTAARGNDLFSLELPSHSLSMRGAPFKLRKALEDGDAAFIGWVTVGDELLLEQGRSLLKDLKPDEEDLVVTRWRVGGFEGPGLINLRPVYLAKEGLENVEMQVDVPLLDSKGWRLAVNKMLSSGHVQVIRRDAHGRIRRHSDAHLPVSYDLT

SEQ ID NO: 4900 - protein, 1105 aa, synthetic construct
  REGION 1..1105: note = Synthetic
MDNKNYRIGIDVGLNSIGFCAVEVDQHDTPLGFLNLSVYRHDAGIDPNGKKTNTTRLAMSGVARRTRRLFRKRKRRLAALDRFIEAQGWTLPDHADYKDPYTPWLVRAELAQTPIRDENDLHEKLAIAVRHIARHRGWRSPWVPVRSLHVEQPPSDQYLALKERVEAKTLLQMPEGATPAEMVVALDLSVDVNLRPKNREKTDTRPENKKPGFLGGKLMQSDNANELRKIAKIQGLDDALLRELIELVFAADSPKGASGELVGYDVLPGQHGKRRAEKAHPAFQRYRIASIVSNLRIRHLGSGADERLDVETQKRVFEYLLNAKPTADITWSDVAEEIGVERNLLMGTATQTADGERASAKPPVDVTNVAFATCKIKPLKEWWLNADYEARCVMVSALSHAEKLTEGTAAEVEVAEFLQNLSDEDNEKLDSFSLPIGRAAYSVDSLERLTKRMIENGEDLFEARVNEFGVSEDWRPPAEPIGARVGNPAVDRVLKAVNRYLMAAEAEWGAPLSVNIEHVREGFISKRQAVEIDRENQKRYQRNQAVRSQIADHINATSGVRGSDVTRYLAIQRQNGECLYCGTAITFVNSEMDHIVPRAGLGSTNTRDNLVATCERCNKSKSNKPFAVWAAECGIPGVSVAEALKRVDFWIADGFASSKEHRELQKGVKDRLKRKVSDPEIDNRSMESVAWMARELAHRVQYYFDEKHTGTKVRVFRGSLTSAARKASGFESRVNFIGGNGKTRLDRRHHAMDAATVAMLRNSVAKTLVLRGNIRASERAIGAAETWKSFRGENVADRQIFESWSENMRVLVEKFNLALYNDEVSIFSSLRLQLGNGKAHDDTITKLQMHKVGDAWSLTEIDRASTPALWCALTRQPDFTWKDGLPANEDRTIIVNGTHYGPLDKVGIFGKAAASLLVRGGSVDIGSAIHHARIYRIAGKKPTYGMVRVFAPDLLRYRNEDLFNVELPPQSVSMRYAEPKVREAIREGKAEYLGWLVVGDELLLDLSSETSGQIAELQQDFPGTTHWTVAGFFSPSRLRLRPVYLAQEGLGEDVSEGSKSIIAGQGWRPAVNKVFGSAMPEVIRRDGLGRKRRFSYSGLPVSWQG

SEQ ID NO: 4901 - protein, 900 aa, synthetic construct
  REGION 1..900: note = Synthetic
LQSLKKIFSRQKISEDLGNQLIDKVFAAKSPKGSAAEKVGKDALPGQEHLERAEKAHPAFQRYRIATIIANLRICEGEDGQKERRLTGEETMSLFKFLSDPDRKKVPTWIEVAQVLGIERQDLVGTGKLTADGERTGNTPPVDETNIRLTKCSIKPVQQWWRAASYLERCAFIEQISRASSPGEASSREEQIAAEFVASLNDEDLEKLESSVKLPIGRAAYSVESLGRITERILADNVDLQQARELEFQVSQEWKPPAVPVGEPVGNPVVDRVLKGVNRWLLRAEAEWGIPQQVNIEHVREAFMSKAKANELQRFQAQRFKKNEEARQQIEGSQNLSGLPRIAAIRKQQALQRQHCECLYCGTHITFATAEMDHIVPRRGVGSTNTRDNLVAVCRRCNHEKSNIPFAVWAAQTNIPGVSQKEAISRVKGWFTDTSVKDDKRLRAGVIDRLSRTKADPEIDNRSMEAVSWMARELAHRIEQRYRTPQGQLAPKNDTSGGGESTSDNKVTVRVFNGSITAAARRASGFEGRVNLIGGRGKTRLDRRHHAMDAATIAMMRPAVAQTLVERENLRRGQVLAGGEQNWKSWNGSTFAQQKIYSVWLEQMRYLTEIFNQALADDQIPVFSNFRLRLGDGKLHEEVKKVHRKRLGDAWSMDDIDRAETPALWCALTRLSDFVWAEGLPANPERKIVVNGSHFAADDSLGIFPTNAPMLKVRGGCVEVGTSIHHARIYRILGRKKPVYAMLRVFTIDLSNKAGVDLFQVDLPEQSISVRNAEMKLREAFREGNAEYLGWLVVDDELELDLSAERKGTIAELLSEYPGISHWSVDGFPGNSRLRLRPLYLAGEGVPEDALPGTKEILQGRGWWPAINKLFNTAKPRVIRRDVLGNIRDNSSRLPSSWSI

SEQ ID NO: 4902 - protein, 543 aa, synthetic construct
  REGION 1..543: note = Synthetic
MLVLWNPYYICYCRNGSYRPAARGGSTNTRDNLVAVCRRCNQEKSNIPFAVWAAQTNIPGVSQKEAISRVKGWFTDTSVKDDKSLRAGVIDRLSRTKADPEIDNRSMEAVSWMARELAHRIEQRYRIPLGQSATAIDTSEGEDADSENKVKVRVFNGSITAAARRASGFEGRVNLIGGRGKTRLDRRHHAMDAATIAMMRPAVAQTLVERENLRRGQIMAGGEQNWKSWKGSTFAQQKIYAVWLEQMRYLAEIYNQALADDQIPVFSNFRLRLGDGKLHEEVKKLHSKQLGDAWSMNDIDRAETPALWCALTRLPDFVWAEGLPANPERKIVVNGSHFAADDSVGIFPTNAPTMKLRNGCVEVGTSIHHARIYRILGRKKPVYAMLRVFTVDLPNKAGVDLFQVHLPEQSISMRNAEMKLREAFREGNAKYLGWLVVDDELELDLSAERKGAIAELLSEYPGISHWSVDGFPMKITLRLRPLYLAGEGMPEDALPGTKEILQGRGWWPAINKLFNAAKPRVIRRDVLGNIRDNSSRLPNSWSI

SEQ ID NO: 4903 - protein, 1124 aa, synthetic construct
  REGION 1..1124: note = Synthetic
MANKVRIGLDIGIGSIGWAVITGGPKNSKLENFGVRIFDSGELDNGKNRKSQERRHFRGARRLIRRRYFRKEWLKSHLSYIGFLDESVMQEYELIKDQNVHYLKAKGVFEKLTKAELYKCMIHTCNHRGYRDFYENDYTLDSDDETSVNRVAANEFESMFRKSGCRTVSQFISQNFVNEAGQIEFRNRNSRKENYLLIRRSLLQDELRIILNKQAEYHSCLTKNNIDIIDKIIFSQRNFEDGPGDKNDEFRRYTGFLKSLGSCPFYPEDKRGFRGTVIADVFAVINILSQYRFIDKNTEKYYLKPDVAKQLVDHLLKNANLTITDVKRILKANNFELQKSNNSDDKALAKAIRFLKIAKASIEKAGEDWEIWISEEQFDCEKPSKLHKIGEVLSKYQTPSYRKNELEKLGFMSPAVIKEFSSKKISGTARAGYRYMCDAIHAFLRGDIYGNFQANRMKQLSQEKANESKRSIKLLPQHIDDEDIKQNPVVFRAINETRKVLNAIIELYGSPETIVVEVASELNSSFVERERIAKLQKENEIKNDKAKQKIAELLNISVEEVTVVMLERYKLYEEQEGKCLYSSKPLGELTDVLKNTDKKYEIDHIVPFSLILDNTLNNKALVFSVENQAKGQRTPLMYLDAEKAAAFKARANEMRTRKENHISERKYRYLMLDNIYGKEAEELLSQWKSRNINDTRAITKYIVSLLSKNLVFSGNSGQPVYGVKGALTSKFRKLWLNPKTWGNPDKNRDSYLNHAVDAVVVANLTLPYIEIASDNFKLQQIYKKYRSQSVPEYQNYLEKCLDKMQKYYNFPREYSKNLLTKTERVPSYLPNIAEEVDIRFNDEDEELFQKNINYYYKDLSSFVVKPHMPITSHKQEKKFRGQIADSNPIRVVEIDSEPYKILRKEIGSLTKKDIDRLYTGDKTLISTLERIFEGKDDKYTVEKYLKENGLTEFRTDSGQPVHKVSIISGKISNFFKKPISENNYSILGGLNYYCVEVYKDHKGNTRIWGIRYVDIKHKGKKLYIIKERLPEDYCSHVMYLFPNDYIRIYKDGKIKFEGYYKSVYNINQASLYYSKRNSPTEPRKCITISKKDEIKKYHIDILGRLGGEIKCSAPLSLISEKDLV

SEQ ID NO: 4904 - protein, 1118 aa, synthetic construct
  REGION 1..1118: note = Synthetic
MIKYRLGLDIGIGSIGWAIISGDSKAARIENFGVRIFESGELDQLGKDRKSQQRRGFRGTRRLVRRKKHRKDRVKGHLQNIGLVKIEALNQYFETNNQDIYEIRVKALDGKISPEEIGACLIHFANNRGYKDFYAQEGEKKDLDVEEEADYEALNNFDKLYKSTNFRTPAECILTKFKKDGQCYPDFRNNNFKEIHYLINREYLKNEMHQILAEQSKYYRSLSPANIEMLNVIIFKQRDFEDGPGDENEKFRRYSGFLDSIGKCMYYKDWDRGFRSTVISDVYAVTNTLSQYQFLDSATGEYHLNPEAAKELVHYLLKTGNLTMTEVKKILKNYNLILKKSDLSDDAALSKAIKYLKTIKNAIETCGLDWNGFIGEVQFDVENYSKLHQMGELISKYQTPKRRKDELKKLPWMTEPLLKELCSKKISGTSNVSYKYMCEAIEAFMNGETYGNFQANKLKERQENISDDHKGVLLKTLDDPEIKDNPVVFRAINETRKLINAIVRQYGSPECINLEVASELNRSFSERVEIQKYQKENEKSNDKVKKAIADLLQIEVGDVSGAQIDKYKLYYEQDCKCLYSGKPLDDIGLVLMDKTHRYEIDHVVPYSLILDNTLNNKALVLGNENQVKKQRTPLMYMGSQQKEDFIARINEMHNKKHNQISDKKYKYLMVENLYDEKTLSMLRDWKSRNINDTRYITKYLISYLKSNLQFNSNRREPVYGIKGGITSRFRKIWLRDTDWGRDIKDRESYLNHAVDAVVIANLTPAYVEISSDNMKLSQISRRYRNTTNDEYQDYLKRCINKMDEHYHFSPEYTERLLTKTNRVPSFVDQLEKEVIIRFDEENPELFDERVQEYYGDLSDFVIKPHLPIVSQKQERKYRGSMADSNPIKVCEINGVLMKVNRKTIGELKLKDMECLRTADTDLIESLEEVFESFPTVDAYLKARELKQFKTKKGQIVNRVSVIQGAISNYYKKEISEQNYSILGGMKYYCIEVYQNKKDETAIWGIKYTDLVNKDKKLWVKETALPEDYGKHVMYLFKNDYIEVFNKKGEQKFSGFYKSIFNINQNQLYYALATKPLQKRKALSISKKDSLKKYDIDILGNKGGEIKCSAPLSLMPAKK

SEQ ID NO: 4905 - protein, 945 aa, synthetic construct
  REGION 1..945: note = Synthetic
MLKYRLGLDIGIGSIGWAIISGDSKVARIENFGVRIFESGEDPRQNERKSQQRRGFRGARRLIRRKKHRKERIKGHLQNIGLVKIEELNQYFETNNQDIYEIRVKALNEKISPKEIGACLIHFANNRGYKDFYALEVESLDAEEEADYEALNNFDKLYKSSNFRTPAECILEKFKKDGQPYPDFRNNHFKSVHYLINREYLKNEMHQILEEQSKYYECLSSANIERLDAIIFDQRDFEDGPGDKNDAYRRYKGFLLSVGKCMYYKDLDRGFRSTVISDVYAVINTLSQYRYEDSEPGDYYLKPEAARELVQTLLKTGNLTMTEAKKIVKKHGITMSKSDFSDDSALSKAIKYLKVIKNMIECCGLDWNGFISEDQFDVDNYSRLHQMGELISKYQTPKRRKDELKKLSWMTEPLLKELCAKKISGTSNVSYKYMCEAIQAFMNGETYGNFQANKLKERQENISPEYRSMLLKTLDDPEIKDNPVVFRAINETRKLINAIIRKYGSPECINLEVASELNRSFTERAVIQKNQKENEKNNDRVKKEIADLLQIEVGDASGPQIDKYKLYYQQNCKCLYSGKTLGDIELVLRDKSHRYEVDHIVPYSLILDNTLHNKALVLGNENQVKKQRTPLMYMGNQQKEDFIARINEMHNKKQKQISDKKYKYLMLENLNDENMLRDWKSRNINDTRYITKYLIGYLKSNLQFNSNRPEPVYGIKGGITSKFRRIWLRDTNWGKEIKDRESYLNHAVDAVVIANLTPAYVEISSDNMKLGQMSRRYRNTTNDEYQKYLKDCLVKMSEFYGFKPEYTQRLLTKTNRVPSFVDQLEKEVAIRFDEENPELFDERVQAFYGGVSDFVIKPHLPIVSQKQERKYRGKISDAEPIKVCEIDGVLMKINRANISDLKPKDMVRLRTADTDLIESLEEVFETFPTVDAYLKTYNLKQFKTV

SEQ ID NO: 4906 - protein, 1098 aa, synthetic construct
  REGION 1..1098: note = Synthetic
MGCHLGKRGWTPRQDRRFRHEDLPVGRERKDERIALQGAQGISRSSKDRTPQSQPQKNAEKSFSEHGLINGTFNDDYADVKDDDVYSLKVAGLDRKLSPAELYKCLVHTCNHRGYRDFYEVDPDDEEAGKNATAANLFEKAFRESGKRIVSEYLLENKNADGFVKFRNRSGGDEPYLLIRRDLLKEEAEKLLAAQRGYYPCLNRLNIDRTVSIIFDQRDFEDGPGDPNDSTRRYHGFIETLGKCPYYKDLERGFRGTVISDVFAVTNTLSQYRFVNKDTGEYDLPKEVACEIVENLLHNASMNMTEVKRILKKHGYQLYKSENSDDKALNKAIKFMSMAKKSVEAAGMDWEQIISEEQFDVERPSLLHSIGELISKYQTPKRRVKEMKNAGIDEALIKAFSGKKVGGTSAVSYKYMCDSIEAFKNGDIYGNFQAKIVEAQKAESDERRFVKLPPSAIEDSEIRDNRVVFKAVNETRKIVNAIIDVYGSPKDIVIEVASELGKSVEMRKDIERTIKKNAKDKEGIVEKISEMLLIDKGYVTPAMVERYKLYEEQEGKCAYSLKPLGEMKAVVANRDHAYEIDHIVPYSLILDNTLNNKVLVFTEENQKKGQRTPLMYMNDEEGKAFLTFVNHLYSRKESPISKKKVAYCNLKSIYGEEAEEILGEWKSRNINDTRYITKYIAGLFDRKLVFAGDKGQHVFTVKGAVTQKFRREWFRNTEWGEEEKNRSTYLNHALDAVIAANLTKAYIEIGSDALRLKAIKKKYRGNVTKEYEDYLNACISKMKKYYYFDEKYTERLLLSEKRVPAYVPRLREEVEARFFDGDEAVFAEKVAEVYKDDSAFTVSPHIPRTSQKQDKKYKGTIADANPLKIVEIDGAPHKISRRNVSEINEKQLDKLYTDDAALKERLSAILAGKDEKYTLGTYLKENGLDFFRDGNGKVVRKLSFDEGPVSNFYRVDKGEGNYTNLGQLKYYCVEVYEDAEGRTHTCGVRFVDIVKKDKKLYRKAESLPADYSKHVTYLFANDYIRIIGGKGELKFEGYYKAVYNINQSAFYCKKANEADVIAKNISRKDRLEKYSVDLLGKLGGKICSAPLPCTKAKE

SEQ ID NO: 4907 - protein, 1117 aa, synthetic construct
  REGION 1..1117: note = Synthetic
MEYRIGLDIGIGSVGWAVVSAEQDGHPARIEDFGTRIFQSGEDEKTRESLCQGRRSARGVRRLERRRSYRKKILKNHFANIGILNETFNDEYAACKDADVYELKVKGLDEQLSPAELYKCLVHTCNHRGYRDFYEPEEDDEEAGLNESAANELEEAFIKSGKRTVSEYLLADKLVNGFVKYRNRNEGDNPYRLIRRKLLLDEVRQILTKQSEYYSCLTQKNIDRTETIIFNQRDFEDGPGNPDDPNRRYCGFLEKLGKCPYYKEEDRGFRGTVIADVFAVTNTLSQYRFVDKSTGEYTLDKAVAKEIVDRLLTDAKMNLTEIKKILKAHGFELRKSENSDDKALNKAIKYLALAKKCVEAAGYNWAELITEEQFDVENPSLLHRIGELISTYQTPSRRKKEMKAAGVDTALIDAFSSKKLSGTASVSYRYMCDAIHAFMDGDIYGNYQARFIKEQQTVAPTEKCFKLKPGHIDDADIRNNRVVFKAVNETRKIVNAIIDTYGSPTAIVIEVASELGKSKDMRDEITRAKNANEKATAKVKEAIAELLHEDVDKVTPVMVERYKLYVEQDGQCAYSGKPLGELSDVVRNTGHAYEIDHIVPYSLILDNTLHNKALVLTEENQKKGQQTPLMYMTEEQGKAFRARVKAMLSRKENPLSRKKAEYCLLETVYGAKAEDILSGWKSRNINDTRYITKYIAGIIDRYLLFAGDAEKQHVFTVKGAVTQKFRREWFKDSPWGDAEKNRENYLNHALDALVAANLTKAYIEIGSDALRLIALYRRYRSTSAPEYVEYLEKCVRKMEKYYGFPEAKTRMLLKNTERAPAYLPRLADEVKVRFNDEDENAFDEGVKKLYGNEAPFIVPPHIPVTSHKQDKKFKGCIADDNPIRVVEIDGAPHKIRRINVRAVSVKTLPKLRCGDPSLVAQLTEILEGKTEKYTIDSYLKETNQPHFISKGGVVIRKVSIDDGPVTNFYRKTINENNYTNLSKLKYYCVELYRDKNGNLKNTGIRFVDIINKDKKLYRKANSLPQDYAAHEMYLFAGDYIRIINSKGELKFDGFYTAVFNINQNQFYCKHNNNSSTCVKPISPKDKVIKYSIDILGRIGGTIKCSEPLPCIAEKKSR

SEQ ID NO: 4908 - protein, 1127 aa, synthetic construct
  REGION 1..1127: note = Synthetic
MNRTYRIGLDIGIGSVGWAVISKQGDSARIEDFGARIFDSGEREQKYRTSQERRAFRGARRVLRRRYYRKERLKRYLSLLRFLSFQQMNETDTSGKESVIELKVQGLERKLSPVELYRCLVHTCNHRGYRDFYETPEGEEGTEIDADMDEDSEEEKETAVNKKALQEFDAAFKASGLRTVSEYLWRDCRDEATNHIAFRNRDYKEERLLINRKHLRREIELILEKQRTFYPELTTDACLRIVDIIFAQRDFEDGPGNPEDASRRYTGFLDKLGICPFYGEQRGFRATVMGDIYAVVNALSQYRYLTADGELLLPKEAAKELLCTALNEARLTKSDVNAIMKKYSLKQLKGEGIDDNALAKSIKFMRAAKQAAEQVGMNWRDLIGETQFDVSTPSTLHRIAEVLAKYQTPRRRLTELKNTKLLHANDKALNAFARIKLNGTSAVSYRYMCDAIEAFLNGETYGNFQAAQNKKLFEDKEEARTIFLASELLKNEEIEDNPVVMRAINETRKVINAIIRTYGSPECINVEVASDLSRSFVERKKIQALQRDAEKANDKVRKAVAELLGITEGEVKGKAIEKYKLYELQEGKCLYSGKPLGDITEVLRDNNGKFEIDHIIPYSLILDNTLNNKALVFGSENQFKKQRCPLMYLKGDRAANFKAIVNVMRTRKENPISAKKYEYLMLEDLYTSKSREMLEAWKSRNINDTRYITKFIVSLLKNHLVFTGKPRVYGIKGAITSRFRRRWLNPKTWGSEQKDRNSYLNHAVDAIVIANLAPAYIEIAADAEKLNQIWKFHRGESEEYREYLKKAIERINQYYNMNPSYIEILLKRNNRTPSMVANLSDEIDIRMNDLDEELFNTKAEEFYGSTINDFVVKPHMPLVSHKPERRFRGAIADSNPIKLIKIDGQYHKVSRKAIQSITEKDIDCIRTNDGSLLRTLKVALDNKGEKYTVEKYLKEIKQKVFLTDCGQPVYKVTVVDERPTSSYYRKENSTSNFSILGGLKYYCIEVYENNEGRTATRGIRYVDVIRENKKLYLKKESKPEDYARHIMYLFKGDYIETYNFKGKQTFMGFYQSAYNINENRFCGKEMNSSLISGNVRISSKIKIKKYDIDVLGKKCGEIKCFVPLSFK

SEQ ID NO: 4909 - protein, 1119 aa, synthetic construct
  REGION 1..1119: note = Synthetic
MTNKVRIGLDIGIGSIGWAVITGEQKNSRIENFGVRVFDSGELENGKSRKSQVRRGFRGVRRLIRRRYFRKELLKAHLQNIGLLNEKVMREYERIKDQNVHVLKAKGVSEELSPAELYKCLIHTCNHRGYRDFYEDDETLDMEDETSVNRAAASEFEKMFKSSGCETVSLFICKHFVNEAGQIEFRNRDSRKDKYLLIRRSLLRDELRIILDKQAEYHSALTPHNIETIDKIIFSQRNFEDGPGNPDDPFRRYTGFLESLGSCPFCTGDRRGFRGTVIADVYAVVNTLSQYRFVDKETGEYCLKPDIARQLIDFLLKNASLTLSDVKRILKANNFELLKSENSDDKALTKAVRFLKLAKSSIENGGENWEDWISEEQFDIEKPSKLHKIGELLSKYQTPSYRSSKFKELGFMTPQLIKAFSGKKISGTAGAGYRYMCDAIHAFLDGDIYGNFQANKLKQISEEKNISKRSVKLLPEHIDDEDIKQNPVVFRAINETRKVLNAIIELYGSPEVIVVEVASELNSSFLERNKTAKRQKENERKNDEAKRVISELLGISVEEVTGNMLDKYKLYHEQQGKCLYSGRPLGDLTEVLKDKDKRYEVDHIIPYSLILDNTLNNKALVWSNENQTKGQRTPLMYLGAEKAAAFKARVNEMRTRKENCISDRKYRYLMLESIYGTEAEDLLSQWKSRNINDTRAITKYIVSLLSKNLVFSGTSGQPVFGVKGALTSKFRRIWLGNTVWGDSDKDRTTYLSHAVDAVVLANLTPPYIEIASDNIKLQQIYRKYKSQSAAEYQDYLEKCLDKMQKYGFSREYTLHLLTKTQRVPSYLPNIASEVEIRFDDEDEERFKTNVVKFYGDALESFIVKPQMPIASIKQERKFRGEIADANPIRVVEINSEPHKIARKDIKSITKKDIDKLYTTDTTLVATLNRIFEGKDDKYTVEKYLKENNLTTFKTDSGQPVHKVSLDAGKISNFFKKVISDSNYTMLGGLNYYCVEVYKDKKGNTKVWGIRYVDIRRKDKKLHVIKERMPEDYCSHVMYLFKNDYIRIYRGGEVRFEGYYKHVDNINKKRLVFSYGNYTNTRDIEIAQKDEFRKVYIDILGRLGGEVKCSAPLLSISEKE

SEQ ID NO: 4910 - protein, 1119 aa, synthetic construct
  REGION 1..1119: note = Synthetic
MQKETYRIGLDVGIGSIGWAVVSSSTDGHPARIEDFGVRIFKSGEDPKKKTSLCQDRRGNRGVRRLERRRSYRKRMVKNHLQNIGLIGNGFNDELADCRDADVYKLKARGLDEQLSPAELYRCLIHTCNHRGYREFYEPSEDDDEAGMNESAANSFEKAFRESGKRTVSEYLISTASVGDYVKFKNRSGGDMEYRLIRRDLLHDEAEKILTKQSGFYRCLTRQNIERTLGIMFAQRDFEDGPGNPNDKDRRYQGFIEKLGKCPFCKDEDRGFRGTVLSDVFAVTNTLSQYRFVSKETGEYCLDKNVAEEIVDYLLQNAKLGISDVKRILKSHGFELLKGEGSDDKALGKALKYLPMAKKCVEEAGFDWNEIISEDQFDFEKPSLLHRIGELISMYQTPRRRREEMRKAGVDDKLIKAFSCRKVSGTSSVSYKYMTEAISAFLDGDIYGNFQANYNKNAEENAPVKREIKLLPSHIDDPEVRDNRVVFKAINETRKIVNAIIDVYGSPEEIVIEVASELGKSVEMRNKETRRQRNNEQANDKIKEEIASLLKIDVGDVKPVMTERFKLFREQEGKCAYSGKPLGELKEVIDNRDKKYEIDHIVPYSLILDNTLNNKALVFAGENQKKGQRTPLMYLGTEDAKNYIAFVNHMYSRKENPISKKKLDYFKLKSIYGEKAEEILGGWKSRNINDTRYITKYIAGLFERNLIFTGEKKHHVQTVKGSVTQKFRREWFRGTRWGTDEKSRDTYLNHALDALVAANLTRPYIEIGSDALRLISIYKSHRNTVTPEYDEYLGNCVTKMKKYYGFDEEYTRRLLSRTGRVPAYVPRLSDEVSVRFWEGDADKFEENINRVYGNEAPFVCPPHIPVTSHKPEKKFKGEIADSNPVRIVEIDGVPHKIRRVDIKNVGEKTLGKLYTGDPVLKERLEEILLGKGEKYTVETYLGETGENHFTDGKGHVIRKLSVDDGPVSNFYRKDNGDGNYTVLGMLKYYCVEVYKDKDGNTAVCGVRFVDVVKKGKKLYRKEESLPENYSEHVMYLFPGDYIRVIDGKGKLKFEGYYVSVKTMGRSQFYFKESNISDSVVESIARKDSVRKVYVDILGKIGGEVKCSEPLPCIPEKRSR

SEQ ID NO: 4911 - protein, 1158 aa, synthetic construct
  REGION 1..1158: note = Synthetic
MTISLGLDIGTNSVGSAWVDTKKKAIQLGVTIFPAGVEDSDTKRGDPKNQKRREKRSQRRSIARKAKRKRQLRKTLVDLKLLPATAEEQTAIFHPENVETAKSWDPWKLRVVGLSRELTPFEFGRILIHLNQRRGALGVDADPDDQESGLVKAAISHTEGEMEKRGCRTVGELMYQLREDRQIPIKKSKNTSHSSYPVSIRNKGGEFEFHATRQLIRNEFLLLWEHQKSYKGKLSKLLTKKLLTILDHPEADSTWRHQGALFGQRKTYWDSGTLGRCSLEPSDHLCPKADMYASEFLVLETVNRIRIEERGNYDGRGLSLCDPSMKEKRDTVIQALRTTKTPTIATIRKALGIHTKENKVLYSLNIEREQKPELNSDWFHREIVTGVFGEREWNALDERQKESINRAIQKFDDEEKLKEGAFQWWGLNKTQIETLLAAWSHRPKPDKRLRLSRRAIKNLLPFMRAGDDLTTAKQKFGYPLKPRQLNKADRHYMEKHSNSLPPAPMCSNPVVRRAIHEVRRHVNAYLNHFQKLPDRIVIEYARSATQSAKSRNDQLAFNRKREAENKKIEQEFKKYIGDNNPAHRIVERVRLWVEQKKKCAYSGKLIGIEKVGFGTDLEVDHIIPRSRGGHNGFSNKVLCYRDTNRNKGNRTPKEWMSADDFEALEKRFEHLAGKQRQKVGVFECVPNKAKWDNLHQVLDNFDLKEFANSQFTDTAYAAKQVATYLREALYSDSENSKSQKQRIFTTKGTITARLRRDWGILEENEPFFAKQIDNEIPQYPKSRSEKKDRSDHRHHAIDAVMIALSSPERIEEIIKQEEAAIEYKERTGYRPRQEVIKPPWDLRNQVLDLSRNQIVAHRPVKRKLTGALHEETIYGIADEENKLFTIKLPAEKLTSKMLRLPELRDNKEGKKHLQDPSLGKGGLVRDWNLRKVIRECLTRNNIDPDNFSKKEIEELAKTGQLRMPSGVPIKSVVVLRTINSPIIIKTPSKPPRVYVGGNNHHLEIIEDETTGKWSGTVWDTFTVSQRVNPPKRKGTNSKLPMVIGRELESLKQEDRLPKQLQKYYENKTFVMSLAEGEVIFARRNDREPDSPDAIDYYVVVKLDKKRIFFAHHWDARRADQQDRWGASFSDLKNLGPNSDQPPFKVTIDPLGVVRRIKD

SEQ ID NO: 4912 - protein, 1157 aa, synthetic construct
  REGION 1..1157: note = Synthetic
MTISLGLDIGTNSVGSAWVDTKKKDIQLGVTIFPAGVEDSDTKRGDPKNQKRREKRSQRRSIARKAKRKRQLRKTLVDLKLLPATAEEQTAMFHPENVETAKSWDPWKLRVEGLSRELTPIEFGRILIHLNQRRGALGVDADPDDQESGLVKAAISHTEGEMEKRGCRTVGELMDQLREERQIPIKNSKNTPHSSYPVSIRNKGGEFEFHATRQLIRNEFLLIWEHQKSYKGKLSKLLTNKLLTILDHPEADSTWRHQGALFGQRKTYWDSGTLGRCSLEPSDHLCPKADMYASEFLVLETVNRIRIEERGNYDGRGLSLCDPSMKEKRDTVIQALRTTKTPTIATIRKALGIHTKENKVLYSLNIEREQKPELNSDWFHREIVAGVFGETEWNALDERQKESINRAIQKFEEEEKLKEGALQWWGLNKNQIETLLAAWNHRPKPDKRLRLSRRAIKNLLPFMRAGDDLTTAKQKFGYPLKPRQLNKADRHYMEKHSNSLPPAPMCSNPVVRRAIHEVRRHVNAYLNHFQKLPDRIVIEYARSATQSAKSRNDQLAFNRKREAENKKIEQEFKKYIGDNNPAHRIVERVRLWVEQKKKCAYSGKLIGIEKVGFGTDLEVDHIIPRSRGGHNGFSNKVLCYRDTNRNKGNRTPKEWMSADDFEALEKRFEHLAGKQRQKVGVFECVPNKAKWDNLHQVLDNFDLKEFANSQFTDTAYAAKQVATYLREALYPDSENSTSQKQRIFTTKGTITARLRRDWGILEENEPFFAKQKDNEIPQYPKSRSEKKDRSDHRHHAIDAVMIALSSPQLIEEIVKLEEYAIEYKERTGHRLRQDSIKPPWDLRNQVVELAKKQIVAHRPVKRKLTGALHEEMNYGIVDENKKLFTLRLPVEKLTAKMLRMPELIVSNEGTKYLKEPKLEKGGLVRDRNLRKLIRECLKKNQINPDKFDKNDIKALSKSGKLNMPSGVPIKTIVVLRTIKSPIIIKSPNKAPRVFVGGNNHHLEILEDTKTGNWSGTVWDTFTVSQRINPPKTNGNAAKLPMVIGRELEKLKQENRLPGHLQKHYENKSFVMSLAEGEMIYGQMPEKKNEVSEWIGYFVVVKLSKKSIFFAPHWDARRADQQHRWEISIQKLKNIGVGESLPFKVSINPLGTVSKIND

SEQ ID NO: 4913 - protein, 1416 aa, synthetic construct
  REGION 1..1416: note = Synthetic
MGRILGIDVGTNSLGLVVRDEDISTNPTEQIVFSSVNLFDSGVGNGQSGEFSFAAERTKSRRPRKLYKVRRYRKWETLKLLIENSDKKYCPLSQSELEQWTTYDKKRGLKRTYPIDVIQFQQWIRLDFDGDGRPDYSSPYELRNELATKQLNFEEEINRFKLGRAIYHIAERRGFQSSKGETIKEQEETENEDKELQQSELDRALPFDKSLYPTVGCALYAINKSGQRVRRECSVVRKQYKEEIEYIFNFQNGLDTQSDLYKRLISEKRKEGTIFYKNPLKSQKGLVGKCTLEPNKPRCPQSRPEYEKFRAWSFINSIRYGIDCNKELSIETKKALFDEVFVRATDFRFETIRKWIERKTGEHFAYKTDRKQRTINYKDNTPVIACSVTFRFLQLLGENWQNWSFHPNAQHTNSKNKNHWHPTTYHWEDVWHVCFGADEEEPLRLFANKSNLDYNLLLRLWKAMPIAYANLSLKAINNINRFLEKGLIYNEACLLAKLPDIFKEKWTDEVENILFDSITSIITANSEERKIVNIVNSLIANYKSKTDEEKQGYKDYSYNLSGEDYCDIEKCAAGFYGIKTWNEKDEEERKMIINQIAHLYQQFFHDEKRQYIKPNKIEDSIKQFLTDNFEDLNPRSLSKLYHHSQIEYYKPASIRRVDKGDKMLYMKLLENPSIASLRNPMALRVLHTLKRKVNDLLMEGIINEDDTRVVVEVTRKLNDANMRWAIKHYQDIHNAENEEFRTMINEIADIPKVRMLVEQHDCNGQVLSEKDSSKQEYYYERYMSNLIKKYRLWVEQGGFCIYTRKPITISSLINGEGVDIEHTIPRSISFDDSLSNKTLCDSNFNQKEKVNRIPSQLPNYEEILLNIRPWVEKVEDIRGRITFWKNKSKKAQTKEQKDNAIRQRHLWELEFEYWEKKVNAFLIKEVTTGFRNNQLVDTSIIAKYTMHFLKSVFSRVEVQKGKITSDFRKILGIQDDDTLKVRDSNSHHAIDAMVLTFIPVAARRDELLEVFFKRQDAKDLGHDVSQFDNEIKLLLRKNGITANFAEIVENIKSTVLAFYERKSQALTIAKRRKRVRGKIVAQRDEKGNIIMEKDEYGNFRTDRFGHRIPLAKQWIKGDSIRGELHDKTYYGAITQHGSENIKYVLRIPLKYKTNSLDKGFKSWDELGKAIVNKSLVEMMKSQFPEDTSFKEACEQGIYMMDNEGNKKNRIRHVRCYASSVTNPIKVREQVYKSRKDYKNYYYTRNGENIAYALYSLGNKRIFDCLSLMDASKISKAEGIHNLTSIFPDTKEVIDKKGQRTIYNKVFTLFPGQMVVLKREDEMLASLTQEEISHRLYRLKRIYSPDDGRLQLQHHLESRDDKALEHAYPNNGKSGKNGFSVINYDAPYPRLLLSLSNQNFWVEGTDFIIKNGKVIAL

SEQ ID NO: 4914 - protein, 1420 aa, synthetic construct
  REGION 1..1420: note = Synthetic
MGRILGIDVGTNSLGLVVRDEDISTNPTEQIVFSSVNLFDSGVGNGQSGEFSFAAERTKSRGHRKLYKFRRYRKWETLKLLIEQSDKKYCPLSQSELEQWTTYDKKRGLKRRYPIDALPFQQWIRLDFDGDGKPDYSSPYELRNELATKQLDFEEEINRFKLGRAIYHIAERRGFKSSKGQTIKEQEDNITEDTELQQSEMDKALSFDKSIYPTVSCALYAINQSGQRVRKECSVIRKQYKEEIEYIFNFQKGLDTQSDLYKGLISEKKKDGTIFYKNPLKSQKGLIGKCTLEPNKPRCPQSRPEYEKFRAWSLINNIRFGIDCNKELPLETKKALFNEVFVRASDFRFETIRKWIENKTGEHLVYKTDRKQRTINYKDNTPVIACCVTFRFKQLLGENWQDWSFLPNTQHTNSKDKTQKHPTTYHWEDVWHVCFCADDEEPLRLFANKSSLDYTLLLRLWKAMPIAYANLSLKAINNINRFLEKGLIYNEACLLAKLPDIFKSKWTNEVEAILLDSITSIIKANNEERKIVNIANSLIANYKSLEYDEKQGFKDYLYNLSENDYRDIEKCAIGFYGIKTWNEKDDNERTTLIKQIAHLYQHFFHDEKRQYIKPNKIEDAIKHFLADNFEDLDSKDLSKLYHHSQIEYYKPASICRVEKGDKVLYMKLLENPALASLRNPMALRVLHTLKRKVNDLLSEGIINEDDTRVVVEVTRKLNDANMRWAIKHYQDVHDAENAEYRKMIEEHLGSYEDIPKVRMLVEQHDCNGQTSQEKANQKQEFYYERYMTDLIKKYRLWVEQGGFCIYTRKPITISALINGGSVDIEHTIPRSLSFDDSLCNKTLCDSYFNQKIKENRIPSQLANYDDILLNIQPWVEKVEDIRGRVGFWKNKSKKAQTKEQKDHAIRQKHLWELELDYWQKKVDKFLVKEVTTSFRNNQLVDTSIIAKYTMHFLKSVFSRVEVQKGKTTSDFRKILGIQDDDTLKVRDSNSHHAIDAMVLTFIPVAARRDELLEVFFERQEAKDMGHDVSQFDIKIKQLLRKSGITANFSEIVENIKSTVLAFNERRSQALTIAKRRKRVRGKIVPQRDENGKIIMEKDEEGNFKTDRLGHRIPLAKHWIKGDCIRGELHDKTYYGAITQYGSDDIKYVLRVPLKYKTNSLDKGFKSWDELQNAIVNKALVKMMKSQFPEETSFKDACEQGIYMMDKDTNKINRIRHVRCYASSVTNPIKVKEQVYRSDKEYKNFYYAKNGENIAYALYANGKNRAYECLSLMDAAKISNVEGVHDLASVFPETKEVINKSGKCTVYNKVFSLIPGQMVILKRDDEMLMSLTQEEISHRLYRLKRIYSPDDGRLQLQHHLESRDDKALEQAYPNNGRSGKNGFSTINYEEPYPRLLLSLSKQNFWIEGTDFVIKNGKVIAL

SEQ ID NO: 4915 - protein, 980 aa, synthetic construct
  REGION 1..980: note = Synthetic
MVPYVLGLDLGPTSIGWALLGQEGDREVSLVDAGVRIFPEGVDRDTKGLEKSKNMTRREARGARRIKERRRRRKGRLVAILKEAGLWPDDDQSFRSLCLLDPYELRAKALDERLAPHELGRVLYHLNQRRGFKSNRKSGKSREDGKVLKSITELEEQIASAKCRTLGEYLHRLGRSERIRNRYTRREMYQREFDLIWARQTEYHGPILSDELKKKLADEVIFFQLPLRVQDELIGFCEFETDQRRCPKADWHAQQFRMLQDINNLQIINPDGSSMPLAPDQRQTLVEVLGTRAKMDFDQIRKALGLLETQTFNYEEGKRKSLKGNLMEAGLAKAFGRKRWAEMQAHRDRITEALLEIEDPNEFRRIAGEEWAADDEQIEALLKIDLPDGYLHLSKKAILKLLPFMEQGERMADAVKKAGYLRPDQKAGDNHDRLPQPPDIRNPIVKKSLHEVRKVVNAIIREYGKPARIVVELARDMHGSVDDRNELHLRMLKNEREREEVRESIRSEYGITNPGRDDIQRLRLWNEQGQTCPYTGNTIARSQLFSSDVQVDHILPYPRSLDDSMMNKVVCFTSANREKGNQTPQEWLAAFPDRYERMLQAIKPLPWRKRRKFTQQAIDLGQCIDRQLNDTRYISREVRRYLQSLVMDVDCTRGQVTAELRHHWGLNQILNHTGGFTKNRDDHRHHAVDAVVVALTTPSHLQQLARTKGIVRDPLPFPWERFRDDVANRINDINVSFRPLRKVYGALHEETAYGPTAEENVYAYRKSVRDLKGPMIAQIVDPAIRNLVMERLKQKGLDPNNPPSNIPTEVFAEPLTMPSGVPVKKVRIRDTFTNLIPMTKMKTRTGKPYRYVKPGSNHHIEIFEYTDAKRVAKRDGVVVSMFDAAQRVQRGLPLINRDHGSGRRFVMSLSTNELVHVKVDGQYVLYRVQKLDAGNTRVILRLHTDSRVDDPRTVLRKSPNTLDGYKVTVDYLGRMRPAND

SEQ ID NO: 4916 - protein, 977 aa, synthetic construct
  REGION 1..977: note = Synthetic
MAYRLGLDLGPTSIGWALVNIEKDMETKLLDAGVRVFPEGVDRDTKGLEKSKNETRRMARGARRQKERRRRRKKKLAGILKRAQLWPIHPEELKTVFQADPYELRARGLDEKLSPFELGRVLYHLNQRRGFKSNRKSGKSKEDGKVMQGITELETRINQSGARTLGEYFYKVKACERIRNHYTRREKYQKEFDAIWEKQKAFYPAILTEELKHQLANEVIFFQRPLKLQDELIGRCELEPDEYRCPRGDWYAQRFRIVQDVNNLAVIQPTGEMQSLTVEQRKQLIEHLSREKEMDFEKIRKKLGLLETQRFNLEEGGRKKLLGNSIEAGLVKVFGKHWPEFQGQLDQFNDFLLTVEDPDIFERTCRDQWKLTDKQIKEMEKIVVPEKYLHLSKKAIRKLLPFMESGDIYTKAVEKAGYLRNDQKVSLNLDRLELPPDLRNPIVQRALYEVRKVVNAIIREYGKPQEVIIELARDVKGSVDQRNEMVWEMRKREEEREEIKGLLIKEFNLTNPSRSDIERYRLWQDQGTICPYSGQSIPGHQLFSSDVQVDHILPYSRSLDDSYQNKVVCFTTANKDKSNQTPYEWVSGDSVRYEAMLQRVSKFTGKGCGGKKRKFSQKEIEINECISRQLNDTRYICREVRKYLQTLGVTVECTKGQMTSELRHQWGLNQILDHKTGFKKNRDDHRHHAVDAVVIALTTRKHLQFLSKTKGYGAERLPLPWEGFRDQVAMRINDINVSHRATRKVCGPLHNETAYGPTKEKNKFVYRKELTALKGPMIKNIRDKTIQTLIKNRLAVFMLDPENPPKDIPKEVFAQTLTMPKGVPIKRVRITETFNNLIPINSMNNRHGQPYRYVNPGANHHLEIVEDLTTHKRFAVAVTMFEAAERIRKKEPIVNHDHGCDKRFIMSLCKNDMFLLKIDDRFVLHRVQKLNVNQIALRPHNIATIDDNTTRQLRTANSLEGQKVLIDPLGRIRVAND

SEQ ID NO: 4917 - protein, 1119 aa, synthetic construct
  REGION 1..1119: note = Synthetic
MRVLGFDIGIRSIGWCLQENGEIVACGVRIPRSVEDAQTKESLAAQRGAARRIRRNIARKKGRMESLKIMICKEFGLNLADYYSKDGDLPKAYAGENFKSPYELRSKALTEKLSADELARVILHIAKHRGYTNKHARKESDKDKGKVLSAIKSNEQALKEYQSVGAYLYKEFYQKQRSSEEIQTKVELLKAFYDKNKIKIEKQDKNKLEQQSPNQYKKVRNTTDVYERCMKQEWLQAELELIFEKQREFGLKFSDEFKDEILKVMFFQRPLKGSADKVGFCTFFPNKKRAPKDSLSGIEYVALGKIINELKYIEKKIKAKDCIRFYAGEVVDTPQNINALLDIVLKKGEISYKEFRSILKLNEKFKDVKIFSKNAKLDYTQKTIDEAEKAKFLELKSSKDNPNIPNLKGFQKALGECFEKFDRKTLDDIAFDLATINDKQELFKQFENYDLSAEQKEALSQLSFSKFLNLSFKALSEIIPLMKQGLRYDEAVEKLGFKPSDEYDYNEVQKELHNPVVSHILAEVVKVLKAILKEHGQVHKINIEFTREAGISKDKRSKTEQEQRKKFQANEKAKEKCHQLGIAATKKNILKIKLWLEQGEVCVYSCNNGKGKKITEKDLQDETMLQIDHIYPYSRSFDDSYNNKVLVFSSENQVKREKTPFEAFGNNANKWNSIVSFVSGNKAYTYTKTNAKTNKKELCFTKKGQRILDENFKTKEQGFIQRNLVDTSYIANVVRDYIDKNVKFLPLDNKELLQSSMFFELDGYNEKDDTKKEYKRKHIEIISGNLTSMMKHYWGLHFLDKKNEFGEYEKDRSHHLHHALDAIIISYMNASRVKAFADFKKRLETMKASEYAEKLSEAEREQKRIKRKKSTFEVPANYANRNEFADKIKEKIFGIFVSQPPNKRTRGALHKESFYSQKDTSLINSKDTMEDALKLGKVRQIGTKIVSNANMVRLDIFKRKKDNKFFGVPIYTMDFAKGILPNKAVGTKEWIDMNEDYEFLFSIFPNDLLYIKKKGMEKAELCYYVKFNIANGAMTFKTHDNRLQSLTENQIKLYGTKIPTEENVQGVVGIQNLEIFEKWQVSPLGEVKKAEFKKRENISLKSTPKNTKHSMPNSNLETQ

SEQ ID NO: 4918 - protein, 1075 aa, synthetic construct
  REGION 1..1075: note = Synthetic
MQLSMSKLAPATQAFITMNKPSYRATKPYRLALDLGQSSIGWAVYLLDKNLKVSSLIDLGTAIHPHGLNSKMSASKGAERRKSRLARRTNAHKRQRMNALLKALTNHKLFPACQSQQNALKQLHPYALRAKGVTERLEPFEFGRVLLHLAKFRGPKFNRLSDDKTETGILKEGASKLEAALAERGYRTIAQLQHEHHLGNQDSTRVPQQVKMKKLRIPASSKDAFAFYSSRTAVLSEFDILWERQKQEHPDLLTDDARYAVFHAIFDQRPVSMPEPGRCPYHPEGPRISKAHPLFQEYRLRQTISDIRLTDSMLRKRALNDTEYEKLYDALSTRKEMRFPAIRKLLKLDDSIRISHEYEGAKALKGNETAALLGHKDRFGTTWAKLPLHDQTAVVVWLLTQDDEDALIAWLQDSFALAEDRARNIANTSLPIGQGGVGVTATMHLLQFMRLHHSAHEAGLLSGYNDARLMTGEIYDELPYYGEALPHRVGFGDGVSEALDRKFGRIANPSVHIGLNQLRKLVNALIAKHGHPTQVIIEVADEIKLSAKALEARKKANADNRFRKERHHKELDKLGIPEGGRRDALLKMALWEELGPDPEARFDVYSGERITLKSLFNGDFEVEHILPMTRSEDNSPANKTLCSTHLNRLKGNRTPWEAFSRDRMVSEDEWQKMLERARAALPRKKADRFTEAASEKLIDPEGFLDRHLHDTRYLCQVAKEYLSLVCDPLQVWVTSGRFTAALRTHLQLNTLLNKEGNVKNRDDHRHHALDAAVIGLMDRVYVTEFRRFEAALVEHRAKPFEFRIPYARFRDELECKLEYMTVFHRPNNGFQPGKTDMSLCSPGEILVDTIYRLEGDKPAGNELTRVSQRVEVLKYFDSMKKLLEADMAEQTRASMLSVIEPELAANPPKDDKQKSSRDFAFKSALLKWADKTGTNRVRIYTNKRVVMVHGKHARKCDNNSFVDVFQQPDGQWMFDVVSAYDAITMGTEPRWKKTYPAARKVMRLYKNDMVCITEERRAYIYRVVSFTPGRLRLQPHNMAKGQEVSSAASTWQKASLKKINVDILGHVKGLPYFDR

SEQ ID NO: 4919 - protein, 1237 aa, synthetic construct
  REGION 1..1237: note = Synthetic
MKILGLDLGVASIGWALVEKNNENGEINLIKSGVRIIPIETKDALQFSSGNTASPNIERREKRMQRRMYFRRKKRNQSLIKALKDKGLWDVNLINIEKNKLWELRNNAVNEQIPLTELGRILYHLAQRRGYKQMRIEQDESDANSKSDYKKNIYTRYQTIKNENVTVGQYFYKELSNNEHYRVKEQIFPRKAYEEEFEKIINKQKEYYPDILTDEYNNKIRHIIFHQRPLKSQKHLLGVCTLEGKTIKIKNNDGTVKEKYAGPPVVAKTNPLFQIHRIWQTINNITIKNKKTHKIYELSIEEKNKIFNELQNKDSLSIKQLYKILNLSDDEWYFDKLSKNGIKGNELLTLIRNALKGENYPQDMLKLEIKIINYKKKIVDKDTGEIKEQELEMIDPDVVNEPLYKLWHILYSVVDKEECMKALIKNFKLTESAADKLSDINMNSMKYGSLSLKAIRKTLPYLMKGMIYSVACDTAGYDFSNAITKEENTFRKVKNKLDLLPKNSLRQPIVEKILNQMIHVINYIIDENNGLVSREEREKGNFAIHIELARELKTSKDEKQKISSSIRRNKIENEKITSELTNKYGLTPTRKLIEKYKLYNELIPDGSNVVQPQCLYCGGFISLTEALTGDAIDVDHIIPQSKLFDDSKNNKILVHASCNRTKGNLTAYDFMKTKNSDIFNNYLSLVETLKNKKSISYIKYKYLLISEKDIPQDFLDRDLRVSQYITKKARELCMNISRDVLVTSGTITARLRELWGYNDILFEINNELMNNLDLTDDDIAQLEEIFRDKRTDHRHHAIDAVTIASTTRSIIQRINTLSSTESKEKINEYLKQMNQESLDTVYNPNEKNLRLLHKYLANQPHPKRDQVKQSMKYILISFKPGKKVATYSKRIVYLGNKPKILQTRILTPRGALHEESYYGRIPIYEFKDLKYAIQNPDLVVNNHIRNQIKELLDKYNNDTKKLWKDIDKEKVFIYSDINNSNAIKDVKCYHYEYVIKKSVQGDKVDQKAIDKKIKEILANSKNVKEEVYFNYAKHIPIRSVRVFTGLNESSMRPIRLNDKNEPITFVKLGNNHHIAIYQDKNEKYQEHLCDFWHAVERKKYNIPVIIENPDKIWDEILENPDSYPQDFLNKLPDPSWHLVLSFQANEMFVLGLSNEEFDQYFVDKNYAILSNHLYRVQKLSTNQYFFRKQNDTSSDLSSLYRKIEYLKQLSIQSLLKENPIKVRINYLGEIVDYKKTF

SEQ ID NO: 4920 - protein, 1393 aa, synthetic construct
  REGION 1..1393: note = Synthetic
MKRTLGLDLGTNSIGWAIITEVNGKKYINAHDPEESIGHNPVLAGSVIFSEGVARVKGHEVPSVSTRTGARRTRRLYMRRRMRKQRLLEHLIKNGMCPLSEGGLHLWKKEGIYPKEDGFTSWFMLNPYELRAKGLQEKLMPLELGRIFYHIAQRRGFRSNRKGGDGEQKTLHEGSPDRGITGYDETKKLIERYDTLGKAGAELHKTHTPIRNRYVMRIDLVDEFNKLWDAQKDFHKELLSDALKAELGDGKNGDLFFQRELKGKKGDVGRCTLEPGNKRAPMSSPIAEVFNVLHAVNNIKVNGENLTEAGRKAVLPCFFRKSSPTFPIGDVRKALKKAKIEGELNYEKWEIRAAKENKEVKLTGAHTIAHLAALWNVEGVDILRAYGPMRTEDEAERKKWDDRWNLIHREQNAWGEISERKAKGQYVRKAESKYEQRDLKEYAKNVWHLTDEQVKDRKNFDLKQGYHNLSARAMGRILPYLYQGIPYHDAVLFANLPTVFKVVHKKLDANGRPLTDKNGDFITELRTGPNGKPEPYVDDRWADMNEDQRERIRNGMREQVKGQRQYSVETILLNGLIRNYRDQFNDKGRRRDFWNGDWDQRLGLAIDEAFSNSQKQEMGDSGRAQLAASIKAAFLHHIESHDKVLFEKVASMEDRIKFWLIDTYPEYELAKTIDKRGLKRRVDQLYHHSAISMYRERDDRLGSPLTRGMKNPMVYRALHTLRKLVNDMISPDDPAKRLIDKKTVVHIEMARQLDSANKRRAWENYQAEMKTYNEEAEKELREHFEASGNPHNPTDDEIERMWLYQEARHLFGEAKCVYTGKPIGVNDLFNGSVEIEHTLPRGKTADNSMANKMLCDTRYNRDVKKVGLPGSLPNFSMPARAANRDCPAINDSTKPIYAKWMKYKREVEVLRNKSKSATTKEQKDKAIQKRWYAQFFRNYWRTKYEHLMADEIKPRFLNRQLVATAQITKLARSYMNSYFEKVVCYKPEALSAFRKEWMGESFVKEKDRSKHSHHAVDAAVCAAVDRSVFDALAQYYEVHDSTDPTASFDHPWTSFGTDMHKLRDGALIYHVDKASIGRRSTFNTKMKLKDGTWKEVKATGDTVRGSLHEDTFYGRIKHKKVETKSYELQTVIRKSLLGVTQFPFTEADKANVVDPAIKALLADKDLDEIKKNGGFDMNTKNGDAFTIQKMKKVRVMIQSRVKNPVGIKAHRDQLPGFEHKHQLWVTGGGNPIAAVYADERGRPYGYVFSQLELAQYAKTAQCHTRASLPQLIPHTHPEHPEWQVIKLSGRPFIVHTGQKVVMYKSGPEEIMRDDAEDMNRRTYVIDELQVNGNNIRMLMTNVLDARDPKLIPKETESIWNPANPLKRLRFALSKLKCQFDGIDIDLSPLPTTV

SEQ ID NO: 4921 - protein, 917 aa, synthetic construct
  REGION 1..917: note = Synthetic
MSYVLGLDLGIASVGWSIVEPGKRIIDLGVRVFKKAETDKEGEPLNLIRRESRLSRRRLYRRAHRLNRLLNFLISSGLIHSKDEVLKNVYNENPWALRTLGLNSVLTNNQLARVIYHICKHRGFYWASSADDGEADKGKIKNSLSSNQKLMKEKCYKTVGQMIFSEYPNCQRNKSGEYSKSLPRTDLDIELREIFKAQQSFSNPIVTKDFISAILGSGDRKTGFLWEQRPALQGADLLKMVGHCRFEKDELRAPAANFYAEQLVWLTRINNLRVYDEDSQERPLTREERDLILNMPLEMKSDIKYSSLTSAFEKANLWKAGQFKYKSVDYEQKTQKKKKSAEPSDITKSSKKNPEDKVFYKSSHLHKIRKALGSSLSEEWEKIRTEVLSGKYERYNRIAYVLTVYKEDSDVIEQLSPYESRTLIEALLPVRFSGFVALSEKSLKKIIPHMFLGKRYDEACSEAHYKQNQSEGKKSKYLPHLFSGREPNGTLIFNEEIGDIPRNPVVLRVINQTRKVVNAIVKKYGSPESVHIELARDLAKSRAERNEIKKRNEEAASRRIKEREEFEKHYGAEKPNGTNLLKYRLYKEQDCKSMYSGKEIDHKRLFEKGYVQIDHILPYSRSYDDSQSNKVLVLTNENQDKGNRIPFEYFETKQQGFSWYEFEQWVKSCKNINQKKKRNLLRRTLSNDAKKDFLERNLNDTRYACRFVKNYIDRFLCLSENSDNSGCVVVAGQLTAYLRNCWGLNKVREENDRHHALDATVIACCTRKIVQKVGVWSKSREMNSYNSSYVDPDLPVDEDEMLLQKLYVNKRKPDFPKPWNCFRNEVESRVFESDLEKLKEELKQQCSYTESDLKNVRTLFVSRACEKIGKGALHGDTVYRQTSEMRKENVAVKKVSLKKLKYARIGAIVDAVSKKTI

SEQ ID NO: 4922 - protein, 640 aa, synthetic construct
  REGION 1..640: note = Synthetic
MSYVLGLDLGIASVGWSIVEPGKRIIDLGVRVFKKAETDKEGEPLNLIRRESRLSRRRLYRRAHRLNRLLNFLISSGLIHSKDEVLKNVYNENPWALRTLGLNSVLTNNQLARVIYHICKHRGFYWASSADDGEADKGKIKNSLSSNQKLMKEKCYKTVGQMIFSEYPNCQRNKSGEYSKSLPRTDLDIELREIFKAQQSFSNPIVTKDFISAILGSGDRKTGFLWEQRPALQGADLLKMVGHCRFEKDELRAPAANFYAEQLVWLTRINNLRVYDEDSQERPLTREERDLILNMPLEMKSDIKYSSLTSAFEKANLWKAGQFKYKSVDYEQKTQKKKKSAEPSDITKSSKKNPEDKVFYKSSHLHKIRKALGSSLSEEWEKIRTEVLSGKYERYNRIAYVLTVYKEDSDVIEQLSPYESRTLIEALLPVRFSGFVALSEKSLKKIIPHMFLGKRYDEACSEAHYKQNQSEGKKSKYLPHLFSGREPNGTLIFNEEIGDIPRNPVVLRVINQTRKVVNAIVKKYGSPESVHIELARDLAKSRAERNEIKKRNEEAASRRIKEREEFEKHYGAEKPNGTNLLKYRLYKEQDCKSMYSGKEIDHKRLFEKGYVQIDHILPYSRSYDDSQSNKVLVLTNENQE

SEQ ID NO: 4923 - protein, 1139 aa, synthetic construct
  REGION 1..1139: note = Synthetic
MSNNSIWGFDLGKKSIGACSRNGENIEFLQSYTFDLEYADPKEWRPSRKTAKRTRCSHKKREENLNKFWTELGWKIPNIQNQTLLIGLNARLQILHNNIVSTDQLYLALYSVIQHRGYDDNLPWLRKKTKKKNQEILEQEETKQNENKIEKKELTEAEKDELENKKKLQTFEKLFSDLNLNLHENYISEFEALKLGIWEGQNKKVLIPDKFVSKIRGLVVYPRQMIIKEAQTILEKASLKFTELKDKINYILWGNSLEAYKNKPHHLEGILGQKIPRFNNRIMSRCRLFERFNTCQAKDKLAIETKLLLILKNLRYQKNINEEPLLLNFDEFTILFEKCRKKLENKSENNQKITITELYEILVNEKIWFERPLGKQEKSKEKLKALFNLARIDKDGDLKIKTEGRFSLCRTACRLLKDYLLGGLNKTEFVENRLNNENWKKNFDTNLTESEIINAINRFGNSWESFSISDEREELLNLGTKQERHQFIEKLLGKINNYVVKNRLQIFYNLIRFMENKLGEPKEVLIEFVKNADSSFLPQKDAKSWEKFRNENQKENNIALKHLREAGIPKPSFKDIVAYKLLKEQHEKCLYSGEGIEIADWKDGHLEIDHIIPRSFSHCDAFYNLVLVKKSCNSDKGNKTPFEYLNFSSSGGKLSWEEYRNLISNNKKIKNKKRKLLLSQNKEGLSLIENWNGLAETAHIAKICQKILCIYFSWGMQVKDQDRKVFTTSGSQTAQLRNWYSLNEFLHEEKTEKPEAEKEAESKTEENTENKKKTNTKNRGNDKHHALDAFCLTLARLKNIQFEDERGLFREKSYKDGFPIDSTRKLIKQYLDNLIPLTLKTNKAKQFPEETIYSARLSKNNKKPEIPFYDIVVKKNLKEFLLGQIKEETENNKKRKQDEDQEQEEENKTKLPKISEAELKKRIEKIYHQDIKIILYEELRQNGLEAFIQKVLNQEIIHNRFKSPIKKVLTVTSKENTLKIRTDNNNKKRITLGEFADYSKEPEILEVENKKPKNIQLFKTKAHKGQLVYLEPKKNELVARIRPIYGFESLNEIKEELQAKGYELYSDRIFNTGCYLKIENDFAVGDKKFKAGIYKLRTMTTSGTVKLENLNGTELETTINTLVKAGFKRLELCGFELKV

SEQ ID NO: 4924 - protein, 1507 aa, synthetic construct
  REGION 1..1507: note = Synthetic
MKTILGLDLGPNSIGWAKVEVDDKGNYLRNIKLGSRIIPMDQGILGKFDSGVTESQTAIRTNFRGVRRLRERHLQRRERLHRVLHALKFLPKHYEDAIGWDRNEPAIYGKFINNSEPKLAWERQEDGSMHFLFMESFYEMMADFAKMQPSLVSGEKKIPLDWTIYYLRKKALTQQIKKEELAWILLNFNQKRGYYQLRGEEEEDNPTKRKEYYKLKVIGVEADGAPKAGKIWYNIHLENGWTARCQSKVPLDNWVGNIKEYVVTTEYEADGETPKYDKEGKIKRSFKSPEKGDWQLIKTRTEKFIESSNKTVGTFIYDHLLKEPFDKIRGKYIRTIERKYYKNELYKILCEQAKYHKELDSLDTLNACAKELYKNNQQHQEYLLKKDMKYLLLDDLIFYQRPLKSKKSLIADCPYEVYKYNYKQTGKKEQKKIKCIAKSNPYYQEFRLWQFISNIHLFNVTDGKDVTSEYLKTKEDYVRLFTYLNDRKEIKQETLLKGFLKLKKETIGSEKIYPIRWNYIEDANKSYPCNTTRHELLLAFDRAGIQRELLDVEGREYRLWHLLYSIESKDKTESALRRLKSNKAFSDLNIDDAFVNSFLKIKPFKKEYGAYSEKAIKKLLAVMRRGSLWKEADICEATKQNIAKILQNDIDEKLKKKIEAAVSSFNKLSDFQGLPTWLACYVVYGRHSEAAQIQCWQSPEDLKTYINKFKQHSLRNPIVEQCLLETLRTVYDIWKDAGQIDEIHIELGRNMKSTAEQRARKTNEFLRNENTNLRIKNLLMELKNDDKIENVRPYSPSQQEILRIYEEGALQELSKEDEMYEDISKISKMAQPSPTELSRYKLWLEQKYRSPYTGRVIPLSKLFTTAYQIEHIIPQSRYFDDSFNNKVICESEVNSLKDNMLGYEFIKECGGQKVHCTLLDGNVEIFTEEEYKTFVTKHYVGNPRKKDNLLLEDIPQEFSARQLNDSRYISKMVQTVLSNIVRTKDEQEAISKFVVSCNGMITDRLKKDWGLNDVWNTIVCPRFKRLNEITKTNAFGHWEDKAGKHVFQTIVPLELQRGFSKKRIDHRHHAMDALVIACASRNIVNYLNNESANSPEKREDLRKKLCDEKRKIRKPWKTFTQDTREALSDVVVSFKNYVRVINKATNYYEHYSSSGNKVMISQKGNDMWAIRKPLHKESFFGHVNLRRKATVSLKKALENIPAICDKTLRDYINALVEKHFNTRQLLAHFKSINYRLNRKRVDKVEVWQFSDEKIEMVARRKPLDTSFDAKQISFITDTGIQKILLNYLQSKEGNAEIAFTPEGIEEMNKNISIYNDGKAHQPILNVRVATPKGMKYPVGQTGNKATKFVVAEKGTNLYFAIYENELGERSYDTIPLDIVIKRLKEGQSPVPQINKVGIPLKFYLSPNDLVYVPTKENEDELCRDRIYKFVDSSGTTANFVPHTSANTIYNVDKEYAKKYCNGAVILNEYGLGSPQSKNQKDLDGEMIKEICWKLKVDRLGNIIKVIK

SEQ ID NO: 4925 - protein, 1505 aa, synthetic construct
  REGION 1..1505: note = Synthetic
MKTILGLDLGTNSIGWAKVSIDDDGNYLHDIKLGSRIIPMSQDALGNFDKGVTESQTAIRTGFRGVRRIRERSLQRRERLHRVLHVMGFLPPHYDSAIGWNREEAITYGKFLNHGEPKLAWERQADGSMRFLFMDSFHEMMADFERYQPALVADGRKIPLDWTLYYLRKKALTQAIRKEELAWILLNFNQKRGYYQLRGEEEEEDPTKREEFYELKVTGVEATDERKGDEVWYNVRLENGWIYRRSSKISLDDWVGKTRQFIVTTEYEKDGTTPKKDKAGEVKRSFRAPKEDDWGLRKKRTESQLEASGKTVGTFIYDHLLAEPADKIRGNFIRTIERKYYKAELEAILREQCKYHEELRSKEILAACARELYQNNQPHRDSLLKKDMVYLLLTDLIFYQRPLKSKKSLIADCPYEHYQYVDKETGEIRQQGIKCIAKSNPYYQEFRLWQFILNLRLYDRTDDKEVTAEYLQSREDYARLFVYLNDRKEINQETLLKDFFGLKKVKAPGAEKEFPIRWNYIEDKEKKYPCNETRYELLMALDRASLEHSWLDDGERQYRLWHLLYSVETKDEVERALQKLCADTNKKEKGKEIEAAKRVVVNDENVFVSAFLKVKPFKKDYGAYSEKAVKKLLAVMRMGSLWHEANICEETRGRIVSILQGDMDEKIKERMSHAAYSFGQLSDFQGLPEWLACYVVYGRHSEATEIQRWETPESLMAYINGFKQHSLRNPIVEQCVLETLRTVHDIWKESGRIDEIHVELGRSMKSTADQRARMTQNIQKNENTNLRIKSLLMELKNDADIKDVRPYSPMQQEILRIYEEGALQELTKDDKDFTEISKISKMAQPSASELLRYKLWLEQKYRSPYTGKPISLSKLFTSAYQIEHVIPQSRYFDDSFNNKVICEAEVNTKKSNMLGYEFIKNHGGEIVHCTMLGDVKILSENEYKAFVLDHYANNRAKKDKLLMEDIPQEFLNRQMNDSRYISKVVMALLSNIVRTEEEMETTSKFVIPCTGGITDRLKKDWGLNDVWNHIVYPRFERLNDLTQSEVFGHWENKEGKRVFQTSLPLKLQVGFSKKRIDHRHHAMDALVIACASRNIINYLNNESANSLDKREDLRRQLCDKNRIIRKPWDTFTQDACAALENVIVSFKSYVRVINKATNYYERYDAEGKKIMAEQQSKEMWAVRKPMHKETVFGHVNLRRKETVKLKDALENIPSICNKDLRDYINSLVEKHFNTKQLLAHFKSIGYHWNKQHVDKVEVWQFSDEKEKMVATRKTLDISFDAKRIASITDTGIQKILLTYLETKGGNPTVAFTPEGITELNQHIADYNGGKKHQPILKVRVSEPMGAKYPVGQIGNKADKFVEAQKGTNLYFAIYEDEEGKRTYKTMPLNEVIERLKQELPPVPEKNEEGVPLKFYISPNDLVYVPSEDEMITKECRLNKERIYKMVSSTGNQCHFLPCYIAKPIYDKFEFEAMNKIGRALSGEMIKTVCWKMEVDRLGNILRIIK

SEQ ID NO: 4926 - protein, 1497 aa, synthetic construct
  REGION 1..1497: note = Synthetic
MKTILGLDLGTNSIGWAKVSVDDHGNYLHDIKLGSRIIPMSQDILGNFDKGVTESQTAIRTGFRSVRRIRERSLLRRERLHRVLHVMGFLPPHYDSAIGWNREEASTYGKFLNHGEPKLAWERLEDGSMRFLFMDSFHEMMANFARHQPALVADGRKIPLDWTLYFLRKKALSQAVGKEELAWILLNFNQKRGYYQLRGEEEEENPTKREEYYELKVVSIEVAEEGKGGNTWYRVQLENGWIYPCPSKIALDDWVGKIKQFIVTTEYEKDGTTLKKDKDGEVKRSFRAPDENDWGLRKKRTESQLEDSGKTVGAFIYDHLLAEPVDKIRGNFIRTIERKYYKQELEAILREQSKHHEELQSREMLAKCAEELYQSNQPHRDSLMKKDMVYLLLTDLIFYQRPLKSKKSLIAECPYEYYKYKDKEKGKKKRQGIKCVAKSNPYYQEFRLWQFIVNLRLFDRTDDKEVTAEYLRSREDYARLFAYLNDRKEINQETLLKDFFGLKKVKIGAEKEFAIRWNYIEDKEKKYPCNETRHELLLALDRAGMDRSWLDDSELQYRLWHLLYSVEARDEAEGALHKLRDDDEFAGAFLKVKPFKKDYGAYSEKAVKKLLAVMRMGSWWHEEDICKQTRDRIERIVQGDIEEKIRERMGHAAYSFSHLADFQGLPEWLACYVVYGRHSEATHILRWDSPDKLLSYIKGFRQHSLRNPIVEQCILETLRTVHDIWKEAGHIDEIHVELGRRMKSTAEQRAHMTKNILRNENTNLRIKCLLMELKNDADVKDVRPYSPMQQEILRIYEEGALQQLTKDDTEYAEISKISKMAQPSAKELLRYKLWLEQKYRSPYTGKSISLSKLFTSAYQIEHVIPQSRYFDDSFNNKVICESEVNTLKSNMLGYEFIKNHGGEIVHCTMLGDVKVFSESEYKTFVTEHYSNNKYKKEKLLLEDIPQEFLNRQMNDSRYISKVVKGLLSNVVRTEDELEATSKFVVSCTGGITDRLKKDWGLNDVWNSIVYSRFERLNRLTKSENFGHWENKEGKRVFQTSVPMELLPGFNKKRIDHRHHAMDALVIACASRNIINYLNNEFAKSPKQREDLRQLLCEKNRIIRKPWETFTQDARAALEDVVVSFKNYVRVINKATNYYERYDADSKKTMVPQKGNEMWAVRKPMHKETVFGHVNLRRKAVVKLKEALENISSICNKELRDYINVLVDKQFNTKQLLAHFKSTDYRWNKQYIDKVEVWRFSDEKEPMVATRKLLDTSFDKKRIDAITDTGIQKILLNYLEAKGGDPAITFTPEGIAEMNQNIAVYNDGKKHQPILKVRVAETMGEKYQVGETGNKADKYVEAQKGTNLYFAIYEDEEGKRSYDTIPLNEVTERLKQGLSPVPEKNEKEVPLKCYLSPNDLVYVPREENGNELDKERIYKFVDSSGTTANFIPHRSAGLIYNVDKKIAESFCNGTIIQNEYGVGSPQSKNQKSLTGEMIKAVCWKLDVDRLGNILRVIK

SEQ ID NO: 4927 - protein, 1497 aa, synthetic construct
  REGION 1..1497: note = Synthetic
MKTILGLDLGTNSIGWAKVCIDDNGNYLRDIKLGSRIIPMSQDVLGNFDKGVTESQTSVRTGYRGIRRLRERSLLRRERLHRVLHVLGYLPPHYDCSIGWNRNEPSTYGKYLNHSEPKLAWERQEDGSMRFIFMDSFHEMMADFAKRQPSLVSDGKRIPLDWTIYYLRKKALSQAIRKDELAWILLNFNQKRGYYQLRGEEDDTNSAKCEEYYELKVISVEADEEGKGGNTWYNVKLENGWIYRRQSKISLSDWVGKTREFIVTTEYEKDGVTLKRNKDGEIKRSFRSPSEDDWGLRKKRTEERLESSKMTVGAFVYEHLLSEPSDKIRGKFIRTIERKYYKEELYAILREQSKYHEELHSEGALKKCAEELYKNNQPHRDSLLKKDLIYLLLDDLIFYQRPLKTKKSLISECPYEAYSYVDKETGEIKRQGIKCIAKSNPYYQEFRLWQFISNLRFFDKVDDKDVTADYLSTRDDYVRLFAYLNDRKDINQETLLKDFLKLKKVIINSEKEFSVRWNYIEDKEKRYPCNETRHELLLALDRAGIDRSWLDEEGREYRLWHLLYSVESKEETEGALRKLKNDDEFIKSFLKIKPFKKEYGAYSEKAIKKLLAVMRIGSLWSEADICRATRENITKILKGDIDDKLKEKISSCLSSYNQVSDFQGLPVWLACYVVYGRHSEAAEIQHWRTPKDLLVYINGFKQHSLRNPIVEQCILETLRAVHDIWKEAGHIDEIHVELGRNMKSTADQRARMSGNILRNENTNLRIKSLLLELKNDPDIKDIRPYSPMQQEKLRIYEEGALQELTKDDKDFAEIIKISTMAQPSAKELLRYKLWLDQKYCSPYTGRSISLAKLFTSAYQIEHVIPQSRYFDDSFNNKVICESEVNGLKDNMLGYEFIKECGGEIVHCTMLGDVKILSENEYKDFVNDHYAHNRRKRENLLLEDIPQEFLNRQMNDSRYISKVVKALLSNIVRAEGEEEATSKFVVSCSGGITDRLKKDWGLNDVWNKIVYPRFERLNKLTGTDSFGQWENKEGKKVFQTSVPLELQRGFNKKRIDHRHHAMDALVIACTSRSIVNYLNNESADNPKKREDLRQKLCDKNRIIRKPWDTFTQDATAALEDVVVSFKNYVRVINKATNYYEKYDKNGKKGIAEQKGQEMWAIRKPMHKETVFGHVNLRRKVTVKLKDALEDIPSICDKTLRDYVNGLVKKDFKTKHLIAHFKSLNYRLNRQHIEKVEVWQFSDKKEQLVATRKPLDTSFDNKHIDSITDTGIQKILKNYLHAKGGDPNIAFTPEGIVELNQNISLYNDGKLHQPILKVRVFEPKGAKYCVGQNGNKSAKYVEAQKGTNLYFAIYEDEEGKRSYETIPLNEVVERLKQGLSPVPEKNKAQVPLKFYLSPNDLVYVPDTGDVNEIKKEQIYKFVDSSGTTANFIPHRASDLIYNVDKKFATSFCNREVIQNEYGVGSPQSKNQKAITGEMVKAICWKLVVDRLGNIIKIIK

SEQ ID NO: 4928 - protein, 1496 aa, synthetic construct
  REGION 1..1496: note = Synthetic
MKTILGLDLGSNSIGWAKVCVDDQGNYLHDIKLGSRIIPMSQDILGNFDKGVTVSQTAVRTGFRSMRRIRERTLQRRERLHRVLHTMGFLPAHYDAAIGWDRKEPETYGKFLHHGEPKLAWERQEDGSTRFLFIESFQEMLADFARRQPGLVADGRKIPADWTLYYLRKKALTQAVRKEELAWILLSFNQKRGYFQLRGEDEEGNPTKREEYHELKVVDVEVGENGRNDGRWYRVKLENGWSFHRQSKTDLKEWIGKTKQLIVTTEYEKDGVTPKKDKDGQVKRSFRAPGEDDWGLRKKLTERRLEKSGKTVGAFIYDHLLEEPADKVRGNFIRTIERKYYKNELEAILHEQCRHHKELQSREMLERCAEELYRNNGTHRDSLLRKDMIYLLLTDLIFYQRPLKSKKSLIADCPYEYYEYEDKKSGKKERKGIKCIAKSNPYYQEFRLWQFVLNLRLYDRTDDREVTAEYLPTKEAYVRLFVYLNNRKEINQDTLLKDYFKLKKVKCGNEKEFAIRWNYIEDKEKKYPCNETRHELLAALDRAGMEHGWLDDSGRQYRLWHLLYSVEAKDEAEGALRRLKDDDKFVSEFLKIKPFRKEYGAYSEKAVKKLLAVMRTGSLWREDQICTATKERISRIIEGDIEEEIKVRMGHTACPFRSVTDFQGLPEWLACYVVYGRHSETTDIQRWKKPEDLMAYIRKFRQHSLRNPIVEQCVLETLRTVHDIWKEAGQIDEIHVELGRNMKSTAEQRRNMTEKVLRNENTNLRIRRLLMELKDEADIREVRPYSPMQQEILRIYEEGALQELTKEDSEYAEIARISKTAQPSAKELLKYRLWLDQKYCSPYTGKPISLSKLFTPAYQIEHIIPQSRYFDDSFSNKVICESEVNALKSNRLGYEFIKEHGGEIVACTMLGNVRVLNEQEYKTFITGHYANNRRKRENLLREDIPMEFANRQMNDSRYISKVVKGLLSNIVRTAEEREETSKFVISCTGRITDRLKQDWGLNDVWNSLVYTRFKRLNELTETEAFGHWQDKDRRVFQTSVPLELQRGFSKKRIDHRHHAMDALVIACASRNIIGYLNNESAESPEKREDLRRKLCDKNRIIRKPWESFTQDARAALEDIVVSFKNYVRIINKATNYYERYDADGRKTKAEQKGGEMWAVRKPMHEATYYGKVNLRRKERVSLKAALEDIPSICNRDLRDDINGLVEKHYNKEQVLAHFRSVGNRWNKQHIDKVDVWRFSDGKEEMVATRKPLDTSFDAKRIEAVTDTGIQRILSNYLEAKGGDPKIAFTPEGIADMNQHITAYNNGKQHKPILKVRVSTKLGKKYPVGQTGCKAGQFVVAEAGTNLYFAVYEDGEGNRSYDTIPLNEAVECLKQGLPPVPETREKGDRLKFYLSPNDLVYVPAGDEENEIDRERIYKFVDSSGTTANFIPHRTAGLIYNVDKKLAEALCNGSIIQNEYGVGSQQSKNQRALTREMVKAVCWKLEVDRLGNILRIIK

SEQ ID NO: 4929 - protein, 1494 aa, synthetic construct
  REGION 1..1494: note = Synthetic
MKTILGLDLGTNSIGWAKVCVDDNGNYTREIKLGSRIIPMSQDTLSNFDKGVTDSPAAARTGFRGIRRIRERALQRRERLHRVLHVMGFLPPHYENAIGWYREEATTYGKFLDNAEPKLAWEKQEDGSMRFLFMDSFYEMMADFANHQPGIVADGRKIPLDWTLYYLRKKALTQAVRKEELAWILLNFNQKRGYYQLRGEEDEENPTKREEYYELKVVGIEAAEEGKGGNTWYNITLENGWIYRRQSKIELNDWIGKVRPFIVTTEYEIDGVTIKKDKNGEVKRSFRAPSEDDWGLRKKQTESLLEESGKTVGTFIYDHILSEPADKIRGNFVRTIERKFYKKELEAILREQSKHHKELKDIDTLIACIKELYPNNKPHQDSLMKKDMAYLLITDLIFYQRPLKSKKSLIADCPYEYYKYVIKETGEIKRQGIKCIAKSNPYYQEFRLWQFIINLRLFDRTNDKEVTSEYLSSMEDYTRLFTYLNDRKDINQETLLKDFCKQKKVKIGMEKEFPIRWNYIEDKEKKYPCNETRHELLAALDKAGIDHSWLDDKEQYYRLWHLLYSVESKEEAEGALRKLNDNDDFVNAFLKIKPFKKEYGAYSEKAIKKLLAVMRMGDLWDETDICEQTRDRIQNIIKGHIDEKIKDRMGRTFCQISDFQGLPEWLACYVVYDRHSEATDIQRWTKPENLMAYINGFKQHSLRNPIAEQCILETLRTVHDIWKEAGHIDEIHIELGRSMKSTADQRARMAKSIMQNENTNLRIKSLLMELKNAKEFENVRPYSPMQQEILRIYEEGALQELTKEDAQYTEISKISQMAQPSANELLKYRLWLEQKYCSPYTGKPISLSKLFTSAYQIEHIIPQSRYFDDSFTNKVICEAEVNQLKSNMLGYEFIKKHGGEIVHCTMIGDVKIYDTKEYSNFVTEHYANNRRKKEKLLMEDIPQEFLNRQMNDSRYISKKVMAILSNIVREEDEKEAKSKFVIACSGGITNRLKQDWGLNDIWNSIVYPRFERLNKLTNTENFGRWENKEGKQVFQTSLPLELQRGFSKKRIDHRHHAMDALVIACASNNIINYLNNESAKSQEKREDLRKKLCDKNRIIRKPWETFTQDAHTALEDVVVSFKNYVRVINKATNYYEKYDKNGKKGIAEQKGQDMWAIRKPMHKETVFGQVNLRRRVTVNLKDALEKIPAICDKELRDYINKLVTKQFNKKQILAHFKSINYRLKMKYVNKVDVWQYSDEKEPMVATRKPIDTSFDAKRIATITDTGIQKILRNYLEAKDNNPNIAFTPEGIAEMNKHITEYNNGKRHQPILKVRVSEPKGAKYQVGETGNKTSKFVEAQKGTNLYFAIYEDKEGNRSYNTIPLNEVIERLKQGLSPVPDANEKGIPLKFHLSPNDLVYVPKTDEENEIKKGQIYKFVDSSGTTANFIPHRVSNLIYNVDKKIAEKFCNHEVIQNEYGIGSPQSKNQKSITGEMIKSVCWKLEVDRLGNIHKIIK

SEQ ID NO: 4930 - protein, 1493 aa, synthetic construct
  REGION 1..1493: note = Synthetic
MKRILGLDLGTNSIGWAYLVFDDNGNLIEKIRLGSRIIPMSQDVMGKFESGISVSQTAERTQYRSTRHLRERSLQRRERLFRVLHMMGFLPQHFDQSIGWDKNDNKTYGKFLDESEPKLAWRRNKDGKMEFLFMDSFHEMIADFMAHDSSWTPDQKVPLDWTIYYLRSKALRAPISKEELAWIILNFNQKRGYYQLRGEEEEEDKTKRVEFLEARVVRVEATDRKKGKSTWYNVYLDNGMIDRRTSAISLENWVGQTRQFIVTTEYEADGVTLKLDKEGNVKRSFRIPKDDDWTLRKKRTEHDIEESGLHVGTFIYQALRDRPKVKIRGNFVHTIERKFYKQELRAILTKQTEFIPELQDQALLQDCIANLYPSNEAQRQKLQSKDFIYLFLDDIIFYQRPLKSKKNLISNCSLEKRISIDHSTGECIDRPIKCIARSNPYYQEFRLWQFITNIRLFDRDSQEDVTSRYLSTSEEWERLYAFLYNRKEINQDTLFKEFFGWKKPKGRNSVYPIHWNYAEDKEKTYPCNETRATLLTTFEKAEMNTAELNTREGEMQWWHLLYSVTDKLELEQALRKRGLSQEQIRVFTRIKPFEKDYGAFSEKAIKRFLTLLRKGSFWNADAIDTTTRARIDNIIAGNIDEKLRDKMQHKSYPLQKLEDFQGLPVWLASYIIYGRHSEVSEIVRWETLQDLQNYIHNFKQHSLRNPIVEQVVLETLRTVYDIWKKFGDIDEIHLEMGREMKKTAKQRQDDSQRIQRNENTKLRIKALLMELKNDATISDVRPYSPSQQDILRIYEEGALATLEKSDQDYDEIIKISQKSQPSASEMKRYKLWLEQKYQSPYTGRFISLTKLFTPAYEIEHVIPQKRFFDDSFSNKVICEAEINKAKSSMLAHEFITKRGGEIIHSQSLGDLRVLKVDDYESLVKHIYKDNATKRRKLLLDDIPTEFIQRQLNDSRYIARFIQSVLSNLVREEGEEEAKSKHVIVCTGGITDRLKKDWGLQDVWNHLVSPRYQRLNKLTNSEDFGHWENKDGKRVFQTSMPIELQKGYSKKRIDHRHHAMDALVIACASHNIINYLNNENAASPQSREDLRKQLCDKGRTLRKPWKTFTQDVEQALHGVVVSFKNYVRIINKATNFYQHYEQGKKKYIPQKGETLWAIRKPMHKGMPFGRVNLRYPLMVSLAYALERPQNIVDKALREYILHLIAQNFDTKQLKKHFKTLGNKFENRDISKVEIWVMSDDREPLVASRKPLNENFDKESIAKITDTGIQKILLNFLKYKGDDPKVAFSPEGIIELNANIAKFNDGKSHQPIKKVRIFELLGNKYPVGQRGNRKTKFVEAQSGTNLYFAIFEDGEGKRSYETIQLIEVVERLKQGLSPVPDSNDKNISLKFFLSPNDLVYVPNEEEIGSNMKVEDLQRERIYKFIDSSNTTANFIPHRIATTLLNVKTPINNIQNELGLGSPQSKHQRALTGEIIKSVCWKLEVDRLGNITKIIR

SEQ ID NO: 4931 - protein, 1486 aa, synthetic construct
  REGION 1..1486: note = Synthetic
MKTILGLDLGTNSIGWAVVFVDDEGKFVQKIKLGSRIIPMSQDVLGKFDSGVTESQTAVRTGFRGVRRIRERNLQRRERLHRVLHTLGFLPKHYDSAIGWDRNRPTTYGKFLDHAEPKLAWEQQEDGSMRFLFMDSFCEMMADFARCQPHLIANGRRVPLDWTIYYLRKKALTQAITKEELAWILLNFNQKRGYYQLRGEEDEENPTKKEEYYELKVVSVEADENNKGKDTWYNVHLENGWIYRRSSKISLDNWVGKTKQFIVTTEYEKDGITLKTDKEGNVKRSFRAPKEDDWGLLKKQTEGQLEKSGKTVGAFIYDHILDNPSDKIRGKFVRTIERRYYKDELRAILTAQSKYHEELRDGTMLAACAEELYKGNLPHQQSLLKKDMSYLLLDDLLFYQRPLKSKKSLIADCPYEYYEYVDKESGEIKRQTIKCIAKSNPYFQEFRLWQFIINLRLFDRTDDKEVTEEYLPSKEAYARLFAYLNDRNDINQETLLKDFFKLKKEKMGNDKVYPIRWNYIEDTSKKYPCNETRHELLVALQRAGIDKEWLADKRLEYRLWHLLYSVEAKSEAETALQKLKDDEAFVNSFLKVKPFKKEYGAYSEKAIKKLLAVMRMGNDWNEDNICVDTRKRIEDIINGDIDEKIRSRMGQGMRSFESVSDFQGLPEWLACYVVYGRHSEATEIQRWETPEELLNYVRFGFKQHSLHNPIVEQCILESLRTVHDIWKEVGHIDEVHIELGREMKSTSAQRASRTQAILKNENTNLRIKSLLMELKNDAGIENVRPFSPMQQEILRIYEEGALLELTKEDKQFDEISKISQMAQPTANELTKYKLWLEQKYRSPYTGKQISLAKLFTSAYQIEHIIPQSRYFDDSFSNKVICESEVNLLKSNMLGYEFIKNHGGEIVHCTMLGDVKVFNEDEYKAFVTEHYSAQEAKRKKKNLLLEDIPDEFLNRQMNDSRYISKVVRTLLSNIVRTEDEMESTSKFVISCTGGITDRLKKDWGLNDVWNSIVYKRFERLNQITDTEAFGHWENKDGKRVFQTSVPLELQRGFNKKRIDHRHHAMDALVIACASRNIINYLNNESANSPEKREDLRRKLCDKNRIIRKPWETFTQDVRKALEDVVVSFKNYVRVINKATNYYEKYDESGKKIICKQKGEDMWAIRKPMHKDTVFGRVNLRRKETVVLSKALDNISSICNKELRKYINGLIAKNFNKKQLLAHFKSLNYRWNRQYVSKIDVWVNSDEKEPMVATRKPLDISFDKKRIESITDTGIQKILLNYLASKGDDPAMAFTPEGIAEMNKNISLYNNGKYHQPIMKVRLSEPLGAKFPIGQTGNKKEKYVEAQKGTNLYFAIYENDKGERSYNTVPLNEVAERLKQGLSPVPEVDDQGVPLKFYLSPNDLVYVPSEEEVALNECRMDKSRIYKVVSGTGKDCFFLPNRISKPIFEKVEFEAKNKLGRALSGEMIKTVCWKLEIDRLGNIRKIIK

SEQ ID NO: 4932 - protein, 1485 aa, synthetic construct
  REGION 1..1485: note = Synthetic
MKNILGLDLGTNSIGWAVVSKSDDGKYTQDIKLGSRIIPMSQDVLGKFDSGVTESQTAVRTSYRGMRRLRERCLLRRERLHRVLHVMNFLPEHYDNALGWNKNQNSTYGKFLNHGEPKLAWRKDETGKMQFLFMDSFNEMLADFAKHQPGLLAGDKKIPLDWTLYYLRKKALTQPISKQELAWIILNFNQKRGYYQLRGEEEEQEKKNKLEEYYKLKVVKVEATDEQRGDSRWYNIHLENGWIYRRASKMFLDEWVGKEREFIVTTDIDENGNPKLDKEGNVKRSFRAPGADDWALQKKRTENSIDSSHVTVGEYIYDNLLKNPSEKVRGKLVRTVERKFYKEELKRIISKQTEFIPELRDKALLEDCIRELYARNIPHQDSLKKKDFVYLIVDDLLFYQRPLKSKKSLISDCPYESYPYVDKSTGEIKTQHIKVVAKSNPYFQEFRLWQFIQNLRLLDRESLNEDDVTAKYLQTPEDYTKLYQFLNDRKAITQEQLLKDFFGLKKPKGKDTKYSLRWNYVEDKEYPCNETRYLILSALKKAEIEPSFLTREMEQRLWHLLYSVEDKNELIHALEKLQKELELPNSFVEELKKIPSFKKEYGAYSEKAVKKLLSVMRMGTCWSEDGIPASVKERISTIIKGEAQDVALEKAANQHISLAELKDFQGLPVWLACYVVYGRHSESSEITRWETPEDLMIFIRNFKQYSMRNPIVEQCVLESLRTVHDIWVKYGHIDEIHLELGRNMKSTAEERARISERNLANENTNQRIKYLLMELKNDGNISDVRPYSPMQQEILRIYEEGALTELSREDPDFAEISRISKLAQPTSSELTKYKLWLEQRYRSPYTGKPIPLSRLFTPAYQIEHVIPQSRFFNDSLVNKVICEAEVNGLKSNMLGLEFIKAHGGEVVHCPTLGNVTVFTEEQYTKFVKDHYSANRAKLKNLMMEDIPEEFIQRQMNDSRYISRVVKQLLSNVVREENEAEATSKNLIPCTGGITDRLKQDWGLNDIWNKIVSPRFQRMNDLTQSDAFGHWEDKDGKKVFQTTMPLELQRGFSKKRIDHRHHAMDALVIALASRNIVNYLNNESANDEKLRHDLKRLLCGKGGVILKPWETFTQDAYKALQDIVVSFKHYIRVINKASNYYEHYDENGKKVTVAQKGESMWAIRKPLHKETVFAHVNLRRVKAIPFNKALENPSTIVNKDLKHLIKTLMEDGMDKKKVLNFFKKEDGLKFHGQDISKVEVYYFTDDVEKMVAVRKPLDDSFDAKKIQSITDTGIQKILLNYLATKYNDPKVAFSPEGIMEMNEHIEEFNGGKPHQPILKVRVSETLGEKYPVGYGSNKDKKFVEAQSGTNLYFAIYENKAGDRNYQTIPLNIVAERMKQNLPPVPGVNENDKLKFFLSPNDLVYVPEESEQNAGIDELYKERIYKFVSSTKTQAFFIPSNVASVLMNKVEFQSLNKAERAIDGQMIKAVCWKLEVDRLGNIVKIIK

SEQ ID NO: 4933 - protein, 1485 aa, synthetic construct
  REGION 1..1485: note = Synthetic
MKNILGLDLGTNSIGWAKISIDDNGKYIKDSIKLGSRIIPMSQDVLSNFSKGVTLSQTSERTSFRGARRLRERTLLRRERLHRILHLLGFLPKHYEKAIGWDRNDNKTYGKFINHAEPKLAWCKDNNGKMRFLFMDSFHDMLSEFSEKHPELLANGKKIPLDWTIYYLRKKALYKAITKEELAWILLNFNQKRGYYQLRGEEDRDSEANKKEYLELKVIGVEATGEKKGNDIWYNIHLENGWIYRRSSKNPLNDWLGKVKSFIVTTDLDADGNPKKDKDGNIKRSFRAPSEGDWTLIKKRTESLLENSGQTVGQFIYNHILEEPSAKIRGNFIRTIERKYYKDELKAILEKQKEFHHELSSESLLTECAKELYKRNIAHQEVLLKKGIIHLLLNDILFYQRPLKIKKSLIDNCPYENYKYVDKKSGDIKVKSIKCIAKSNPFFQEFRLWQFVSNLRLYRKSDDKDVTSEHLVTTDDYANLFTYLNNRKDIKQSVLLKEYFKIKKVKTINGAEYPVRWNYIDDDNKTYPCNETRYDILHALSKTELKSEWLTPERTYRLWHLLYSIESKEETKKALNKLNLSDDFTEAFLTIKPFKKEYGSYSEKAIKKLLSLMRMGYLWSEDEAIKQVGAEIEKTIEGELPDYVLQRLEKSQHNYNKISDFSGLPLWLASYIIYGRHSEAKEIIHWDNPESMMAYIKDFRQHSMRNPIVEQCVLETLRTVHDIWKEIGHIDEIHIELGREMKSTSEQRKAITQNVLHNQNTNIRIKLLLQELKNDNNITGVRPYSPMQQEILRIYEEGALQGLTKEDKDYNDILKISQTAQPTSNELTRYKLWLEQKYRSPYTGKAISLSKLFTSAYQIEHVIPQSRYFDDSLSNKVICESEVNTLKKAMLGMEFIKTCGGQKVHCTLLGDVEIYNEEDYKAFVNEHYSNNRTKRNKLLMEDIPQEFINRQLNDSRYISKMVKQLLSAIVRGQEEVEATSKFVIPCTGGITDRLKKDWGLNDIWNNLVSPRFQRMNALTGSEYFGHWENKEGKRVFQTTMPIQLQQGFSKKRIDHRHHAMDALVIACASRNIISYLNNETAQDTERRRDLRQKLCDKGGSVRKPWDSFTQDTQYALKDIIVTFKNYVRIINKATNYYEHYKTDGKKGMISQKGDELWAIRKPMHKETVFGKVNLRRPKRVSLSKAIDSVDIICNRKLKKYIKARLNEGLQKKQILNIFKELNNVWEGIDVNKIDIWEMSNDKEPMVATRKQLDTSFDEKKIRSISDTGIQKILLNYLITKNNNPELAFTPEGIQEMNSNISEYNDHKKHQPIYKVRVTEPLGAKYPIGTMGNNPKKFVEAQAGTNLYFAIYEDKEGKRNYDTIPLNIAAERLNQQLSPVPETNENNTPLKFYLSPNDLVYVPSEEERHSGNNIQLDKNRIYKMVSSTSKRCFFIHHRVAISLVDKKEFSAQNKMERSIDNEQVMIKSVCWKLITDRLGNIIKVIK

SEQ ID NO: 4934 - protein, 1483 aa, synthetic construct
  REGION 1..1483: note = Synthetic
MKTILGLDLGTNSIGWAKVSVDDNGNYLHDIKLGSRIIPMSQDTLGNFDKGVTESQTKIRTSFRGVRRIRERSLLRRERLHRVLHVMGFLPPHYDSAIGWNKEAPITYGKFLYHGEPKLAWERQEDGSMRFLFMDSFHAMMVDFAHHQPALVADGRKIPLDWTLYYLRKKALTQPIRKEELAWILLNFNQKRGYYQLRGEEEEENPTKREEYYELKVVSVEAAEEGKGGNTWYNVKLENGWIYHRPSKIDLSDWVGKIKQFVVTTEYEKDGITLKKDKDGEVKRSFRAPGEDDWGLRKKRTESQLEASGKTVGAFIYDHLLAEPTDKIRGNFIRTIERKYYKQELEAILREQSKYHEELQCKKMLEKCAEELYRSNQPHRDSLLKKDMVYLLLTDLIFYQRPLKSKKSLIADCPYEHYEYVDKETGEIKRQGIKCIAKSNPYYQEFRLWQFVLNLRLYDRTDDKEVTAEYLPSKEDYARLFIYLNNRKDITQETLLKDFFNLKKVKRGSEKEFPVRWNYIEDKEKKYPCNETRHELLMALDRAGMERSWLDDTARQYRLWHLLYSVEVKDEAEGALRKLKDDKEFVSAFLKVKPFKKDYGAYSEKAVKKLLAVMRMGSCWHEDDICKETKKRIEHILQGDVEEKIRERMNHTAYSLGELSDFQGLPEWLACYVVYGRHSEATEIKHWKTPENLMAYIKGFKQHSLRNPIVEQCILETLRTVHNIWKEAGRIDEIHVELGRSMKSTSDQRARMTENILRNENTNLRIKNLLMELKNDTDIKDVRPSSPMQQEILRIYEEGALQELTKEDNDYEEISKISKMSQPSAKELLKYKLWLEQKYRSPYTGKPISLSKLFTSAYQIEHIIPQSRYFDDSFNNKVICESEVNALKSNMLGYEFIKNHGGEIVHCTLLGDVKVLSESEYKAFVTDHYANNKYKKEKLLMEDIPQDFLNRQLNDSRYISKVVRTLLSNIVRTEDEMEATSKFVVSCTGGITDRLKKDWGLNDVWNSIVYSRFERLNELTKSDAFGRWENKEGKRVFQTSVPLELQRGFNKKRIDHRHHAMDALVIACASRNIINYLNNESANSPKKREDLRQQLCDKNRIIRKPWESFTQDTRAALEDVVVSFKNYVRVINKATNYYERYDTDGKKTMAKQKNKEMWAVRKPMHKETVFGHVNLRRKAFIKLKDALENIPFICNKELRDYINGLVERNFNTKQLLAHFRSTDYRWNKQNVDKVEVWRFSDEKEPLVATRKPLDTSFDTKRIGSITDTGIQKILLNYLEAKGGDPAIAFTPEGIAEMNQNIALYNDGKMHQPILKVRISEPMGTKFQVGQTGNKADKFVEAQKGTNLYFAIYEDEDGTRTYNTIPLNEVAERLKQGLSPVPEKNEKDVSLKFYLSPNDLVYVPTEEEKLMKECRLNKERIYKMASSTGKECYFLPYSVVKPLYDKVEFESMNKMGRALTGEMIKAVCWKLEVDRLGNIIRVIK

SEQ ID NO: 4935 - protein, 1483 aa, synthetic construct
  REGION 1..1483: note = Synthetic
MKTILGLDLGTNSIGWAKVSVDDYGNYLHDIKLGSRIIPMSQDVLGNFDSGVTVSQTAQRTEFRSKRRLVQRNLQRRERLHRVLHVLDFLPAHYDAAIGWDRTEAVTYGKFLNHAEPKLAWEELGNGKRRFLFMDSFHEMVADFARCQPALVADGKKIPLDWTIYYLRKKALTQAITKEELAWILLNFNQKRGYYQLRGEEEEENPTKQEEYYELKVVSVEATDSRKGNDTWYNVHLENGWIYRRSSKISLDDWVGKVKQFIVTTEYEKDGTTLKTDKEGNVKRSFRAPNENDWGLRKKRTENLLEMSGKTVGAFIYDHLLQEPADKIRGNFIRTIERHYYKAELEAILAEQCKYHIELRDKEMLEACARELYLNNLPHQRSLMKKDMTYLLLYDLIFYQRPLKSKKALIANCPYEYYEYVDKETGEIKRQNIKCIAKSNPYFQEFRLWQFVLNLRLFDRVEDKEVTANYLPTADDHARLFTYLNDRKEINQETLLKDYFKLKKVKIGNEKEYPIRWNYIEDKEKKYPCNETRYELLMALDRAGIEHKWLDDNNLEYRLWHLLYSVEVKSESETALRKLKNDDAFVNSFLKVKPFKKEYGAYSEKAIKRLLAVMRKGFLWNEQDICDETRKRIEIIIKGDVDEKVKERMGHAAYSFDRVSDFQGLPEWLACYVVYGRHSEAMDIQHWDSPERLIAYINNFKQYSLRNPIVEQCILETLRTVHDIWKETGQIDEIHVELGREMKSTSEERARRTQNVLRNENTNLRIKSLLIELKNDTDICNVHPYSPMQQEILRIYEEGALQELNREDEDFEEISKISQMSQPSGKELNRYKLWLEQKYRSPYTGKAISLAKLFTPAYQIEHVIPQSRYFDDSFTNKVICEAEVNTLKSNLLGYEFIKKHGGEIIHCTTLGDVRIFSESEYKAFVMDHYANNKSKKDKLLMEDIPQEFLSRQMNDSRYISKVVKTLLSNIVRMADESEATSKSVIVCTGGVTDRLKKDWGLNDVWNSIVYSRFERLNRLTGTEAFGHWENKDGKRVFPTSMPLELQRGFRKKRIDHRHHAMDALVIACASRNIVNYLNNESANNPKKREDLRRQLCDKNRVIRKPWETFTQDAYNALRNVVVSFKNYVRVINKATNRYEHYDENGKKRFVQQKGSELWAIRKPMHKETYYGHVNLRRKELVTLQKALDDIPSICDKKLRDYISALVEKHFNKRQMLAHFKSTDYYWQKQYVNKVYVWTFSDDIKPLVATRKLLDTSFDAKRIGTITDTGIQKILRNYLEAKGGNATLAFTPEGIAEMNQNISKYNDGKPHQPILKVRITEPMGAKYRVGQTGNKMAKYVEAQSGTNLYFAIYEDSEGKRSYTTVPLDEVAERLKQRLSPVPEKDENDVPLKFYLSPNDLVYVPTEEELQLRECKLNKDRIYKMVSSTGNECHFIPYYVANVIYNKVEFEAKNKIGRALTGEMIKAVCWKLEIDRLGNILKVIK

SEQ ID NO: 4936 - protein, 1483 aa, synthetic construct
  REGION 1..1483: note = Synthetic
MKTILGLDLGTNSIGWAKVSLDENGNYLHDIKLGCRIIPMSQDVLDNFGKGVTVSQTSVRTGFRGVRRIRERSLQRRERLHRVLHRLGFLPQHYDAAIGWDRDCAKTYGKFLDNGEPKLAWERQDDGSMRFLFMNSFYEMIADFTSHQPALVADGKKIPLDWTLYYLRKKALTQAIRKEELAWILLSFNQKRGYYQLRGEEEDENPTKREEFCELKVVAVEAAEKGKGDDVWYNVHLENGCIYRRSSKISLDDWVGKTKQFIITTEYEKDGVTPKKDKDGKEKRSYRAPKEDDWGLRKKRTETDLEASGKTVGAFIYEHLLAEPSDKIRGNFIHTIERKYYRAELEAILTQQRKYHEELRSEQMLAVCAEELYRSNLPHQQSLLKKDMVYLLLSDLIFYQRPLKSKKSLIADCPYEYYRYVDKETGEIKKQGIKCIAKSNPYYQEFRLWQFVLNLRLFDRMTDKEATADYLPTKEDYVRLFDYLNNRKEINQETLLKDFFRLKKVKRGREKEFEIRWNYIEDKEKKYPCNETRYELLVALDRAGIDRSWIDEDGRQYRLWHLLYSIEVKAEAESALRKLNSDDAFVSSFLKVKPFKKDYGAYSEKAVKKLLAVMRMGSMWSEANICEETRNRISCIIRGDIEEKIKERMGHTARSFNQIDDFQALPEWLACYVVYGRHSEVTDIQHWETPEQLQSYINGFKQHSLRNPIVEQCILETLRTVHDIWKEAGHIDEIHVELGRDMKRTADQRARMTKNILKNENTNLRIKSLLLELKNDTDIKEVRPNSPMQQEILRIYEEGALLQLKRDDEAFADISKISQMAQPTATELRRYKLWLDQKYRSPYTGKFISLSKLFTSAYQIEHVIPQSRYFDDSFSNKVICEAEVNRLKSNMLGYEFIKAHGGEIVHCTMLGDVKILNESEYKAFVNEHYINHRAKKEKLLMEDIPQEFLNRQMNDSRYISKVVKALLSNIVRTEDEMDVTSKFVIPCTGGITDRLKKDWGLNDVWNSIVYPRFERLNRMTGTEAFGHWENKEGKRVFQTSVPIELQLGFSKKRIDHRHHAMDALVIACASRNIINYLNNESANSQKKREDLRRLLCDKNRIIRKPWESFTQDARVALQDIVVSFRNYVRIINKATNYYERYDEQGKKTTAEQKSSEMWAIRKPMHKETVFGHVNLKRKTTVKLKNALENIPNICNKELEAYINELVEKHFNTKQMLAHFKSINYRWNRQNVEKVEVWQYSDEKERMAATRKPLDTSFDKKRIETITDTGIQKILLNYLEEKDGDPNIAFTPEGIAEMNKNISLFNDGKLHQPILKVRVAEPMGAKYQVGLTGNKAAKYVEAQKGTNLYFAIYENEEGERSYNTVPLNEVAERLKQGMSPVPEKNEKDIPLKFYLSPNDLVYVPTEEDKLSNECKLDKERIYKMVSATGNQCFFIPCRVATSIANKKEFSPLNKLEKAISGEMIKAVCWKLEVDRLGKILKIIK

SEQ ID NO: 4937 - protein, 1480 aa, synthetic construct
  REGION 1..1480: note = Synthetic
MKTILGLDLGTNSIGWAKVCVDNDGNYLRDIKLGSRIIPMSQDTLGNFDKGVTDSPTAARTGFRGVRRIRERALQRRERLHRVLHVMKFLPPHYENAIGWNREEATTYGKFLNHGEPKLAWEKQEDGSMRFLFMDSFHEMMADFAESQPGLVAGGKKIPLDWTLYYLRKKALTQAIRKEELAWILLNFNQKRGYYQLRGEEDEENPAKREEYHELKVVSVEAAEEGKGGNTWYNVTLENGWIYRRQSKVELHDWVGKTRQFIVTTEYEKDGVTIKKDKNGEVKRSFRAPSEDDWGLRKKRTESLLEDSGKTVGAFIYDHILSEPTDKIRGNFIRTIERKYYKKELEAILLEQTKHHKELKDQNTLIACIKELYQSNKPHQDSLMKKDMTYLLITDLIFYQRPLKSKKSLIADCPYEYYEYTIKETGEIKRQGIKCIAKSNPYYQEFRLWQFIINLRLFDRTDDKEVTSEYLSSMEDYTKLFTYLNDRKDINQETLLKDFFKQKKVKMGMEKEFPIRWNYIEDKEKKYPCNETRHELLAALDKAGIDHSWLDDKERFYRLWHLLYSVESKEEAEGALRKLKDNDDFVNAFLKVKPFKKDYGAYSEKAVKKLLAIMRMGGLWNETDICEQTRNRIQSIIKGEIDEKIKERMGRTFCQLSDFQGLPEWLACYVVYGRHSEATDIQRWTKPENLMAYINGFKQHSLRNPIVEQCILETLRTVHDIWKEAGHIDEIHVELGRSMKSTADQRARMSKSILQNENTNLRIKSLLMELKNAKEIENVRPYSPMQQEILRIYEEGALQELTKEDAQYPEISKISQMAQPSAKELLKYRLWLEQKYCSPYTGKPISLSKLFTSAYQIEHIIPQSRYFDDSFTNKVICETEVNQLKSNMLGYEFIKKHSGEIVHCTTIGDVKILDAKEYYNFVTEHYANNRRKKEKLLLEDIPQEFLNRQMNDSRYISKKVMAILSNIVREEDEQETNSKFVVSCSGGITDRLKQDWGLNDVWNSIVYPRFERLNKLTQTEAFGRWENKEGKQVFQTSLPLELQRGFSKKRIDHRHHAMDALVIACASRNIINYLNNESAKSQEQREDLRKKLCDKNRIIRKPWETFTQDARTALEDVVVSFKNYVRVINKATNYYEKYDESGKKGMAEQKGQDMWAIRKPMHKETVFGQVNLRRKVTVKLKDALENIPAICDKALRDYVNDLIAKKFNTKQMLAHFKSINYRLNMKSVNKVGIWVFSDEKEPMVATRKAIDISFDAKRIDTITDTGIQQILCKYLKSKGNDPNVAFTPEGIAEMNKHIIDYNNGKQHQPILKVRVSEPKGAKYQVGETGNKTKKFVEAQKGTNLYFAIYEDKDGNRSYNTIPLNEVAERLKQGLSPVPEKNEKGISLKFYLSPNDLVYVPTEEEKLSNECKLSKERIYKMVSSTSNECHFIPYTTAKPIYDKFEYEAKNKMGRALTGEMIKAVCWKLEVDRLGNILKIIK

SEQ ID NO: 4938 - protein, 1480 aa, synthetic construct
  REGION 1..1480: note = Synthetic
MKTILGLDLGTNSIGWAKVCVDDNGNYTREIKLGSRIIPMSQDTLSNFDKGVTESPTAARTGFRGIRRIRERALQRRERLHRVLHVMGFLPLHYENAIGWNREEATTYGKFLDNGEPKLAWERQEDGSMRFLFMDSFYEMMADFAKNQPGMVADGRKIPLDWTLYYLRKKALTQAIRKEELAWILLNFNQKRGYYQLRGEEEEENPTKREEYYELKVVSVEAAEEGKGGNTWYNVTLENDWIYRRQSKIELNDWGGKVRPFIVTTEYEIDGVTIKKDKNGEVKRSFRAPNENDWGLRKKRTESLLEESGKTVGAFIYNHILSEPADKIRGNFIRTIERKFYKKELEAILREQSKHHKELKDIDTLIACIKELYPNNKPHQDSLIKKDMTYLLITDLIFYQRPLKSKKSLIADCPYEYYEYVIKETGEIKRQSIKCIAKSNPYYQEFRLWQFIINLRLFDRNNDKEVTSEYLSSMEDYTRLFTYLNDRKDINQETLLKDFFKQKKVKRGMEKEFPIRWNYIEDKEKKYPCNETRHELLAALGKAGIDHSWLDDKELFYRLWHLLYSVESKEEAEGALRKLNDNDDFVNAFLKVKPFKKEYGAYSEKAIKKLLAVMRMGDLWNETDICEQTRDRIQNIIKGVIDEKIKERMGRTFSQLSDFQGLPEWLACYVVYGRHSEATDIQRWTKPEDLMAYINGFKQHSLRNPIVEQCILETLRTVYDIWKEAGHIDEIHIELGRSMKSTADQRARMSKSIMQNENTNLRIKSLLMELKNTKEFENVRPYSPMQQEILRIYEEGALQELTKEDAQYNEISKISQMAQPSANELLKYRLWLEQKYCSPYTGKPISLSKLFTSAYQIEHIIPQSRYFDDSFTNKVICEAEVNQLKSNMLGYEFIKKHGGEIVHCTMVGDVKLLDAKEYYNFVTEHYANNRRKKEKLLMEDIPQEFLNRQMNDSRYISKKVMAILSNIVREEDEQEAKSKFVIACSGGITDRLKQDWGLNDVWNSIVYPRFERLNKLTNTENFGRWENKEGKQVFQTSVPLELQKGFSKKRIDHRHHAMDALVIACASNNIINYLNNESAKSQEKREDLRKKLCDKNRIIRKPWDTFTQDAHTALENVVVSFKNYIRVINKATNYYEKYDKNGKKEIAEQKGQDMWAIRKPMHKETVFGQVNLRRKVTIKLKDALEKIPAICDKELRDYINILVAKQFNKKQILAHFKSINYRLNMKSVDKVDVWQFSNEKEPMVATRKSVDTSFGTKRIATITDTGIQKILLNYLKAKNNDPNIAFTPEGIAEMNKHITEYNNGKQHQPILKVRVSEPKGAKYQVGETGNKTSKFVEAQKGTNLYFAIYEDKEGNRSYNTIPLNEVIERLKQGLSPAEDLNKQGEKLKFYLSPNDLVYVPTEEEKLSSECKLNKEQIYKMVSSTGSECYFIPYTVSNVIFNKVEFESLNKMGRALTGEMIKSVCWKLELDRLGNILKVIK

SEQ ID NO: 4939 - protein, 1413 aa, synthetic construct
  REGION 1..1413: note = Synthetic
MKTILGLDLGTNSIGWAKVSVDDYGNYLHDIKLGSRIIPMSQDVLGNFDSGVTVSQTAQRTEFRSKRRLVQRNLQRRERLHRVLHVLDFLPAHYDAAIGWDRTEAVTYGKFLNHAESKLAWEELGNGKRRFLFMDSFHEMVADFARCQPALVADGKKIPLDWTIYYLRKKALTQAITKEELAWILLNFNQKRGYYQLRGEEEENPTKKEGNVKRSFRAPNENDWGLRKKRTETLLEMSGKTVGAFIYDHLLQEPADKIRGNFIRTIERHYYKAELEAILAEQCKYHIELRDKEMLEACARELYLNNLPHQRSLMKKDMTYLLLYDLIFYQRPLKSKKALIANCPYEYYEYVDKETGEIKRQNIKCIAKSNPYFQEFHLWQFVLNLRLFDRVEDKEVTANYLPTADDHARLFTYLNDRKEINQETLLKDYFKLKKVKIGNEKEYPIRWNYIEGKEKKYPCNETRYELLMALDRAGIEHKWLDDNNLEYRLWHLLYSVEVKSESETALRKLKNDDAFVNSFLKVKPFKKEYGAYSEKAIKRLLAVMRKGFLWNEQDICDETRKRIEIIIKGDVDEKVKERMGHAAYSFDRVSDFQGLPEWLACYVVYGRHSEAMDIQHWDSPEGLMAYINNFKQYSLRNPIVEQCILETLRTVHDIWKETGQIDEIHVELGREMKSTSEERARRTQNVLRNENTNLRIKSLLIELKNDTDICNVHPYSPMQQEILRIYEEGALQELNREDEDFEEISKISQMSQPSGKELNRYKLWLEQKYRSPYTGKAISLAKLFTPAYQIEHVIPQSRYFDDSFTNKVICEAEVNTLKSNLLGYEFIKKHGGEIIHCTTLGDVRIFSESEYKAFVTEHYANNKSKKDKLLMEDIPQEFLNRQMNDSGYISKVVKTLLSNIVRMEDESEATSKSVIVCTGGVTDRLKKDWGLNDVWNSIVYSRFERLNRLTGTEAFGHWENKDGKRVFQTSMPLELQRGFRKKRIDHRHHAMDALVIACASRNIVNYLNNESANNPKKREDLRRQLCDKNRVIRKPWETFTQDAYNALRNVVVSFRNYVRVINKATNRYEHYDENGKKRFVQQKGSELWAIRKPMHKETYYGHVNLRRKELVTLQKALDDIPSICDKKLRDYISALVEKHFNKRQMLAHFKSTDYYWQKQYVNKVYVWTFSDDIKPLVATRKLLDTSFDAKRIGTITDTGIQKILRNYLEAKGGNATLAFTPEGIAEMNQNISKYNDGKPHQPILKVRITEPMGAKYRVGQTGNKMAKYVKAQSGINLYFAIYEDSEGKRSYTTVPLDEVAERLKQRLSPVPEKDENDVPLKFYLSPNDLVYVPTEEELQLRECKLNKDRIYKMVSSTGNECHFIPYYVANVIYNKVEFEAKNKIGRALTGEMIKAVCWKLEIDRLGNILKVIK

SEQ ID NO: 4940 - protein, 1043 aa, synthetic construct
  REGION 1..1043: note = Synthetic
IINLRLFDRTNDKEITSEYLSSMEDYTKLFIYLNDRKEINQEILLKDFFKQKKVKMGMEKEFPIRWNYIEDKEKKYPCNETRHELLAALDKAGIDHSWLDDKERFYRLWHLLYSVESKEEAEGALRKLNDNEDFVNAFLKIKPFKKEYGAYSEKAIKKLLAVMRIGTLWNEDDICEQTRNRIQSIINGDIDEKIKERMGRTFSQLSDFQGLPEWLACYVVYGRHSETTDIQRWTKPENLMSYIKGFKQHSLRNPIVEQCILETLRTVHDIWKEAGHIDEIHIELGRSMKSTADQRARMSKSILQNENTNLRIKSLLMELKNAKEFENVRPYSPMQQEILRIYEEGALQELTKEDDQYPEISKISQMAQPSAKELLKYRLWLDQKYCSPYTGKPISLSKLFTSAYQIEHIIPQSRYFDDSFSNKVICEAEVNQLKSNMLGYEFIKKHSGEIVHCTMVGDVKILDAKEYYNFVTEHYANNRRKKENLLLEDIPQEFLNRQMNDSRYISKKVMALLSNIVREEGEQEAKSKFVIACSGGITDRLKHDWGLNDVWNSIVYPRFERLNKLTNTENFGRWENKEGKKVFQTSVPLELQRGFNKKRIDHRHHAMDALVIACASNNIINYLNNESAKSQEKREDLRKKLCDKNRIIRKPWETFTQDVRTALEDVVVSFKNYIRVINKATNYYEKYDKNGKKGIAEQKGQDMWAIRKPMHKETVFGQVNLRRKVTVKLKDALEKIPAICNKELRDYINILVAKQFNKKQILAHFKSINYRLNMKSVYKVDVWQFSNEKEPMVATRKSVDTSFDAKRIATITDTGIQKILRNYLETKDNDPNIAFTPEGIAEMNKHITEYNNGKQHQPILKVRVSEPKGAKYQVGETGNKTSKFVEAQKGTNLYFAIYEDKEGNRSYSTIPLNEVIERLKQGLSPVPDTNEKGIPLKFHLSPNDLVYVPKTDEENEIKTGQIYKFVDSSGTTANFIPHRVSNLIYNVDKKIAENFCNHEVIQNEYGIGSPQSKNQKSITGKMIKAVCWKLELDRLGNILKIIK

SEQ ID NO: 4941 - protein, 1487 aa, synthetic construct
  REGION 1..1487: note = Synthetic
MKNVLGLDLGSNSVGWALVKTEDNGNPIGSIKMGSRIIPMSQDILGSFEKGDTVSQTAQRTLYRGKRRLTERHVLRRERLCRVLHIMNFLPDHFDKLLGWDKTDNKTYGKFIDDSEPKLAWRQNKNEKEKMEFVFMDSFHEMLSDFAKHQPQLIANGKKVPLDWTIYYLRKKALTQLISKEELAWILLNFNKKRGYYQLRGEEEEEQPTKKEEYKVLKVISVDADEGQKGNGIWYNIHLEDGGIYKRKSDIPLYDWVGKTLQLIVVTIYEKDGKTPKIFDSGKQNPSYRLPKEDDWGLIKKRTESQIQSSGKTVGAFIYDNILSKPADKIRGNLVRTIERKYYKKELIEILQQQAKYHDELHNQHLLESCAKELYAHNDVRYNEVVKSNMIHLLVDDIIFYQRPLKSKKSLIDNCKYESYEYVDKETGEVKEMPIKCIAKSNPYYQEFRLWQFIHNLRLSDVVTREDVTAQYLSTPQDYCNLFTYLNDRKEIKQDILLKDFFQIKKVQIDKEKVFPIEWNYIKDATKTYPCNETKYELLSALKRAGMDKQWLDDTPNMQYRLWHLLYSVEEKEESAKALRKLYDDDNFVSSFLKIKPFEKCYGAYSEKAIKRLLTLMRMGKAWDEQAIDAKTLKCIQQIITGNIDSKLKEKIDDSRYVLHHVSDFQGLPTYLASYVIYGRHSEVTDIRCWDTPKDLLKFICGFPQHSLRNPIVEQVILETLRVVYDIWKAEKHIDEIHVEVAREMKLTAQQRNEANLRNLNNEATNLRIKYLLEELKNDTFIKDVRPLSPMHQEKMRIYEQAVLGNLNKQDKDYDDIIKISKKERPTSAELIRYKLWLEQKYCSPYTGKAISLSKLFTTAYQIEHVIPQSRYFDNSFNNKVICESEVNKEKDKMLGYEFIKGRGGDRIYCTAHGKEVTILKEEEYKQFVNEHYAHNKRKRDNLLAENIPESFSSRQLNDTRYITKTIMSLLSNVVRQQGEEEATAKNLLPSSGAVTDKLKNDWGLKDVWNTIVTPRFERLNKLSGTNDFGEMKEENGNRYFQTNVPSEYEKGFKKKRIDHRHHAMDALVIACTTRNMVNYISNVNANSPKQREDLRQLLCDKNRIINKPWNTFTQDALKALNDIVVSFKNNVRIINRATNRYQRYDKNGKKMICSQKGNDMWAIRKSMHKETVFGRVNLIRKEALPIAKALDNISAICNAQLRAYVNDLVDKHFNKKQLVAHFKSLDYKWNRQDVSKVEVWISSDDKTPMVAVRKPLDTSFDKKKIASITDTGIQAILLNYLESKGGDALVAFAPEGIQEMNSNIELYNNGKAHKPIKNVRLSETLGAKYQVGERGAKTKKYVVADKGTNLFFAIYEDEEGKRYYYSVPLREAIERQKQKLSPVPEYNEKGVALKFYLSPNDLVYVPTEEERTMGTCHIDKTRIYKMVSSSENRCCFVPSTIAKVIADKVELLSHNKIEKAITGESIKEVCWKLKVDRLGNILNVIK

SEQ ID NO: 4942 - protein, 1487 aa, synthetic construct
  REGION 1..1487: note = Synthetic
MKNILGLDLGTNSIGWAKVSVDENGKVMSDIQLGSRIIPMTQDVLSKFDNGQTQSQTAERTGYRGHRRLLERSLQRRERLHRALHVMGMLPPHYEKEIGWNRNEPKTYGKFIDNAEPKIAWERGEDGKMQFRFMDSFHEMLADFAHHQPALVADGKRIPLDWTLYYLRKKALTEAVTKEELAWILLSFNQKRGYYQLRGEEEEEDITKRKEYHELEVERVDATGEKKGDKEWYNIWLKNGWLYRRQSSIPLDNWVGKIKKFIVTTEYEADGITIKKDKEGNERRSFRSPSEDDWTLRKKCTEQQIEQSGKTVGAFIYDHLLAEPSDKIRGNYVRTIERNYYKDELRAILQKQREFHEELRNKTLVEACAKELYLRNETHQKVLMQKDMVHLLLDDLIFYQRPLKSKKSLIADCPYEKYNYTDKETGEIKTQTKKCAAKSNPYFQEFRLWQFVQNLRLYKREDDADVTADYLKTTEDYANLFDFLNDRKEIKQSVLLKNFFKIKKTKVGKESIFPIRWNYIEDEKKTYPCNETRYELLSALKRANIEGDWLTKEREYRMWHLLYSVEHKDETRKALEKWDEGEDFINAFLKVKPFKKDYASYSEKAIKKLLTVMRMGKYWEEDIVKTIAGKQIEKIINGEIDEKLKERIRNAKLPLENVKAFSGLPVWLACYVIYSRHSETTQITKWESPESLMSFIKGFKQGEMRNPIVEQCVLETLRTVHDIWKAAGHIDEIHIELGREMKLTAEERQHRTSAILNNEATNLRIKQLLMELKNDNSIENVRPHSPMQQDILRIYEEGALNELKAEDAEYNDILKISHTAQPTQDELIRYKAWLEQKYRSPYTGKPIPLGKLFTAAYEIEHVIPKARYFDDSLSNKVICEAEVNKTKGTMLGYEFIKEKAGTKIHCAAIGDVVIFSQAEYEQFVKEHYANNTKKRNKLLMDEIPQDFINRQLNDSRYISKMVKSLLSNIVREQGESEATSKNVILCTGGITDRLKKDWGMNDVWNNLIYHRFERMNKLTESELFGHWENKNGKRVFQTTMPIELQRGFNKKRIDHRHHAMDALIIACASRNIINYLNNESAADEKKRYDLKAKLCGEKGMIKKPWDSFTQDAQKALSNVVVSFRNYVRIINKATNFYERIDEKGKHTLVPQKTKEMWAIRKPLHKETYYGKVNLKRPDTVSLSKALEQVERICDKELRKYILQLKEQGMNNAKIKAHFKALENRWNEKDVSKIDIITFTNDKGDKEAMVASRKPLDTSFDEKAIRSISDTGIQKILLNYLKAKNGNEKLAFSPEGIDEMNKNISLYNDGKPHQPIRKVRVTDKLGLKFQVGQQGNKKDKYVKAEVGTNLYFAIYKDEEGNRVYNTPEFSDIVERLKQGLKPVKETYNNAKLLFTLSPNDLVYVPTEDEMNIDNVKELNPEHIYKMVSSTENRSFFIQHRVAKSIQDKYEFSSKNKMERAVGDTDVMIKSVCWKLEVDRLGNITNIIK

SEQ ID NO: 4943 - protein, 1483 aa, synthetic construct
  REGION 1..1483: note = Synthetic
MKTILGLDLGTNSIGWAKVIVDDNENYLRDIQLGSRIIPMSQDVLGKFDKGVTESQTAIRTNFRGIRRLRERTLQRRERLHRVLHTLHYLPPHYDSAIGWDRKAPTTYGKFLNHGEPKLAWERREDGTMQFLFMDAFHEMIADFAKHQPALVANGKKVPLDWTIYYLRKKALTQAIKKEELAWILLNFNQKRGYYQLRGEEDEEHAAKHEEYHELKVVGVEADEAGKGDNTWYNVKLENGWIYRRQSKIPLDDWVGKVRAFIVTTEYEKDGTTPKKDKEGNVKRSFRSPNENDWGLRKKQTEHSLEASGIPVGAFIYDHLLKEPSDKIRGKFIHTIERKYYKQELAAILREQSKHHEELCSKDMLKACVEELYPNNPLHRESLLKKDMTYLLIEDLIFYQRPLKSKKSLIAECPYEAYSYVDKETGEVKRQGIKCIARSNPYYQEFRLWQLIANLRLRNRADERDVTAEYLPHQEDYVRLFTYLNDRKEINQETLLKDFFKLKKVAIGGEKVFPIRWNYIEDKEKKYPCNATRHELLLALDRAGMEHDWLDNRDLAYRLWHLLYSVDSKDETERALRKLKDDDAFVESFLKIKPFEKEYGAYSEKAIKKLLPVMRRGSLWNEADLCPSTKERIANILQGTIDEKLKKKIGAFISSCQQVSDFQGLPEWLACYVVYGRHSEATAIQHWETPEQLLAYIHGFKQYSLRNPIVEQCILETLRTVYDIWKEAGQIDEIHVELGREMKKTAEQRAHLTENVLRNENTNLRIKSLLMELKNDIDIKDVRPHSPMQQEILRIYEEGALQTLSKDDAAFAEIMKISKMAQPSTSELKRYRLWLEQKYRSPYTGKPIALSKLFTSAYQIEHIIPKKRYFDDSFSNKVICEAEVNREKGSMLAYEFIKKRGGDVIHCTALGDVTILSKAEYKALVTELYANNTSKKEKLLMEDIPQEFVNRQLNDSRYISRVVMTLLSNIVRIEGEEEATSKFVIPCSGGITDKLKKDWGLNDVWNNIVYPRFERLNALTNTTDFGQWENKEGKRVFQTSVPLELQRGYQKKRIDHRHHAMDALVIACASRNIINYLNNQEANDPTKQENARKQLCIKSRIIRKPWETFTQDAHKALDNIVVSFKNYVRVINKATNYYERYHADGKKVVDEQKGETMWAIRKPMHKDTVFGHVNLRRKAVVKLKDALENIPAICDKTLRHYIQDLQKKHFNTKQLLAHFKNINYRLNKQAVDKVEVWQYSDNKEQLAATRKPLDTSFDAKHIATITDTGIQKILLNYLQAKGGDPAIAFTPEGIAEMNRNIAVYNGGKQHQPILKVRIAEPMGAKYPIGETGNKGAKYVEAQKGTNLYFAIYEDEEGNRTYDTVALNVVAERLKQGLTPVPEKNEKGVALKFYLSPNDLVYVPTADELLSKKCSLDKNRIYKMVSATKYQCFFLSHRVAKTIYDKVEFEALNKMERALTGEMIKSVCWKIEVDRLGHIINIIK

SEQ ID NO: 4944 - protein, 1481 aa, synthetic construct
  REGION 1..1481: note = Synthetic
MKNILGLDLGTNSIGWAVVTSNDNTNEKPQVELGSRIIPMSQDVLGKFDSGVTQSQTAERTGYRGARRIRERYLLRRERLFRVLHILGFLPRHFEESIGWDKNDNKTYGKFKDDSEPKLAWDDSDKNNNHFIFVDSFNEMLEEFKKKNPSFISSDKKIPYDWTMYYLRDKATRQPISKQELAWIILNFNQKRGYYQLRGEDEEENTKHKTEEYYELRIDRVEATNEKRGNDIWYNIYLENGWVYRRSSRIPLEDWVGKKKEFIVTTEYNEDGSIKLDKDGNEKRSFRAPKDDDWGLQKKKTEFQIDSSEQTVGSFIYNHLLANPTEKIRGKVVRTIERKYYKQELGKILAKQKDFIPELSNSALLEQCIHELYANNTAHQDSLRKKDINYLIIDDIIFYQRPLKSKKSLIADCPYEQYEYINKNTGEIKKQHIKCIAKSNPYYQEFRIWQFIQNLRLYSNDLDNTDVTKNYLKNEEDYVHLFKYLNNLKEISQETLLKDFFSIKKPKGKDSIYPVRWNYVEDKKYPCNSTRYQMLAALKDAEIPDTLIDNRNTEYRLWHLLYSVEDRNELISALCSFARDNKLPESFVDCFKKIPSYKKEYGAYSEKAVKKLLSVMRVGSLWSEDNLPNNIHNVINGTIDEKVKKRIEHKGFFLSEKQSFRGLPEWLACYVVYGRHSETSDISRWETPQDLANFIHDFKQHSLRNPIVEQCILETLRTVHDIWVRHGRIDEIHVELGRSMKSTAEQRERMSKTIIQNENTNLRIKNLLLELKNDSTIKDVRPYSPMQQDLLRIYEEGALLTLKRDDKDYNEISRISKLSAPTQSELTRYKLWLEQRYRSPYTGKTISLSKLFTPAYQIEHVIPQGRYFDDSFSNKVICEAEVNQRKSNMLGYEFIQKCGGEIIHCATLGDVKVLTAKEYKDFVSDHYDPKSSKAQKLMMDDIPETFIQRQMNDTRYISKVIKSLLSNIVREKDEIDAISKNVIPCTGGITERLKNDWGLKHVWNSIVAPRFIRMNQLTNSEAFGHWENKDGKRVFQTTMPIELEKGFSKKRIDHRHHALDALVIALASRNIISYLNNESARDTNRREDLRRLLCDKNRIIRKPWNTFTQDAYVALQNIVVSFKNYVRVINKASNYYEHYDENGRKKPIAQKGEEQWAIRKPLHKETVFGQVNLQRKREVSFAKAIEQVSCIVDKDLRNTIKSMIKAGMDESQIRKHFKAQNNIYAGKSINKVEVYYYTDSVEPMVATRKLLDDSFDEKKILSITDTGIQSILLNYLEAKGNDPKLAFSPEGIMEMNENIAKYNNGKFHQPIIRVRVSEPKGEKYNIGTTKNKAKKFVEAQSGTNLFFAIYETENGNRSYKTIPFNQVVERMKMGWTPVPEKNENGDKLKFYLSPNELVYVPTEEERMSNSININKDRIYKMVSATGNQVFYVRHNIASVIENKVELQSLNKMEKTMEGEMIKSICWKLEVDRLGNITNIIR

SEQ ID NO: 4945 - protein, 1499 aa, synthetic construct
  REGION 1..1499: note = Synthetic
MKNILGLDLGTNSIGWAKVSFDEQGKPVGDIRLGSRIIPMSQDVMSDFEKGVTNSGAKERTSFRSIRRLRERCLQRRERLFRVLHTLRFLPEHFDAALGWDKNDNKTYGKFLNGEEPKVAWRRGKDGKMEFIFMEAFEEMLADFVHRSPKWKAGTKVPLDWTLYYLRNKALTQQVSKEELAWILLSFNQKRGYYQLRGEEEEENVQKRVEFMEAVVVKVEAEEAKKGKDTWYNLHLDNGLVYRRTSKTPLESIVGQKHAFILTTEYEKDGVTPKRDKEGNDKYSIRMPKEDDWTLKKKRTEHDLKNSGKHVGTFIYEQLLAEPTTKIRGNFVHTIERYFYKNELKAILEKQCEFIPELTDKAMLHACAEELYARNLARKKSLCEKDLVYLLIDDLIFYQRPLKSKKGLIDNCPYESYSYVDKTTGEIKEQPIKCAAKSNPYFQEFRLWQFIGNLRLFDRTTEAEVTSQYLATEDDYERLFVYLNDRKEIKQETLLKEFFQLKKPKGKDAEYPLRWNYAEDKEKVYPCNETRAAIFGALKKAGLDASLIDTKEKEYALWHLLYSVEDKLELEGALRKWNLGEDFVQAFARLKPFEKSYAAYSEKAIKKLLTLMRRGNRWAAESIDVKTQKRIEAVIKGDIEEKLKAKIGKYPLPLKQIDDFKALPVWVACYIVYGRHSESGTIEHWEKPESLRAYINGFKQHSLRNPIVEQVVLETLRTVHDIWKEYGQIDEIHVEMGRDMKKTSAERQKDTKKVLENETRNMRIKYLLAELKNDSKIENVRAYSPGQQEILRIYEEGALANLKEDDKDYDEISKIAKSAHPTSAELTRYKLWLEQKYRSPYTGRPISLSHLFTTAYEIEHIIPQARYFDDSMSNKVICETEINREKGSMLGYEFIKKRGGEIFHSPILGDLKLLKADDYERFIEDQYQGRELRTKKKKLLMEDIPEDFVQRQLNDSRHISKLIKGLLSNIVREEGEEEETSKHLIPCNGSITDRLKKDWGLNDVWNSLVYPRFQRLNQLTNSEAFGYWDKKDGKRVFQTQMPLELQQGFRKKRIDHRHHAMDALVIACTSRNIVNFLNNESAKDTQRREDLRRLLCVKGRQIRKPWETFTQDAEAALRGIVVSFKNNIRILNKATNRYEHYDEEGKKKLRTQKGEAKAVRKPLHKDTVYGKVNLKRKGTVTFAKALENIPAIVDKDLRHRLLELSQQGYDKNQLQAYFKKQNYQFKERDVTKVEIWTFSDDKEPLVATRKAVDTTFDKKTIEKITDTGIQKILLNFLEYKGGDPALAFSPEGITEMNANIASFNNGKPHQPIKKVRLFEPLGQKFCVGQKGNKKSKFVEAQKGTNLYFAIYEDSEGKRHYATIPLNEVIERLKQGLSPVPNQNESGVPLKFWLSPDDLVYVPTPEEQDSQTDIKKLDKSRIYKMVSSTGKSCLFVPHIVTKAIQNKVEFEALNKMERAIHLEAYCAEKLPVNLPEAPMIKAVCWKLEVDRLGNILNVIR

SEQ ID NO: 4946 - protein, 1475 aa, synthetic construct
  REGION 1..1475: note = Synthetic
MKHILGLDLGTNSIGWAKISIDENNVVVPEIKLGSRIIPMSQDVLGKFDSGVTESQTAVRTGYRGVRRLRERCLLRRERLFRVLHIMNYLPKHFDKSIGWDKTNSKTYAKFVDDNEPKIAWFENKDGKKQFLFMDAFNEMLADFKHNNPELVGNGRLVPLDWTIFYLRNKALHQPISKQELAWIILNFNQKRGYYQLRGEEEENDNSKVEEYYELKVVDVEATEEKRGNNIWYNLYLENGWIYRRQSKQPLDDWKGKVKEFIVTTEYNPDGTLKIDKEGQPKRSFRAPKEDDWALQKKRIEKSISDSGETVGSFIYRHLLSSPFDKIRGRLVRTIERDFYKTELEAILTKQAEFHQELTDKDYLNRCVKELYAKNTSHQQSLMKKNMLYLLINDIIFYQRPLKSKKSLISDCPYEAYSYVDKTTGEIKTQHIKCVAKSNPYFQEFRLWQFIQNLRLFDCSSIEEKEVTSEYLKKEEDYVQLFLFLNDKEKITQDTLLKEFFNIKKSKGRNAKLPVRWNYVVDKSYPCNSTRFILLSALKKANIPFSFLNDKRIEYRLWHLLYSVEDRKELAQALVAFAKQYNLEESFVDEFKKIAPFKKEYGAYSEKAIKKLLSVMRTGSMWDESQIPDSVSQIIRGNIDENTKNRMSHQGYSFTDKNSFKFLPVWLACYAIYGRHSESQEITKWEKPEALQSYINSFKQYSLRNPIVEQVIMETLRTVHDIWEECGHIDEIHVELGRSMKSTADQRKWMTERNMENERTNMRIKLMLLELKNDPSISDVRPYSPIQQEILKIYEEGALQELSKEDKDYTDISYISHLATPTPAEITRYKLWLEQKYCSPYTGRPISLSKLFTPAYQIEHVIPQGRFFDDSLSNKVICEAEVNQRKTNMLGLEFIKKCGGEIIHCSTIGDVRVFKEEEYKQFIEDHYSLNKVKAQKLLMDDIPEDFIQRQMNDSRYISKVIIGLLSNVVREEGEIDAISKNVIPCTGGITTRLKKDWGLIDKWNDIITPRFQRMNQLTQSDAFGHWENKDGKRVFQTTLPLELRIDKKRIDHRHHAMDALAIALASRNIISYLNNETARDTQRREDLRLLLCDKNRHIKKPWNTFTEDAHMALQNIVVSFKHYIRVINKASNYYEHYNEEGKKVFIPQHGESHWAVRKPLHKETIFGQVNLRRKKTVPLAKAIECVDSIVDKTLKKQIQTLQNDDWNNKQIIGYLKKSGIIKAEVYFFTNDEEPMVAVRKPLDDSFDKKHIESITDTDIQKILLNYLESKGNDPKLAFSPEGIMEMNQHIANYNNNKPHQPIIRVRVSEPKGEKYSIGESGINRKKFVEAQSGTNLYFAIYEDKQGKRSYQTIPLNIVVERLKMGWSPVPEYKEDNEQLKFYLSPNDLVYVPTEEELINNNVSITNLNHSQIYKMVSATGSSLYFVQNTIATVIANKVELYSLNKMERTMDGQMIKSVCWKLEVDRLGNIINIIR

SEQ ID NO: 4947 - protein, 1496 aa, synthetic construct
  REGION 1..1496: note = Synthetic
MKTILGLDLGTNSIGWAKVCVDDNGNYLRNIKLGSRIIPMSQDVLGNFDKGVTESQTSVRTGFRGVRRIRERSLLRRERLHRVLHVLGYLPPHYDSAIGWNKNEPSTYGKFLNHGEPKLAWERKEDGSMRFLFMDSFHEMMADFAKSQPSLVSDGKKIPLDWTIYYLRKKALSQPIRKEELAWILLNFNQKRGYYQLRGEEDDDNPTKCEEYYELKVVGIEADEEGKNGNTWYNVKLENGWIYRRQSKIPLDDWVGKVREFIVTTEYEKDGITLKKDKNGDVKRSFRSPSEDDWGLRKKRTEKLLDSSKMTVGAFVYDHLLAEPSDKIRGKFIRTIERKYYKKELYAILCEQSKYHEELRSGDYLNKCAQELYKNNQPHRNSLLTKDLSYLLLEDLIFYQRPLKTKKSLIAECPYEAYKYVDKETGEIKRQGIKCIAKSNPYYQEFRLWQFISNLRLFNKADDKEVTADYLPTQDDYVRLFAYLNDRKEINQETLLKEFFKLKKITVNSEKVFPIRWNYIEDKEKKYPCNETRHELLLALDRAGIDHSWLEKPGQEYRLWHLLYSVESKEETKEALRKLKDDDAFVESFLKVKPFKREYGAYSEKAIKKLLAVMRMGSLWRETDICDTTKGNITKILQGDIDEKLKEKISASVSSYNQLSDFQGLPVWLACYVVYGRHSEAAEIQHWETPESLLAYINGFKQHSLRNPIVEQCILETLRTVHDIWKEAGHIDEIHVELGRNMKSTADQRARISENVLRNENTNLRIKSLLLELKNDPNIKDVRPYSPMQQEKLRIYEEGVLQELTKDDKDFTEITKISTMAQPSAKELQRYKLWLEQKYRSPYTGKSISLTKLFTSAYQIEHVIPQSRYFDDSFSNKVICESEVNSLKDNMLGYEFIKNHGGEIIHCTMLGDVKVLSESEYKAFVNDHYAHNKRKRENLLLEDIPQEFLNRQMNDSRYISKVVKALLSNIVRAEGEEEATSKFVVSCSGGITDRLKKDWGLNDVWNKIVYPRFERLNRLTGTEAFGQWENKDGKRVFQTAVPLELQRGFNKKRIDHRHHAMDALVIACTSRNIINYLNNESANNPKKREDLRRKLCDKNRTIRKPWETFTQDATAALEDVIVSFKNYVRIINKATNYYERYGVEGKKVIAEQRGDDMWAIRKPMHKETVFGHVNLRRKVTVKLKDALENIPAICDKDLRDYINKLVKKNFNTRQLLAHFKSINYRLNRQKIEKVEVWQFSDEKEQLVATRKSLDTSFDSKHIDSITDTGIQKILKNYLQAKGGDPNVAFTPEGIMEMNQNISLYNDGKQHQPILKVRLFEPMGAKYPVGQSGNKSVKYVEAQKGTNLYFAIYEDEEGKRSYRTIPLNEVVERLKQGLSPVPEKNDKDVDLKFYLSPNDLVYVPIEDEHESLAKDHIYKFVDSSGTTANFIPHRSANVIFELNKKDAERFCSGSIIQNEYGVGSPQSKNQKAITGEIIKAVCWKLEVDRLGNVIKDF

SEQ ID NO: 4948 - protein, 1501 aa, synthetic construct
  REGION 1..1501: note = Synthetic
MKTILGLDLGTNSIGWAKISIDDNGNYLRDIQLGSRIIPMSQDVLGKFDNGVTESQTAVRTGFRGLRRIRERSLLRRERLHRVLHVMGFLPPHYDSAIGWNKEEPSTYGKFLNHGEPKLAWERQGDGSMRFLFMDSFHKMMEDFAPHQPALVADGRKIPLDWTLYYLRKKALTQPIKKEELAWILLNFNQKRGYYQLRGEEEEENPTKREEYHELKVVSVEAAEEGKGGNTWYNVKLENGWIYHRPSKIDLSDWVGKTKQFIVTMEYEADGITLKKNKEGEVKRSFRVPDEDDWGLRKKRTESQLEASGKTVGAFIYDHLLAEPADKIRGNFIRTIERKYYKQELADILREQSKYHEELQSKKILADCAEELYRSNQPHRDSLLKKDMVYLLLTDLIFYQRPLKSKKSLIANCPYEYYEYVDKETGEIKRQGIKCVAKSNPYYQEFRLWQFVLNLRLYDRTEDKEVTAEYLPSKEDYARLFVYLNDRKEINQETLLKDFFKLKKVKQRSEKEFPVRWNYIEDKEKKYPCNETRHELLMALDRAGMERSWLDDTARQYRLWHLLYSIEVKDEAERALRKLKDDDEFVSAFLKVKPFKKDYGAYSEKAVKKLLAVMRMGSHWCEDDICKETKERIEHILQGDVEEKIKERMNHTAYSLGELSDFQGLPEWLACYVVYGRHSEATDIKHWKTPESLMAYINGFKQHSLRNPIVEQCILETLRTVHDIWKEAGHIDEIHVELGRSMKSTSDQRARMTENILRNENTNLRIKSLLMELKNDADIKDVRPYSPMQQEILRIYEEGALQELTKEDNDYEEIFKISKIPQPSAKELLKYKLWLEQKYRSPYTGKPISLSKLFTSAYQIEHIIPQSRYFDDSFNNKVICESEVNALKSNMLGYEFIKNHGGEIVHCTLLGDVKVQNESEYKAFVTEHYANNKYKKEKLLMEDIPQDFLNRHLNDSRYISKVVKTLLSNIVRTEDEMETTSKFVVSCTGGITDRLKKDWGLNDVWNSIVYSRFERLNELTKSDAFGRWENKEGKRVFQTSVPLELQRGFNKKRIDHRHHAMDALVIACASRNIINYLNNESANSPKKREDLRQQLCDKNRIIRKPWESFTQDARAALEDVVVSFKNYVRVINKTTNYYERYGADGEKTIAKQKNSEMWAVRKPMHEAKYYGRVNLQRKTEVRLKAALEDIPSICNKELRDYINRLVKSGLNARQLLAHFKSTDYCWNKQNVDKVEVWRFSDEKEPLVAIRESLDTSFDAKRIDTITDTGIQKILLNYLEAKGGDPAIAFTPEGIAEMNQNMALYNNGKMHQPILRVRLSKKRGKKYQVGQTGCKAKQFVISESGTNLYFAIYEDEDRNRTYNTIPLNEVAERLKQGLSPVPEKNEKEVPLKFYLSPNDLVYVPTEEEILMKECKLNKNRIYKFIDSSGTTANFVPHRSASLIYNVDKKLAEAFCNDEIIQNEYGVGSPQSKNQKALTGEMIKAVCWKLEVDRLGNIIRVIK

SEQ ID NO: 4949 - protein, 1483 aa, synthetic construct
  REGION 1..1483: note = Synthetic
MKNILGLDLGTNSIGWAFVSTNDEGNTIQNLKLGSRIIPMSQDVLSNFDSGVTKSQTAERTGYRGTRRLRERCLLRRERLLRVLHILGFLPKHFDNSIGWNKDDNKSYGKFIDDSEPKIAWSKNAEGKMQIVFTEAFNEMLDDFKSHNPNLINGGHKVPYDWTIYYLRDKALRKPISKQELAWILLNFNQKRGYYQLRGEEEYEEENEQSKLKKIEYHELKVDRVETTEERRGDDIWYNIYLENGWIYRRPSRIPLDDWTGKKKEFIVTTEYNEDGSIKLDKEGNERRSFRAPKEDDWGLQKKKTESQLDSSNQTVGSYIYHHLLYNPKDKIRGKYVRTIERAYYKQELKEILKKQSEFITELTNSTLLEQCICELYSTNKAHQESLRKKDISYLLVDDLLFYQRPLKSKKSLISDCPFEQYEYADKTTGEIKVQHIKCVAKSNPYYQEFRLWQFIQNLRLYSNSVEEQEVTNDYLKTEEDYVHLFKYLNDKKVISQERLLKDFFGLNKPRGKDTVFPIRWNYIADKTYPCNETRSKMLSALDKANISTDILNDKYTEYRLWHLLYSVEDINEITGALTTFAEQYDLPVGFVDAFKKISFKKEYGAYSEKAVKKLLSVMRMGSMWSADAIPDNIQKIINGSIDEKVKERMSHQNIILDDISKFKGLPVWLACYAIYGRHSESKDITKWDTPQDLANFIKNFKQHSMRNPIVEQCILETLRTVYDIWVKYGHIDEIHVELGRSMKSTADQRKRMTDTNTKNENTNLRIKALLMELKNDPTISDVRPQSPMQQDILKLYEEGALLNLDKNDIDFKEISSISQKSSPTQSELTKYKLWLEQKYHSPYTGKAISLSKLFSPAYQIEHVIPQGRYFDDSFTNKVICEAEVNQRKSNMLGMEFIKKCGGEIIHCPTIGDVKVLTTDEYKAFIADHYASNPIKAKKLMMDDIPEEFIQRQMNDSRYISKVIKGLLSNVVREEDEVDAISKNVIPCTGGITDRLKDDWGLKHVWNSIVYPRFERMNRLTNSEDFGHWENKDGKRVFQTKVPFELSKGFSKKRIDHRHHAMDALVIALATRNIVSYLNNESARDTKRRENLRQLLCDKNRIIRKPWPTFTQDVYEALQNIVVSFKNYVRVINKASNYYEHYDENGVKTTISQNSSEQWAIRKPMHKETVFGLVNLQRKKEVPFNKAIERISSIVDKELRSTIRAMITAGMDVNKIKKYFKDQNYQFAGKPVSKVLVYYYTDENERMVATRKPLDDSFDEKKIHSITDTGIQKILLNYLASKGNDPKLAFSPEGIMEMNEHITDYNSGKNHQPIVRVRLAEPKGEKYNIGTTKNKNKKFVEAQSGTNLFFAIYEKEDGTRSFQTIPLNQVVERMKMGWTPAPEQNENGDKLKFYLSPNDLVYVPSEEERMSDSELINRERIYKMVSATGGRAFFIPVTVASVIANGIEFQSTNKIENINNVSIKSICWKLEVDRLGNITKIVR

SEQ ID NO: 4950 - protein, 1129 aa, synthetic construct
  REGION 1..1129: note = Synthetic
MVYLLLTDLIFYQRPLKSKKSLIADCPYEYYQYVDKKTGEIKQQGIKCIAKSNPYYQEFRLWQFVLNLRLYDRTDDKDVTAEYLPSPEDYVRLFRFLNDRKEINQETLLKDFFCLKKTKLGTEKSFPIRWNYIEDKEKKYPCNETRYEMLAALNRAGIERSWLDDTERQYRLWHLLYSVEAKVEAEGALRKLCTAANKKEKEKETEKQVFINDEEAFVNAFLKVKPFKKDYGAYSEKAVKKLLAVMRKGSLWHEEDICEETKDRIGHILRGDIDEKIRERIESAVSSFSQLADFQGLPEWLACYVVYGRHSEATDIKCWNTPEDLMAYINGFKQHSLRNPIVEQCVLETLRTVHDIWKEAGRIDEIHVELGRSMKSTADQRARMTQNILKNENTNLRIKSLLMELKNDTDIRDVRPYSPMQQEILRIYEEGALQELTKDDEDYTEISRISKLAQPSAKELLRYKLWLEQKYRSPYTGKPISLSKLFTPAYQIEHVIPQRRYFDDSFNNKVICEAEVNALKSSMLGYEFIKNHGGEIVHCTQLGDVKVLSESEYKAFVTEHYADNRAKKDRLLMEDIPQEFLNRQMNDSRYISKVVKGLLSNIVRTEEEKEATSKFVIPCTGGITDRLKKDWGLNDVWNSIVYPRFERLNKLTESEAFGHWENKEGKRVFQTSLPLDLQRGFSKKRIDHRHHAMDALVIACASRNIINYLNNESADSPRKREDLRQQLCAKNRIIRKPWETFTQDARAALEDVVVSFKNYVRVINKATNYYERYDADGKKTMAEQKGCEMWAVRKPMHEAKYYGHVNLRRKITVKLEDALENIPSICNKDLRGYINGLMAENSDTKQLLAHFKSIGYRWNKQYVDRVEIWQFSDVKEKMVAIRKPLDTSFNKDSILTITDTGIQKILLCYLEAKGGDPTVAFTPEGIAEMNKYITLYNNGKRHQPIFKVRVSSKLGKKFSVGSIGCKAKQFVIAEAGTNLYFAIYEDMVGKRAYSTMPLNEVAERLKQGLSPVPEKNEKDIPLKFYLSPNDLVYVPTKDKEEKLSKARIYKFVDSSGTTANFVPHRSANLIYNVDKKFAGLFCNGLTIQNEYGVGSPQSKNQKALTGEMIKAVCWKLEVDRLGNIIRIIK

SEQ ID NO: 4951 - protein, 1039 aa, synthetic construct
  REGION 1..1039: note = Synthetic
MRTILGLDLGTNSIGWAKVCINDDGNYVREIKLGSRIIPMSQDTLSNFDKGVTDSPTAARTGFRGIRRIRERVLQRRERLHRVLHVMGFLPSHYEKAIGWNREEATTYGKFLDNGEPKLAWERQEDGSMRFLFMDSFHEMMADFAKCQPGLVADGRKIPLDWTLYYLRKKALTQAIKKEELAWILLNFNQKRGYYQLRGEEEEEDPTKREEYYELKVVSVEAAEEGKGGNTWYNVTLENGWIYRRQSKIELNDWTGKIRQFIVTTEYEKDGITIKKDKNGEVKRSFRAPSEDDWGLRKKRTESRLEDSGKTVGEFIYDHILSEPADKIRGNFIRTIERKFYKKELEAILREQSKHHKELKDLNTLVNCIKELYPNNKAHQDSLMKKDMIYLLITDLIFYQRPLKSKKSLIADCPYEYYEYVIKETGEIKRQGIKCIAKSNPYYQEFRLWQFIINLRLFDRANDKEVTSEYLSSMEDYTKLFTYLNDRKEINQEILLKDFFKQKKVKMGMEKEFPIRWNYIEDKEKKYPCNETRHELLAALDKAGIDHSWLDDKERFYRLWHLLYSVESKEEAEGALRKLNDNEDFVNAFLKIKPFKKEYGAYSEKAIKKLLAVMRIGTQWNEDDICEQTRNRIQSIINGDIDEKIKERMGRTFSQLSDFQGLPEWLACYVVYGRHSETTDIQRWTKPENLMSYIKGFKQHSLRNPIVEQCILETLRTVHDIWKEAGHIDEIHIELGRSMKSTADQRARMSKSILQNENTNLRIKSLLMELKDAKEFENVRPYSPMQQEILRIYEEGALQELTKEDDQYPEISKISQMAQPSAKELLKYRLWLDQKYCSPYTGKPISLSKLFTSAYQIEHIIPQSRYFDDSFSNKVICEAEVNQLKSNMLGYEFIKKHSGEIVHCTMVGDVKILDAKEYYNFVTEHYANNRRKKEKLLLEDIPQEFLNRQMNDSRYISKKVMALLSNIVREEGEQEAKSKFVIACSGGITDRLKHDWGLNDVWNSIVYPRFERLNKLTNTENLADSTCKCTTLQSYKIFS

SEQ ID NO: 4952 - protein, 1066 aa, synthetic construct
  REGION 1..1066: note = Synthetic
VQKRGTGCKINRQTVGNVEVNVLNLRLYDRTDDREVTAGYLPTKEDYVRLFVYLNDRKEINQDTLLKDYFRLKKVKCANEKGFAIRWNYIEDKEKKSPCNETRHELLAALDRAGMEHGWLDDSGRQYRLWHLLYSVEAKDEAEGALRRLKDDDKFVSEFLKIKPFRKEYGAYSEKAVKKLLAVMRTGSLWREDEICTATKERISRIIEGDIEEEIKVRMRHTACPFRSVTDFQGLPEWLACYVVYGRHSETTDIQRWKKPEDLMAYIRKFRQHSLRNPIVEQCVLETLRTVHDIWKEAGQIDEIHVELGRNMKSTAEQRRNMTEKVLRNENTNLRIRRLLMELKNEADIREVRPYSPMQQEILRIYEEGALQELTKEDSEYAEIARISKMAQPSAKELLKYRLWLDQKYCSPYTGKPISLSKLFTPAYQIEHIIPQSRYFDDSFSNKVICESEVNALKSNRLGYEFIKEHGGEIVACTMLGNVCVLNEQEYKTFVTGHYANNRRKRENLLREDIPMEFANRQMNDSRYISKVVKGLLSNIVRTAKEREETSKFVISCTGRITDRLKQDWGLNDVWNSLVYTRFKRLNELTETEAFGHWQDKDRRVFQTSVPLELQRGFSKKRIDHRHHAMDALVIACASRNIIGYLNNESAESPEKREDLRRKLCDKNRIIRKPWESFTQDARAALEDIVVSFKNYVRIINKATNYYERYDADGRKTKAEQKGGEMWAVRKPMHEATYYGKVNLRRKERVSLKAALEDIPSICNRDLRDYINGLVEKHYNKKQVLAHFRSVGNRGNKQHIDKVDVWRFSDGKEEMVATRKPLDTSFDAKRIEAVTDTGIQRILSNYLEAKGGDPKIAFTPEGIADMNQHITAYNNGKQHKPILKVRVSTKLGKKYPVGQTGCKAGQFVVAEAGTNLYFAVYEDGEGNRSYDTIPLNEAVECLKQGLPPVPETREKGDRLKFYLSPNDLVYVPAGDEENEIDRERIYKFVDSSGTTANFIPHRTAGLIYNVDKKLAEALCNGSIIQNEYGVGSPQSKNQRALTGEMVKAVCWKLEVDRLGNILRIIK

SEQ ID NO: 4953 - protein, 1496 aa, synthetic construct
  REGION 1..1496: note = Synthetic
MKNPLTKQEIQKNIMKNVLGLDLGTNSIGWALVQLPEEENVRPNIRMGSRILPMSQDVLSKFESGVTTSQTQERTSFRQLRRIRERYLLRRERLFRVLHVLGFLPPHFDAALGWDRTDGKTYGKFLGHAEPKIAWRRDPSGKNRFLFMDSFGEMLSDFEKHQPQLVADGKQIPLDWTLYYLRHKALQAPLSRQELAWILLSFNQKRGYYQLRGEEEEVDTSKRVEFMTSQVLSVEETSRNARNTTYNINLENGCCVPFTSRASLKDWVGLTKEFIVTTSLNADGTPQLNEDGKPICTYSILEEDNYASRKQRTEAAIEESGLTVGSYIYQYLLKHPEGKVIGKLVRTIDRRYYKEELRAILTKQAQFIPELASAQSLEACIQELYPHNEAHQQSLRRKDLINLIMDDLLFYQRPLKSKKHLIANCPFEQYEYLADRETGEMKVQHIKCIAKSHPLFQEFRLWQFVQNLRLFNSKDINEEEVTALYLPDVEARVRLFDYLNNQKDITQEKLFKGFFHLKKASGKDSQYPLRWNYVEDKVYPCNETRYVFLTALKRAKIKTDWLTPERELRIWQLLYSVDDRVELTKALTHWAQREQLPEEWVESFCKIPPFQKEYGAYSEKAIKKLLSVMRMGSHWDEQALPTNLMENYQSAIGDETESQLLERMGGTVLKQPTDFQGLSLWQACYAVYGRHSEAKDTTRWTRPEDIDAFLHGFKQHSLHNPIVEQCVLETLRTVRDVWKEVGQIDEIHVEMGRSMKSTAAQRERMSRTIRQNEDTNLRIKQLLEEMKVAHIEAVRPYSPMHQLLMRIYEEGALQQLNKESADYQEISSISRKAQPTPAEIHRYRLWLEQKYCSPYTGRPISFSQLFTSAYEIEHVIPKSRFYDDSFTNKVICEAEVNKLKSNQLGYEFIKNHKGQTVHCPALGDVRIFTPQEYEAFVRDHYAGQKTKAQKLMMDDIPETFVQRQMNDSRYISRLMLGLLSHIVRDEDEVEATSRHVIPCTGAITDKLKKDWGLNDVWNSIVTPRFERMNRLTNSENYGYWDNKDGKRVFQTTMPMDEQRGFNKKRIDHRHHALDALAIALASRSIVSYLNNVSAHDACTRQDLRRKLCGPNQTILKPWPTLTQDVCDALHRVVVSFKHQVRVINRASNYVERYDGGGHKRLFPQTGAKQWAIRKSLHKDTIYGHVNLRQIREVALNVALDQVSQIVDRPLRRQIQKLQAEGLDKKKLKAWFAERDFVFNEQSVKRVKVYYFTDEDKPMVAVRKPLDASFTAATIAKITDTGIQRILRNYLEACGGNAELAFSPEGIEQLNSHIAQYNGGKDHKPILRVRLCEPLGEKFAVGESGNKVRKYAEAQKGTNLYLGVYENDEGQRSVATMPLRMVIERLKQGLAPVPETDQQGAKLRFWLSPNDLVYLPTEDEKLIPNIEKLEISRIYKFVSCTGRVAYFLPHHVATIIKDGAEFQTLNKIQTTEDKVNIARNCWKLEVDRLGNIVRIIR

SEQ ID NO: 4954 - protein, 1061 aa, synthetic construct
  REGION 1..1061: note = Synthetic
MRTILGLDLGTNSIGWAKVCVDDNGNYAREIKLGSRIIPMSQDTLSNFDKGVTESPTAERTTFRGIRRIRERALQRRERLHRVLHTIEFLPKHYDEAIRWNREEATTYGKFLNHEETKLAWEKQEDGSMRFLFMDSFKEMMADFAKHQPGMVADGKKIPLDWTLYYLRKKALTQAIKKEELAWILLNFNQKRGYYQLRGEEDEENPTKCEEFYELKVISVEAAEEGKGGNTWYNVKLENGWIYRRQSKTELNDWVGKIRQFIVTTEYEKDGVTVKKDKNGEVKRSFRAPSEDDWGLRKKRTEKSLENSGKTVGAFIYDHILSKPTDKIRGNFIRTIERKFYKKELEAILREQSKHHKELSGHNSLVDCIKELYPNNKPHQDSLMKKDMSYLLITDLIFYQRPLKSKKSLIADCPYEYYEYVVKETGEIKRQGIKCIAKSNPYYQEFRLWQFLINLRLFDRTDDKEVTSEYLSSKDDYSKLFEYLNDKKDINQETLLKDFFKQKKIKMGMEKEYPIRWNYIEDKEKKYPCNETRHELLAALDKAGIDHSWLDDKEQYYRLWHLLYSVESKEEAQGALRKLNNNDDFVNAFLKVKPFKKEYGAYSEKAIKKLLAVMRIGDFWDEANICEQTKNRIHNIINGEIDEKIKERMGRSFTQISDFQGLPEWLSCYVVYGRHSEASDNQRWRTPEDLMAYINGFKQHSLRNPIVEQCILETLRTVHDIWKEAGHIDEIHVELGRNMKSTSEQRAQNSKRILQNENTNLRIKSLLMELKNVKEVENVRPYSPMQQEILRIYEEGALQELTTEDAQYPEIYKISQMAQPSAKELLKYRLWLEQKYCSPYTGKPISLSKLFTSAYQIEHIIPQSRYFDDSFTNKVICEAEVNQLKSNMLGYEFIKKHGGEIVYCTKIGDVKILDEKEYHNFVTEHYANNRNKKEKLLLEDIPQEFLNRQLNDSRYISKKVTSILSNIVRGEDEQEVNSKFVVPCTGGITDRLKQDWGLHDVWNRLVYPRFERLNQLTQSEAFGRWENKEGKQVFQTSVPLELQRGFSKNELTIVIMQWMHL

SEQ ID NO: 4955 - protein, 1480 aa, synthetic construct
  REGION 1..1480: note = Synthetic
MRTILGLDLGTNSIGWAKVCVDDNGNYAREIKLGSRIIPMSQDTLSNFDKGVTESPTAERTTFRGIRRIRERALQRRERLHRVLHTIEFLPKHYDEAIGWNREEATTYGKFLNHEETKLAWEKQEDGSMRFLFMDSFKEMMADFAKHQPGMVADGKKIPLDWTLYYLRKKALTQAIKKEELAWILLNFNQKRGYYQLRGEEDEENPTKREEFYELKVISVEAAEEGKGGNTWYNVKLENGWIYRRQSKTELNDWVGKIRQFIVTTEYEKDGVTVKKDKNGEVKRSFRAPSEDDWGLRKKRTEKSLENSGKTVGAFIYDHILSKPTDKIRGNFIRTIERKFYKKELEAILREQSKHHKELSGHNSLVDCIKELYPNNKPHQDSLMKKDMSYLLITDLIFYQRPLKSKKSLIADCPYEYYEYVVKETGEIKRQGIKCIAKSNPYYQEFRLWQFLINLRLFDRTDDKEVTSEYLSSKDDYSKLFEYLNDKKDINQETLLKDFFKQKKIKMGMEKEYPIRWNYIEDKEKKYPCNETRHELLAALDKAGIDHSWLDDKEQYYRLWHLLYSVESKEEAQGALRKLNNNDDFVNAFLKVKPFKKEYGAYSEKAIKKLLAVMRIGDFWDEANICEQTKNRIHNIINGEIDEKIKERMGRSFTQISDFQGLPEWLSCYVVYGRHSEASDNQRWRTPEDLMAYINGFKQHSLRNPIVEQCILETLRTVHDIWKEAGHIDEIHVELGRNMKSTSEQRAQNSKRILQNENTNLRIKSLLMELKNVKEVENVRPYSPMQQEILRIYEEGALQELTTEDAQYPEIYKISQMAQPSAKELLKYRLWLEQKYCSPYTGKPISLSKLFTSAYQIEHIIPQSRYFDDSFTNKVICEAEVNQLKSNMLGYEFIKKHGGEIVYCTKIGDVKILDEKEYHNFVTEHYANNRNKKEKLLLEDIPQEFLNRQLNDSRYISKKVTSILSNIVRGEDEQEVNSKFVVPCTGGITDRLKQDWGLHDVWNRLVYPRFERLNQLTQSEAFGRWENKEGKQVFQTSVPLELQRGFSKKRIDHRHHAMDALVIACASRNIINYLNNESAKNQTKREDLRKKLCDKNRVIRKPWGTFTQDAQAALEDVVVSFKNYVRVINKATNYYERYEANGKKGMAKQEGHNMWAIRKPLHKETVFGHVNLRRKISVKLKDAIKNVPAICDKELRDYINDLIAKKYNSKQILAHFKDKNYRLNMKYVDKVDMWQFSDEKEPMVATRKSLDTSFDAKRIATITDTGIQKILLNYLSTKNNDPNIAFTPESIAEMNKHIVEYNNGKQHQPILKVRVSEPMGAKYEVGETGNKTKKFVEAQKGTNLYFAIYEDKDGNRSYNTIPLNVVAERLKQGLSPVPDMNEKEAHLRFYLSPNDLVYVPTEEEKQSGDCKLNKKRIYKMVSATGYECLFLPYTISNIIYNKVEFESLNKMGRALTAEMIKAVCWKLEVDRLGNILKIIK

SEQ ID NO: 4956 - protein, 1554 aa, synthetic construct
  REGION 1..1554: note = Synthetic
LKSCCKFNDNIANCKTNFNKMKNILGLDLGTNSVGWALISVDENGNLVKDIRLGSRIIPMSQDVLGKFDSGVTVSQTAERTEYRSHRRLLERALLRRERLHRVLHLLGFLPEHYAACIGWDRNNNATYGKFLPETEPKLAWRKADDGGYRFVFMQSFEEMLDDFSASQPSLVANGKRIPLDWTLYYLRTKALTKPIAKEELAWILLNFNQKRGYYQLRGEEEEETPSKRVEYHELKVVKVEATDEGKGGNVWYNLLLENGWVYRRQSKYSLDKWLGQTLPFIVTTDLEADGVTPKRDKEGNVKRSFRSPKEDDWTLVKKRTEDRLEKSGLTVGAFIYQHLLANPSDKVRGQLVRTIDRKYYKRELQAIIAKQMEFHPELRDAELLKACAEELYRNNEAHRAQLLAKDFKHLLVEDVLFYQRPLKSKKSLIANCPYETRQYINKETGEIKDVNVKCIAKSNPYFQEFRLWQWISNLRLLRQADGQDVTAAYIKGNEDKERLFDLLNNQGEIKQEHILRDFLKLKKPKGGEFPLRWNYVGDKIYPANETRHAMNKAIKGMTVDKEEKETLGQLLDQPAVAYMLWNLLYSITDRNELASALRRFALTHGVSSVDAFVESFLKVKPFKKEYGAYSEKATKKLLQVMRLGKYWCGDELPEPAKRTKGNKQAVYDEMANRGICKQTLQNISNIIEEDIDERLMGALLNPDRPLTELSHFQGLSVSDACYVVYGRHSEVAEIVKWKDAGELNTFINNFKQHSMRNPIVEQCVLETLRTVRDVWEQEGQIDEIHVELGRNMKRTAEQRARDTQAIQRNENTNMRISLLLTELKNDPSISDVRPYSPSQRELLKIYEEGALENLTNQDEDIAKISRLAQPSASELRRYKLWLDQKYVSPYTGRPIPLAKLFTPAYEIEHIIPQSRYFDNSFSNKVICEADVNKLKDNLLGMEFIKKFGGKTKGILDEEAYKLHVTTNYAHNPAKRSKLLMEDLPTDFNSRQLNDTRYISKTVMALLSNVVREEGERETRSKHVVVCTGGVTDTLKKDWGLHDVWHNLVYPRFIRLNNLTGSQNFGYWRYLNEENRKKGEDSRKVFQITLPLDLQRGFVKKRIDHRHHAMDALVIACASSDIVNYLNNQSAANPHARQDLQRLLCDRKREIRKPWPTFTQDAQKALEDLVVSFKNTVRVVNKASNTYLRYDKDGKKKRFKQEGEGLKAIRKPMHKETYYGEVNLIRKEMLPLKRALDDVNAIVDKELRACIKGLLRDGFNLQQVLANFKAKDFKFDKRDIKKVEVYVSSEKSTPMVATRKSLDTSFNAKRIADITDTGIQKILLNYLKANDNSPEQAFTPEGIAYLNEHIAEYNNGKPHQPILKVRVSDVMGAKFAVGQMGAKKTQFVVAESGTNLYFAIYEDKEGKRHFETIALNVAAERLKTGQTPVPETNDAGLPLKFYLSPNDLVYVPTDEDRAAAHPSIDKRRIYKMVSATEGKCHFLPVSVASIIADKVEFEAMNKIGRVIDALEYKEKSEEKSEEENKTSAGSKVMIKDVCWKLEVDRLGNITKIVR

SEQ ID NO: 4957 - protein, 1501 aa, synthetic construct
  REGION 1..1501: note = Synthetic
MKNILGLDLGTNSIGWALLSVDEDDNIIKPQIKLGSRIIPMSQDVLGKFDSGVTESQTAQRTQYRGVRRLRERCLLRRERLLRVLHTLNMLPEHFDNSIGWNKNDNKTYGKFKDASEPKIAWRKNENGKMEFVFMSSFLEMLDDFAEHQPELVADGKKVPLDWTIYYLRKKALSQAISKQELAWILLNFNQKRGYYQLRGEDEEEHSDLKKEEYYTLKVVGVEATDEKRGNDTWYNIHLENGWIYHRSSKVPLNDWKGKVKEFIVTTEYEPDGTVKTDKEGKEKRSFRAPKDDDWNLQKKRVESNIESSGKTVGTYIYDTLLAMPSEKIRGKLVRVVERNFYKQELLAILKKQVEYIPELTNKDLLEACIKELYASNTAHQDSLRRKDLTYLLVNDLLFYQRPLKSKKSLISDCPYEQYEYIDKETGEVKTQHIKCIAKSNPYYNEFRVWQFVQNLRLYNRGINEEEVTSQYLKDEYDYERLFHFLNDRKEITQEALLKEFFSIKKSKGKDAKYPLRWNYAEDKSYPCNTTRSILLNSLRKSGIDTELLKDGNIEYRLWHLLYSVEDKNEVDGALKNFACENNLPDTFVEVFKKIPSFKKEYGAYSEKAIKKLLSVMRMGSMWHEEDIPESVDAIISGEIDDKIAARVSRSGYTFPSKQSCKGLPEWLACYVVYGRHSEASDIETWEKPEDLAYYIRNFKHHSLRNPIVEQCILETLRTVHDIWQKYGKIDEIHIELGRSMKNPANIRKEITERIQRNENTNLRIKQLLLELKNDANIKDVRPHSPMQQEILRIYEEGALQELKREDDDYADIERISRLASPTQSELIKYKLWLEQKYRSPYTGKTISLSKLFTPAYQIEHVIPQGRYFDDSLSNKVICEAEVNQKKSNMLGMEFIKKCGGEIITCSTLGNVKVFTEDEYSKFVEEHYANNRSKAKKLLMEDIPEEFIQRQMNDSRYISKVIKGLLSNVVREEGEIDAISKNVIPCTGGITDRLKKDWGLKDVWNTIVYPRFERMNQLTGTEDYGHWENKEGKRVFQTAMPLELSKGFSKKRIDHRHHAMDALVIALASRNIVSYLNNDSAHDTKYREDLRKLLCEKNRTIRKPWDTFTEDALKALQDIVVSFKHYIRVINKATNYYEHYDEKGNKAFVKQEGEDMWAVRKPMHKETVFGHVNLKRYKEVPFSKALANVNRISNKELRDAINVMLGAGMNIKQINAQFKKGEYKYLGHDYTKVKVVYFTDETEPMVATRKLLDDSFDEKKIASITDTGIQKILLAYLHSKDNNPKLAFSPEGIMELNEHIAEYNNGKKHQPIIRVRVSEPMGEKYNVGFSGNKNKKYVEAQGGTNLYFAIYENEEGRRSYQTIPLNEVVERLKQRLTPVPETNEAGNKLKFYLSPNDLVYVPDEEERISDVKNLNRERIYKFIDSSNTTANFIPAYSASVIYHLPKDIAIKHSKSDRIIQDEYGEGSPQSKNQKSISGAMIKSCCWKLEVDRLGNITKVIH

SEQ ID NO: 4958 - protein, 1437 aa, synthetic construct
  REGION 1..1437: note = Synthetic
LPEHYAACIGWDRNDNATYGKFLPETEPKLAWRKADDGRYRFVFMQSFEEMLDDFKASQPSLVANGKRIPLDWTLYYLRTKALTKPIAKEELAWILLNFNQKRGYYQLRGEEEEETPSKCVEYHELKVVKVEATDEGKGGNVWYNVLLENGWVYRRQSKYSLDKWLGQTLPFIVTTDLEADGVTPKRDKDGNEKRSFRSPKEDDWTLVKKRTEDHLEKSGLTVGAFIYQHLLANPSDKVRGQLVRTIDRKYYKRELQAIIAKQMEFHPELRDAELLKACAEELYRKNEAHRAQLLAKDFKHLLVEDVLFYQRPLKSKKSLIANCPYETRQYINKETGEIKDVNVKCIAKSNPYFQEFRLWQWISNLRLLRQADGQDVTAAYIKGNEDKERLFDLLNNQGEIKQEHILRDFLKLKKPKGGEFPLRWNYVGDKIYPANETRHAMNKAIKGMAVDKEEKETLGQLLDQPAVAYMLWNLLYSITDRNELASALRRFALTHGVSSVDAFVESFLKVKPFKKEYGAYSEKATKKLLQVMRLGKYWCGDELPEPAKRTKGNKQAVYDEMANRGICKQTLQNISNIIEEDIDERLMGALLNPDRPLTELSHFQGLSVSDACYVVYGRHSEVAEIVKWKDAGELNTFINNFKQHSMRNPIVEQCVLETLRTVRDVWEQEGQIDEIHVELGRNMKRTAEQRARDTQAIQRNENTNMRISLLLTELKNDPSISDVRPYSPSQRELLKIYEEGALENLANQDEDIAKISRLAQPSASELRRYKLWLDQKYVSPYTGRPIPLAKLFTPAYEIEHIIPQSRYFDNSFSNKVICEAEVNKLKDNNLGMEFIKKFGGKTKGILDEEAYKLHVTTNYAHNPAKRSKLLMEDLPTDFNSRQLNDTRYISKTVMALLSNVVREEGERETRSKHVVVCTGGVTDTLKKDWGLHDVWHNLVYPRFIRLNNLTGSQDFGYWRYLNEENRKKGEDSRKVFQITLPLDLQRGFVKKRIDHRHHAMDALVIACASPDIVNYLNNQSAANPHARQDLQRLLCDRKREIRKPWPTFTQDAQKALEDLVVSFKNTVRVVNKASNTYLRYDKDGKKKRFKQEGEGLKAIRKPMHKETYYGEVNLIRKEMLPLKRALDDVNAIVDKELRACIKGLLRDGFNLQQVLANFKAKDFKFDKRDIKKVEVYVSSEKSTPMVATRKLLDTSFNAKRIADITDTGIQKILLNYLKANDNSPEQAFTPEGIAYLNEHIAEYNNGKRHQPILKVRVSEIRGTKFAVGQTGSKKTKFVEAQSGTNLYFAIYEDKEGKRNFETIALNVAAERLKTGQTPVPETNDAGLPLKFYLSPNDLVYVPTDEDRAAAHPSIDRRRIYKMVSATDKNSFFLPFEVASIIADQVEFEAKNKVGRVIETLEYTEQYESSAINKIMIKDVCWKLEVDRLGNITKIVR

SEQ ID NO: 4959 - protein, 1143 aa, synthetic construct
  REGION 1..1143: note = Synthetic
MTVWRLGLDVGSNSIGWAAIGLDADGRPCRILEHGNEKRFLSGAGVRIFPDGRNPKDKQSLAAQRRAPRGMRRNRDRYLQRRQDFLKKLVEFGLLPADEAERKVLENPTGKKHNRNIEVLKDYDPWCLRARALNEPLEPFQVGRALFHLQQRRGFKSNRKADKEAKDGKISQGAVVTLARMQERHARTLGELFGRPRLEGNLHASTRARLSGEGTKAFYDFYPTRDLILDEFEKIWQVQATYHPTILTREAHDKLYSILSFQRPLKPQPVGRCTLEPETDLRAPWALPSSQRRRIYETLNAMHYRKPGEAAEWLTTEQRDILAQKALGTKDLTFDAMRKALKFHDDVKFSIESEKRKKIEGDHTAAILANKNLWGKEWRKLPVVEQEAIVELLLGLEPLTEKIPVHVRQVAEAVMGQVANTFAMTRSEAENLLTSSDPNVLANWLSERYGLSLVNASNVVEANLPDSHQGLGRRANARVLAELMADDAPFYSDAVVRAGYRDHRAIEGQGEVHDRKLPYYGEVLERSVAFGTGDPRDTLEKRVGKIANPTVHVALNQLRKVVNRLMERYGAPTEVVIELARDLPLGAEDKRKLEREQRDNQNANEQREKILNEYGIRNTYVNRLKLRLFEELTRGKATNGQCLLSGEQFGLAKLLSDEIEIDHILPFAQTLDDGFNNKILVTRRANRDKARRSPYEAFGTSPSGYDWEEIASRAANLPPQKSWRFSPDAMERYENEERDFLERQLNDTKYIARLTRTYLGAIYGGGDEAAKHVWVTPGRLTSDLRSVWGLNRILDGNKPSDEPDAPSRKNRDDHRHHAIDAIVVALTDRAMLKKAADHAKLQNSEVSSERMLAALGEPWKGFREDVERHVNAIIVSHKKDHGIEGQLHEDTNYGVVQSPQGDGQKLATRKPIVSFQKYSQLQDIADNRIREELMERTYGLSDSDFKQALHDYVNEQKPGRRTNPRRVRIHKPITESTPLRQIHHGGMGEYQRGVLAGENYCLDIVETPDGKWHCREISRFDANRLKGSDEAEVPGWMEDNPEALLVMRLRKGDMIAVEDVPGKIEYKRVVRLEPSANRVRLARDREAGDYEKRHTDRDDLFSWDFATISKLKARKARLVHVDEAGRVFDPGLRHAGTDCRDIK

SEQ ID NO: 4960 - protein, 1142 aa, synthetic construct
  REGION 1..1142: note = Synthetic
MTAWRLGLDVGSNSIGWAAIELDANGRPCGILEGGNDKQFLPGAGARIFPDGRNPKDKQSLAAQRRVPRGMRRNRDRYLQRREDFLGALVGFGLMPADETERKTLENPTGRKRNQDIEIRKNFDPWCLRARALNEPLTPFQIGRALFHLQQRRGFKSNRKADKEAKDGKISKGAAETLMRMQEKNARTLGELFGRPRLEGNLQASTRARLSGEGTKAFYDFYPTRELILDEFDKIWQAQTPHHPALLTRVAHDKLYSILSFQRPLKPQPVGRCTLEPETDLRAPWALPSSQRRRIYETLNAMHYRKPGEAAEWLTREQRNLLAEKALAKKDLTFDAMRTALRFHDDVKFSIESEKRKKIEGDHTAAILANKKLWGKEWRKLPVVEQEAIVELLLGLEPLTEKTPVHVRQVAEAVMGQAAKTFAIARSEAEHMLTSSDPDVLANWLSERYGLSPENASNVVEANLPDGHQGLGRCANAKVLAQLMADDLPVYSEAVIRAGYRDHRAIEGQGEVHDRKLPYYGEVLERSVAFGTGDPRDPLEKRVGKIANPTVHVALNQLRKVVNRLMDRYGAPAEVVIELARDLPLGAEDKRKLEREQRDNQNANEHRERILREHGVRNTYVNRLKLRLFEELTRGKATNGRCVLSGEQFGYAALLSDKIEIDHILPFAQTLDDSFNNKILVTRQANRDKARRDPYTFAQEQAGYDWEEISARAADLPPQKSWRFSPDAMERYENEERDFLDRQLNDTKYIARLTRTYLGAIYGGGDEAVKHVWVTPGRLTSDLRAVWGLNRILDGNKASDEPDAPSRKNRDDHRHHAIDAIVVALTDRAMLKKAADHARGQDPEVSTERMLAALREPWEGFREDVETHVNAIVVSHKKDHGIEGQLHEDTNYGVVQNPQGDGQKLATRKPIVSFEKYGQLQDIADNRIREELMERTYGLSGADFKQALHDYVNEQKPGKRTNPRRVRVHKPVTESTPVRQIRHGGTGEHRRGVLAAENYCLDIFETPDGKWQCREISRFDANRLNGSDQVAVPGWMKDNPEATLVMRLRKGDTLAVEDVPGEIEYKRVVRLEPSANRVRLARDREAGDYEKRHTDRDDLFSWDFATISKLKARRARLVHVDEAGRVFDPGLRHAGTDCRDIK

SEQ ID NO: 4961 - protein, 1137 aa, synthetic construct
  REGION 1..1137: note = Synthetic
MMWRLGLDIGSNSIGWAALCLNEALRPTGLLEFGTGEHFVPAAGVRIFSDGRNPKDKQSLAAQRRVPRGMRRNRDRRLERREAFLWALIEASLLPADLAERKALENPIGGGQTQDSLRDFDPWCLRARALNEPLSPYQIGRALFHLQQRRGFKSNRKTDKDAKDGKISMGAAETLARMKDRNAHTLGELFGRPRLEGNLHASTRARLNGEGTKAFYEFYPTRDLILKEFEKIWETQAKYHADLLTEDARERLYDILSFQRPLKPQPVGRCTLEPETDLRAPWALPSSQRRRIYETLNAMHYRRPGEAAEWLTLAERDLLAEKALGKKDLSFDAMRTALRFHDDVTFSIESEKRKKIEGDHTAAVLASKKAWGPDWRKLPLAEQEALVELLLGLEPLTKRTPPHIRAVSTQVIAAVAGVFKLEESAAEALLISSDPEILATWLSERYGLDAEKARSIVDVPLPDGHQRLGRRANSKVLAQLMADDMPVYSDAVERAGYRDHRAIEGHGVVHDRKLPYYGEVLERSVAFGTGDLQDSVEKRVGKIANPTVHVALNQLRKVVNRLIERYGPPEEIVIELARDLPLGADDKRKLEREQADNQKANKARAKILSDHGARNTYTNRLKLRLFEELTGGKATNGRCVLSNTQFGYAKLLSDEIEIDHILPFAATLDDSFNNKILVTRQANRDKARRSPYDAFGTSPTGYDWDEIASRAAELPPQKSWRFGLDAMERYEAEERDFLDRQLNDTKYIARLTRTYLGAIYGGGDEAMKHVWVTPGRLTSDLRAVWGLNQILDGNRASDDPDAPSRKNRDDHRHHAIDAIVVALTDRARLKAAADHARSQNPEVPSERMLAALEEPWPGFRGDVERHVNAIIVSHKKDHGVEGQLHEDTNYGLVQNPHGAGQKLTTRKPITSFQNAGQLQDIADNRIREELLERTYGLTGNDFKQALQDYVDEDKPGRRTNPRRVRVHRPVTDATPLRQIQHGQARQHVRGVLAGENYCLDIFETSDGKWQCREVSRFDANKPGRNSRADASPAWKAEHPDARFIMRLRKGDTIAVEDMPGEVTYKNVIRLSPSNNVIYLATDNEAGDFSNRHKDDNDLFRWDFANIGKLKNRKARLVHVDEAGRVFDPGPPHAGTDS

SEQ ID NO: 4962 - protein, 1121 aa, synthetic construct
  REGION 1..1121: note = Synthetic
MAPMENEKIFSFDIGTGSLGTCIRKGSEIELLDVETLPSDFATVKEARERRRQIRTRIAHKKREEWWKEHAQKAGIEVLETGHLNEKGEYIKPDTRLTREFQKKGDPTIYNSLLLRIALLHGKKLEGWQIYKAIWSAIQRRGYDINLPWKSKIKEAKEEDNEEQQSDKKRKKKEKKANNEENDEKQVEEAVQKYKEEMKKCFGEKQEFYYPSFFDAFRLGIWDPDDSENYSKTIDENAKPIRNKYGEISTIAPAEMVDKELKQLLVQAGKQYPYIEKNLNYILYGPTGCKYGAYLLKDYRKYMGRDVEWQGLLSQKTPRFDNRIVYKCRLIPRLNVCKRKDPLCKEITFLMKLKNFRYVEAETGVEKSLTPKEISELFETHKNNFHIAESKLKNYLQKKLNGIVHPSFKTIEAPKEKGRASFCRPAMKIIKDIILSGKSPHESYQEYISNNQNTDPKKGLINEDYKFLLAMPDSWDKFHIPDTREEEAQLDEEERIKKIHEIFSKISNPVVRHRLLLFYQKLQKIKEKFDEPDKIVLEFARDPENTIAGKKKKEQIMKQQKENEKINKQVRDKLNDLKEHGVQIEGKKAFLKLKLWMDQGGKDIYQHARDPYSETNIPATEINNCEIDHIVPREKGGPDAYYNLVLTSRANNQAKGKQTPYEWLGKDITQWNKFIDYISSFNKSEKNKGDKKTDKFGLPKKKIRLLISDNPEELLEKYTHLAETAYISRLAQKICHLFFGWEQLTKGSERKVFVVTGNFTSRIRNIFELNQILEGEETNEEDSNSETNDQDESTDSKQNKKKKNRDNPRHHALDALIISITPEIKFNPEKGKDEYPTWFNKDFCIEKLEKCLPLKIRFVKPKLAETIYGLRKYIDDNGKITDDYVFVTRFGTGTDIRDYLKIFSKKAEERKKYRNYIKSIYSSKIRKDFENKLKNNPTKEEWEIFLHNYRAGGKPKKLLLIEGEKIKSEDVEKFLKGEINNLGEFIKGKMPGQYLKQKKESHGYFVVKNNKGKWERIPIYVFESPYKKKKEILIRYKDKEIYFFKSGMIVEIKESFKYQKRIKNNTDKKDSTIIVDKGKYYLNTINETKQCKITQIDGKEITLQLDTLMDLGKMRPAQNIL

SEQ ID NO: 4963 - protein, 1126 aa, synthetic construct
  REGION 1..1126: note = Synthetic
MFVKAGVDLGTASIGFMVWGVNDGLYEPLYHEVRIFKEPAENTQSGMVMKTVQRRDARQARRQQKRYSRRMNGLKNLGVFLGLSKCDIAGRRSIYLTELRADAAQGKIELKDFFHVLIRIAKRRGYAGGFTKTLEGDVAKGASELQERMNALAESKGVPSVTLGQFIHHHYLQGNPTYLKAQVGLRNSFDDEARTALFALREMVIDEFNTIWDEQAKHHEVLNKIIDGRALKSRVFDAIFFQRPLKAPRAMVSPCIYEPTLARAPCAHPAYQTYRIETLIANLRWGGGKRAERLTVEQAQFVRDILNGRNDKCLGKVDGVFNIKDVLKALKDANLHDPMERTLNVNGHGRETIVGNTTITRMRYYGWLDDWRRLESKHQTGVINLLADIGDPALFMPSDWHKNLLKDKHKQGQSKYRTIPDEVVLFIEKMKATKKGNGEDAFDRLSKMEFSSGRASYSIKALNNLNQWFVEAWAKGIDVISDYHAQQDCYGHRAKTKADTETMSRMISSPPKTGNAVVDVALRELKGVLQRFSDTTGHFIDEIVVEMNREVGLGIKARNDLNSQMRFNEKTNGIIRKALSELHKAPTPSNIRRYKLWEEQQNCCPYCAGKISVRDALDGSVTNYEHIIPRSLTQVGLKQSEIILAHASCNHEKGNRTPFDAFGHDETRWDIIQNRAKSLIETASKLKGSQAYNLKRKAELLRIKDYEIDVMTDESIADFADRQFHQTSWISKTATQWLKEFIPAVYPTSGRFTAKLRHQWGLNTIIPATRIKEGLSVSVVTTDINGNEVIKPIDTELFKKHRTFWEGKGDGIWTADQLYKRNDHRHHLIDAITISLMSRSMFIQMIKESQRKGDDTRHLSAPLPMPHPSLYVVAEHMIENTNISHKPDRHIEGGFFQDTIYSRDKNLIARIEADGGKITATTGLCKKTTILDLKGNSESATRDNINRIVSEQTKFLILNAFNERIASGISWKEALTVPVFNPVNQNYISKVKLFASPAGQPIEQDSHLYISDGYAYLDVWSETIIKNGKEKLESKSELVSIYDAHLRRSNKNILCKDRKRFFIGDTILDKKTGSIEVIRQLKMEGPTILLQHLTDISEPKKLRKVSGKRLADIEVIDNVRASDPDI

SEQ ID NO: 4964 - protein, 1127 aa, synthetic construct
  REGION 1..1127: note = Synthetic
MQTIWGFDLGVTSVGFAVIRWDGWSTPEGNGEIVRLGVRVFPETREIDTQGPGAPLNAGRRQKRLMRRQVRRRRWRRVHLRALLAEAGLLPDERAQPPTGQDPYALRARGLEGALSAEEAGWAIFHLLKRRGFQGSRKVGPVEPAPATAEVDDEEAPRGRRRRGRALASPPEPADERAREEAEERARGEALAARMAGRKLAIYLQSDDHLKPDGTTPALWDTPRRRAVGQTRPMVREEFEALWAEQAKHHPTLLTPDLKARIETVALAQRPTFFRARTVGTDDLEPGEPRALKAEWLTQRFEMLQLVNALRLERGNQRELDPAERAMAIAYLETERRPTWAGLRAAIGIGRSDRFTHERGEKATIRGNATEAALRTALGAAWDALPEAMRETIRAEIGRTWHRIEYRPTKGGAILEIHDHVGIAAERAALAERARTEWGLPPQAAEALSRLDLPDGAARHSLAAMRTLLPLLESGVPYMTAVERVYGAHRDSGAPLARLPVPNLSELDKVKDAWVRERMAALLAGIRNPTVLRTLSELRKVVNTLLRAHGRPDVIRLEFARDLKQSAEERRETDKRQRERERARDEARKKVAELGKPAEGPEGEENVLRWLLCKEQGGRCPYSHPGKTISCTEALDPTATQIDHIFPVSRSFDDSQANKVLCFARENAAKGRRTPFEWLSGDADRWTHLTTIVWPQMKNAGWPEAKLRRCLKARLEDPETDEAGFTNRQLVDTAFIARAARPYLGLLFGGGQAGLDAVQPVPGRATALLRRAWGIGLGKLLDLGDDDGLKVREDLRHHAVDALAVALTTPRTVAELSRWWQRRETGPRPPGFHLPWPGFREDAKTAVEAILVSHRVQAKLSGPLHEETRLGDTGQREAAGSAIYVKRKAVADLSASEILSTPEDGGDAWIADAGVRQAILDHLAANGLVLERKKRGKAADGTAQRRLKALLAQEIRLPLTDRVRRKWAKFGITAERGPVIRRVRLHMRRKEGVMRVHATKNIHAELGPGTNHHIAIYRDGETIRYLVATKREALVRVQRGEPAVRPEHPEGGRLVMALRPRDVLCRENDGLRQFALVRKVNAAGRIFYKPLHSANEPKPEVSLGPSCVNDGWRKISVDPIGRWRPAR

SEQ ID NO: 4965 - protein, 1106 aa, synthetic construct
  REGION 1..1106: note = Synthetic
VASVGFAVVCWDGWRSPDGEGEILALGVRAFSETRDEKSKEPLNAERRRKRLMRRQVRRRRWRRVHLRALLAEAGLLPGKDATPPQGQDPYALRARGLAGPLGAEEAGWAIFHLLKRRGFLGSRKVGPPTTEPLAARETPKRGRRRKTEESSSQSASAGTQARDSDEREAEERGKALAARLAGRPLAVFLQSDEHLRPKGEETPVWDLARRRGVGQTRDMVRAEFEALWAEQARHHPGLFTPALKARIETVALAQRPTFFRARSFGEDDLEPGEPRALKAHWLVQRFETLQLVNSLRLEGGNQRRLDAEERAKALDFLERVARPTWKGLRDAIGLSRAERFTHERGAKETLRGNATEAALRTALGETWDRLEPGLRDAIRREIGPAWHRIEYRPVKGGGILEIRDWQGIAQERAKLAERARAEWGLAHEEAERLAAISLPDGTARHSLKAIERLLPHLEAGLTYMEAVEREYGSRRDATAPLPALPGPNAGELHRIGDPVVRERMRALLAGIRNPTVLRTLGELQKVVNTLLRVYGRPDVIRLEFARGLKEGPKQRDETDRAQADRERLRKQAREEVRKLGRPAEGPEGEENVLRWLLWHEQGGVSPYSGEPIGAAEALDAAATQIDHIFPVSRSFDDSQANKVLVLAGENAAKGRRTPHEWLSADADRWTHLTQVVWPRMVEAGWPEAKRRRCLKAALEDPEADAEGFTARQLVDTAYIARAARDYLGLLFGGGQAGLNAVQPVSGRATALLRRAWGVGLGKLLGGGDEGDKVRDDLRHHAVDALVVALTEPRTVQALSRWWQVKETGLRPPPFDFPWPGFREEAKAKVASILVSHRVQAKLSGPLHEETRLGDTGEREPDGSVIYAKRKPVAELTASEILGGRDVWIADAGVRQAILDHLARHGVVLERRKRGAEKDAKAERELKRLLAMEIRLPLREETKRRWADHGVAAETGPIIKRVRLNLRRKDGVMPVHRHKNIHAELGPGTNDHIAIYRDGETVRFLVATKREAYERVRRGEPAVLPVHPEGGRLVMALRPGDVLRREVDGAQAFVLVRKFNANGRIFYKVLHSSKEPRPEVSFGPSCVRDGWRKVAVDPIGRWRFAK

SEQ ID NO: 4966 - protein, 1171 aa, synthetic construct
  REGION 1..1171: note = Synthetic
VISLKLYCKYISLKRQNQIIMKKILGLDLGVASIGWAYLEENNEKSRIVRAGVRIVPVADQEDDFRAGRSVSINADRTRYRGMRRNNQRWKGRRDKIVTLLESIDMYDEALINLHKTDLYALRARAVDEKITLSELGRVILHLTQKRGYKSNRKTDASPDETTEYLDKIKENSEALETKGQTIGQYFHEKFKTEPHTKVRQQIFYRHNYQDEFEQIWTRQHKEYPDILTDELKHEIGTRTLFYQRPLKSQKGLVSRCQFEQNMRVAPKSSPYFQAFRIWQNINHLKITDDETRKFDLTLKDKQKLFAFLNKKDSSKKSGILKELGYSSKKFDLNFDEVQGNRTKSRLLKIFKDNDIQDTSILDFDALAKDPENQAAYRLWHLLYSIEEPEHLYKALVEKFGFTREQAIAVSKCKLEKDYGNLSAKAIKKILPHLMNGDKYSDACGRVGYKHSDSMTNEENENRRLAEYIELIKRGDLRNPVVEKILNQLVHLVNEIIADEELGKPDEIRVELARELKMNAKKRQQVNKSYGERKKANDKIKALLQAPPFNFKNVSRNALDRYKLWEETGGISVYTGEPIKLAHLYDKSLYDIEHIIPKARLFDDSFLNKTICESSINKDKDASTAHDYMEKKGEKAYQSYVQRVKQIKSKPKRERLMMAEKDIPEGFIERQKKDSQYIARTAMKMLETVCRKVNSTTGSVTDVLRHQWGLTDMMKELNFEKYKKQERIIWRERPSGERYFVIEDWSKRDDHRHHAMDAIVVACTKQGYIQQLNNLNKTFVNDKTQRVLRTSSRKFALPWTNFRQDARKALSDALISFKSKQRVATKNKNKIKHRDKNREPQAVLTPRGFLHKETVYGKMKRYAENRVALNGRFSLETIENIAHPIEKQAVIQRLAAFDNDPKKAFKGLDKNPIIVEGKRKPLTQVVVWETIYTIKKTLNMLNKKQIEKDILDVRISRLVNERLAEHGGDLKKMVASLEEQPIWVNEAQKICVKSVKLKTDLKDLKPLHENEQGKPIDFVNLRNNHHFAVYEDEKGKFQFEKVSFWEAFERKKNGFSVIKTQHEKGWRFVVSLAINEMIVFPKGNEEIDENFILNPDNYAVVSEHLYRVQKLSSTAKGAPNLSFRHHLATTLKDDNQLIHVQSLGRLYNIYKVSINRLGMITDVQKIAPAKK

SEQ ID NO: 4967 - protein, 827 aa, synthetic construct
  REGION 1..827: note = Synthetic
VISLKLYCKYISLKRQNQIIMKKILGLDLGVASIGWAYLEENNEKSRIVRAGVRIVPVADQEDDFRAGRSVSINADRTRYRGMRRNNQRWKGRRDKIVTLLESIDMYDEALINLHKTDLYALRARAVDEKITLSELGRVILHLTQKRGYKSNRKTDASPDETTEYLDKIKENSEALETKGQTIGQYFHEKFKTEPHTKVRQQIFYRHNYQDEFEQIWTRQHKEYPDILTDELKHEIGTRTLFYQRPLKSQKGLVSRCQFEQNMRVAPKSSPYFQAFRIWQNINHLEITDDETRKFDLTLKDKQKLFAFLNKKDGSKKSGILKELGYSSKKFDLNFDEVQGNRTKSRLLKIFKDNDIQDTSILDFDALAKDPENQAAYRLWHLLYSIEEPEHLYKALVEKFGFTREQAIAVSKCKLEKDYGNLSAKAIKKILPHLMNGDKYSDACGRVGYKHSDSMTNEENENRRLAEYIELIKRGDLRNPVVEKILNQLVHLVNEIIADEELGKPDEIRVELARELKMNAKKRQQVNKSYGERKKANDKIKALLQAPPFNFKNVSRNALDRYKLWEETGGISVYTGEPIKLAHLYDKSLYDIEHIIPKARLFDDSFLNKTICESSINKDKDASTAHDYMEKKGEKAYQSYVQRVKQIKSKPKRERLMMAEKDIPEGFIERQKKDSQYIARTAMKMLETVCRKVNSTTGSVTDVLRHQWGLTDMMKELNFEKYKKQERIIWRERPSGERYFVIEDWSKRDDHRHHAMDAIVVACTKQGYIQQLNNLNKTFVNDKTQRVLRTSSRKFALPWTSFRQDARKALSDALISFKSKQRVAKCL

SEQ ID NO: 4968 - protein, 1062 aa, synthetic construct
  REGION 1..1062: note = Synthetic
LGIASVGWAVIEYDDENFDPETGEVIEGKIIACGVRCFPVAENPKDGSSLALPRREKQLLRRITRRKARRMLGIKRLFVAKGLADSVKELEQVYAAQSGGDVWNLRVEAFERELNKKELMRVLTHLAKHRGFKSYRKAAEKADKEGGRILSAIRENCNQASAFQTLAQMVVERAKNSDHHKMRNYTPKEGKDKNVAVYVNSIPREEIEKETALIFAAQQKYGVFTEDLYRDFCRIAFRYREAGSVGKMVGKCRFENDEFRAPKEAPSAELFVAMSKINNLKLTIDGEHRFLNDEERQALLELLKNTKEVKYSTVRNKLFKGRQVFFDDVNYVSKSKKDKNGEEKAVNPEDVKFYAMKGWHKLKAEFSPEQWKEVCLNLPLLDIGMTAVACEKNDDGIERFLSEKGIASEYQEVFKRLTSSEFINLSLKALYKINPCLAEGMKYHEACEKAGYDFRDSGERLVEEKSLLLAPIAEEKQTTVPVVNRAVAQFRKVYNAMVRTYGAPDQINLEVGRDLKKNHDERRQVEQRQKKAEAERSEAKDELTKEGVSASNKNVLKYRLYQQQNGKCVYSGKAIDLRRLDENGYCDIDHIIPYSRSLDDSQNNKVLCLAEENRKKGSQTPYEYLQPLGRWEEFETIINTTPSINRLKRNNLLNKTYKEQEEDVAFRERNANDNSYIARYVKQYLEDGIDFSASQWPIKTRIQVRTGSLTDYLRHQWGLIKNRDAGDKHHAQDAIVIACATQGMVQKLSGLSAVFENKEAFRKRKAEELGHEKAEAWYKYIKRQIQEPWSGFRAEVLNKLDQVFVSRPPRKNATGAAHKDTIFSNNKNKGSLPIRNGMAEKENMFRLDVFQKEGRLYIVPIYVVDLVSGKQFVDAPQPNEYSDDCLVTINADFNFKFSLYKDDYVEINSGDEHIKGYVNQYNAQSGQLYIGSTDNSRLYKIKTSTFEQGDHIILEINGEERIGEIGAFDAENQKIIIEGMGISYAIDGVVKVNKKGEATKNIKTSQGYVKLSAEKKISLNVIERLRKYQVDPLGRIVEVKKETRLPLTMMKKKPHPKSKTGE

SEQ ID NO: 4969 - protein, 1051 aa, synthetic construct
  REGION 1..1051: note = Synthetic
MQKIIFGYDLGIASIGWAAIKFDDESFNPDTGEVFEGRILGAGTRCFPVAENPKDGTSLAEPRRMMRLSRRACRRKARRLLGLKQLFVKKGLAESLERIKKIYSQKGKVDVWTLRAEKAFNEELSKDELIRVLIHLAKHRGFKSYRKAVEEQDKEGGKVLSAIKANKALLTDNKTLAQIIVEQAGISGKKRNRAIKDSKGKVKEIIYNNSISRDEIEREVECIFDAQKKYGIFTEELLEDYKNIAFRHRPVGSIADMVGVCRFEKGEKRAPKEAPSSELFVALTKINNLSVIENGNMRQVTDEERKRILEVLKTTKKVTYKTLKSKVFGKDISIKGDTDTKNLIFYEMKGWHQLKSQFDKEQWAELEKDIPLLNKVVEIIACEKNDEKIKEELKKVNISDENIKVFCGYNFSKFIHLSLKAVDKIIPFMMQGDSYDKACEKAGYDFQENVNKLVSKKSKFLEPIPQDQMTTVPVVNRTIAQFRKVYNAMVRRFGVPDQINIETGRDLKKNHDERRKIEQEINQHREERSISADELKNMGMADNAINILKYRLYQEQDGKCIYSGHSIDLNRLDETGYLDVDHIVPYSRSLDNSQTNKVLCLSSENRKKGNKTPYEYFKDLKTMQQWDEFVARVNLLRNYKKKEKLLIENYEERELKFKERNANDNSYIATFVKRYCEEGIDFSLSSRQDIKNRVQVRNGALTDYLRHQWGLQKDRNESDLHHAQDAIVIACATQGMVEKLSRLSSIFENKEKYRERKARELGHEEAEAWYKYIKSTVREPWCNFRNEVLKTLKNIFVSRPPRKKATGSAHKETIYSKRLGKGSLPIRGGMAEKENMFRLDVFKKDNQYYIVPIYVVDLVKKDGFQDAPQPYKYVDGKLVLIDETYQFTFSLFKDDYVEVFTEGEVFKGYINQYSAQTGQLYLGSVDNSTCYKIKTDTFIVDDKILLPNQEHDCVATVKLFDKMKQKMIVACNGKDLELDASLKLNKKGEETKNIQTLIPYIKLAREKKISLPVMQNLKKYQVSPLGDIHEVKQETRLPLSIKKNKGKKANR

SEQ ID NO: 4970 - protein, 1068 aa, synthetic construct
  REGION 1..1068: note = Synthetic
MKKKIFGFDLGIASIGWAVIDHSDENFDPETGEIIEGKVVGCGVRCFPVAENPKDGSSLAAPRREKRLLRRITRRKARRMLGIKRLFVAKGLVASTTELEALYAEQTGGDVWNLRAEALRRPLSKEELLRVLTHLAKHRGFKSYRKAAEEADKESGRILTAIAENRKETVGFQTLAQMIVERAKHSDDHKMRNYTPQKGPNKGVAVYVNSIPREEIEKETKLIFEYQKQFGLFTEDLYRDFCKIAFRYREAGSVGHMVGRCRFESEQPRAPKEAPSAELFVALSKINNLKVTVDGERRFLNGEERKALLELLKNTKEVKYSTIKNKLFKSREVFFDDVNYAQKTKKGKSGEEKAVNPEDAKFYAMKGWHKLKAAFSPEQWKEVGSNLPLLDLGMTAVVCEKNDAGIERFLSEKGIPEDYREVFKKLTGSEFINLSLKALYKLNPYLAEGLKYNQACEKAGYDFREDGIKLAEEKGLLLPPIANDKLTTVPVVNRAVAQFRKVYNAMVRTYGAPDQINLEIGRDLKKSRDERNQIMRRQKENETERKEAEDGLEKEGLAANGKNMLKYRLYRQQNGKCIYSGKAIDLRRLDENGYCDVDHIIPYSRSLDDGQNNKVLCLAEENRKKGSQTPYEYLEPLGRWEEFETVVNTTPSINRYKRNNLLNKDYKEKENDLEFRERNANDNSYIARYVKRYLEDAVDFSASSCAIKNRIQVRTGSLTDYLRHQWGLIKDRNESDRHHAQDAVVVACATQGMVQKLSKLSAIFENKDDFRRKKAEKLGHEEAEVWYKYIKQQIREPWSGFRTEVLASLEKVFVSRPPRKNATGSAHKDTIFSKSEKKGSLPIRYGMAEKENMFRLDVFRKENHFYIVPIYVVDLVDCKEFIDAPQPYEYVNGSFIKIDESFNFMFSLYKDDYVEITSKDECIKGYVNQYNAQSGQLYIGSVDNSPIFRIKTSTFLRDDNILLKIGDQEYIGKIGKFDNEKKQVVINGLKNNFMINALVKLNKKGDETKNIQTEKSYTKMSNEKKICLNVVDSIEKYQVDPLGRIAKVKKETRLPLTMIKKNRHKKGE

SEQ ID NO: 4971 - protein, 1005 aa, synthetic construct
  REGION 1..1005: note = Synthetic
MKKKIFGFDLGIASIGWAVIDHSDENFDPETGEIIEGKVVGCGVRCFPVAENPKDGSSLAAPRREKRLLRRITRRKARRMLGIKRLFVAKGQVASTTELEALYAEQTGGDVWNLRAEALRRPLSKEELLRVLTHLAKHRGFKSYRKAAEEADKESGRILTAIAENRKETAGFQTLAQMIVERAKHSDDHKMRNYTPQKGPNKGVAVYVNSIPREEIEKETKLIFEYQKQFGWFTEDLYCDFCKIAFRYREAGSVGHMVGRCRFESEQPRAPKEAPSAELFVALSKINNLKVTVDGERRFLNGEERKALLELLKNTKEVKYSTIKNKLFKSREVFFDDVNYAQKTKKGKSGEEKAVNPEDAKFYAMKGWHKLKAAFSPEQWKEVGSNLPLLDLGMTAVVCEKNDAGIERFLSEKGIPEDYREVFKKLTGSEFINLSLKALYKLNPYLAEGLKYNQACEKAGYDFREDGIKLAEEKGLLLPPIANDKLTTVPVVNRAVAQFRKVYNAMVRTYGAPDQINLEIGRDLKKSRDERNQIMRRQKENETERKEAEDGLEKEGLAANGKNMLKYRLYQQQNGKCIYSGKAIDLRRLDENGYCDVDHIIPYSRSLDDGQNNKVLCLAEENRKKGSQTPYEYLEPLGRWEEFETVVNTTPSINRYKRNNLLNKDYKEKENDLEFRERNANDNSYIARYVKRYLEDAVDFSASSCAIKNRIQVRTGSLTDYLRHQWGLIKDRNENDRHHAQDAVVVACATQGMVQKLSKLSAIFENKDDFRRKKAEKLGHEEAEVWYKYIKQQIREPWSGFRTEVLASLEKVFVSRPPRKNATGEIHQETIRTVNPKRKKYNEKEILSGIKIRGGLANNGLMLRTDVFVKKNKKGKDEFYLVPVYLSDMGKELPNKAMVPGKKENEWLELDETYQFKFSFYMDDLIKIKKKENEIFGYFRGTNRATASVSVATHDRSHTFEGIGVKTLDGIEKYQVDPLGRIAKVKKETRLPLTMIKKNRHKKGE

SEQ ID NO: 4972 - protein, 914 aa, synthetic construct
  REGION 1..914: note = Synthetic
MKKKIFGFDLGIASIGWAVIDHSDENFDPETGEIIEGKVVGCGVRCFPVAENPKDGSSLAAPRREKRLLRRITRRKARRMLGIKRLFVAKGLVASTTELEALYAEQTGGDVWNLRAEALRRPLSKEELLRVLTHLAKHRGFKSYRKAAEEADKESGRILTAIAENRKETVGFQTLAQMIVERAKHSDDHKMRNYTPQKGPNKGVAVYVNSIPREEIEKETKLIFEYQKQFGLFTEDLYRDFCKIAFRYREVGSVGHMVGRCRFESEQPRAPKEAPSAELFVALSKINNLKVTVDGERRFLNGEERKALLELLKNTKEVKYSTIKNKLFKGREVFFDDVNYAQKTKKGKSGEEKAVNPEDAKFYAMKGWHKLKAAFSPEQWKEVGSNLPLLDLGMTAVVCEKNDAGIERFLSEKGIPEDYREVFKKLTGSEFINLSLKALYKLNPYLAEGLKYNQACEKAGYDFREDGIKLAEEKGLLLPPIANDKLTTVPVVNRAVAQFRKVYNAMVRTYGAPDQINLEIGRDLKKSRDERNQIMRRQKENETERKEAEDGLEKEGLAANGKNMLKYRLYQQQNGKCIYSGNAIDLRRLDENGYCDVDHIGNYTKNFYYDQRHIDLVKNLELVDVDAIRQANFRVAIDTVNSVGGIILPKLLGQLGVSKVTGLYTEPTGDFHHNPEPLEQNLHDIMALMSKGEHDIAFVVDPDVDRLALICEDGTMYGEEYTLVTVADYVLQNTPGNTVSNLSSTRALRDVTEKYGCQYTPAAVGEVNVVTKMKETGAVIGGEGNGGVIYPAAHYGRDALVGIGLILTYLAKRKMKASELRATYPNYYIAKNRIDLTPGTDILAILQSVKEHYKDEKVTDIDGVKIDFADKWVQLRKSNTEPIIRVYSEAPTMEAANALGQQVIDIVYSMIKQD

SEQ ID NO: 4973 - protein, 815 aa, synthetic construct
  REGION 1..815: note = Synthetic
MRNYTPQKGPNKGVAVYVNSIPREEIEKETKLIFEYQKQFGWFTEDLYCDFCKIAFRYREAGSVGHMVGRCRFESEQPRAPKEAPSAELFVALSKINNLKVTVDGERRFLNGEERKALLELLKNTKEVKYSTIKNKLFKSREVFFDDVNYAQKTKKGKSGEEKAVNPEDAKFYAMKGWHKLKAAFSPEQWKEVGSNLPLLDLGMTAVVCEKNDAGIERFLSEKGIPEDYREVFKKLTGSEFINLSLKALYKLNPYLAEGLKYNQACEKAGYDFREDGIKLAEEKGLLLPPIANDKLTTVPVVNRAVAQFRKVYNAMVRTYGAPDQINLEIGRDLKKSRDERNQIMRRQKENETERKEAEDGLEKEGLAANGKNMLKYRLYQQQNGKCIYSGKAIDLRRLDENGYCDVDHIIPYSRSLDDGQNNKVLCLAEENRKKGSQTPYEYLEPLGRWEEFETVVNTTPSINRYKRNNLLNKDYKEKENDLEFRERNANDNSYIARYVKRYLEDAVDFSASSCAIKNRIQVRTGSLTDYLRHQWGLIKDRNENDRHHAQDAVVVACATQGMVQKLSKLSAIFENKDDFRRKKAEKLGHEEAEVWYKYIKQQIREPWSGFRTEVLASLEKVFVSRPPRKNATGEIHQETIRTVNPKRKKYNEKEILSGIKIRGGLANNGLMLRTDVFVKKNKKGKDEFYLVPVYLSDMGKELPNKAMVPGKKENEWLELDETYQFKFSFYMDDLIKIKKKENEIFGYFRGTNRATASVSVATHDRSHTFEGIGVKTLDGIEKYQVDPLGRIAKVKKETRLPLTMIKKNRHKKGE

SEQ ID NO: 4974 - protein, 1080 aa, synthetic construct
  REGION 1..1080: note = Synthetic
MNKKVLGLDLGSNSLGWALMNEKDGEVNQIIDLGSRIFNKAVGEKVPTPKNQERRDMRLGRRVLQRRARRKQRMINYLISLDLLPSELANNFGQEKLLNELGNPYELRTKGLDKQLEPHQFGRVLLHFVARRGFLSSKKQIAGDLVDDPDTIEFLQELEVEEKQKQQAREAKLLAQGKTIKPTKDDQSEGAFKADISGVYQAIKDNNCRTLGEYLFKLKEGEVKRNRSHDGGHLRTDRKMYQDELALIWQQQTQYFAHLPDEFMQKDKGILAVIFYQRPLKLRKDRIGKCSLETKHYRANTARLEVQRFRYLQDINNLQYFEREVEEWISLNDEQKEKLKIYFEFHPKITITALKKELGLDKFHKINLETKNLKGNITACEIRFVIGKIWDEYSDEQQSQLFEDLFTIKKKSSLKARLITHWDFDKQTAVKLCLIELEPSHSNHSLKAIKCLLPHLEKGLTYDKARVECGYGYEVEKIEAQDKLPQPLETSNPIVNKGMHELRRVVNAIIKQHGKPDIVRIEMARDLEMNTQRYKDATAQQNKNKKANEEAEAEFLKYHPHRSYATKEQKLIYRLWQEQQQCCVYSGKLIAPTELWSDTVEIDHIVPRSLCLDDSYINKVACLTAENRVKGQKTPVEAWGNDEDKWNQITQRIERFYPDRPWKKYRKNATHPKKKQFYMRQADIADKYGMSAAQLNDTRYISKLAQEYLQQLGCKVSVTKGVIVAEVRSQWGLNSVIGQINKKERTDHRHHAIDAVVIAHMNIGFHNRMTQAIKHSEETGEHFSLQPPYDEFRTEVKEKLKHLIVSHTPQRKLSGALHKATGAGYIKKHGGLVYRKAVPAVFQDSDQRFEEGKVKTGKFKGKEKYEKNAEKIVDKQVKNNVLEHIKKYENLKTAFDEENLKQLKLGKNPIKRVRVLQSAIKTTKNKTAEDILNKTKFGVRDKAGKTFKYMSYGNTHHVEIIQNIKTGKVKGEFVTMMEASHRVKGINMPKQPIIKTNHGEDWKFLMALHINDTVSIENEDGERIFYRVQKIGGGYDITLRLHTASTIKDKNQELGLMAQGIIDKNLVKHQVNAIGGLIDD

SEQ ID NO: 4975 - protein, 1042 aa, synthetic construct
  REGION 1..1042: note = Synthetic
MGKKVLGLDLGSNSIGWALLAEEDGKPNRIINIGSRIFIKAVEEKTPTPKNVKRRNARLTRRVLQRRAKRKLRMLKFLISLKLLPDDLQSSFTPEIELNAIGNPYPLRAKALDEPLTTYELGRVLLHLVQRRGFLSNRKTLLGDMADDPDVLAVLAELEDEEDNSTERAKEESAFKEQIKNFRNVIAAANCRTLGEYLATRDLHECQRNRSHDGGHLRTDRQMYHEELDKIWEKQQNYHTVLTDDAKKQIDHIIFYQRPLKLRADRIGKCSLEPKRTRANIARLESQRFRYWQDINNLQYFENHTDQWLSLNEAQKTKLAQLFEHQASISFAGIRKALGFDKTIEFNLERGSKKLKGNITACEICRVFPAWDSFNDDQQHALVEDLLTIQKKSVLKNRLEKHWHIPPDIAVQLCLLEFEPGHSNLSVKAINALLPFLQQGQIFSDARVSAGYGYERQEIIPLAKLPAPPETANPIVNKGLHELKRLINAIIAEYGKPDAIRIEMARDLEMNTKRYAEHDKQQKANTKANDEATNKFQEMRQQNPHLQLRNYPGKTDKIKYRLWKDQDQRCAYSGKAINLSTLFGAEIEIDHILPYSESLDDSYMNKVVCYNQENRFKGQKTPIDAFGKDESKWNQITQALKRWDRRLQSKKNRFVMTAADVQKRDFISSQLNDTRYISRVALDYVKQLGADVSVSKGITTAWVRHQWGLNNLLGEGDAKDRSDHRHHAIDAVVIACVDRRFYTALVGIAKDLERKQSQLNMKDIHIDPLWPSLREDLQQALSQVIVAHAPQLKLSGELHEVTGAGFIEGIGNVNRKNLDGNFTQVDKIYDAAVKEQVEQHLKRFGNKPKEAFAEGNVVLHKDGKTPIKRVRIVQSKTTLAKLEKSKFGARDKQGKVFKWLAYGNLHHVEILRDKQSGKYSGEFVTMMEASHRAKGIGKPKQPIAKNDHGEGFEFVMALHINDIVSIENGGQRVFYRVQNLDSHNKRMQLRLHTAASSKTQDKAKDKARDQATTLPDKDSTIPALMALGLQKHKLNILGKVIA

SEQ ID NO: 4976 - protein, 1035 aa, synthetic construct
  REGION 1..1035: note = Synthetic
MSKKILGLDLGTNSVGWALFESDEDLAPQKLIDLGVRIFQRAVEDKTPTPKNQARRNARMARRILQRRARRKQRMQNFLISQQLLPSSLSETTQPEIILTGTHGIPGLGDPYELRAKALDFELKPYELGRVLLHLVQRRGFQSNRKTLLGDMADDPDVVSILTEEKEDLSSEETAFKKDIVQLREEIKKSGARTLGEYLYKLPAGQVKRNRSREGGNLRTDRSMYKDEFWQIVDAQKAFHPVLEEIDLALFEIIFFQRPLKLKKDRVGKCSLEPTKHRAKKAWQTYQRFRYLQDINSLKLFNSYTTEWRPLNSEDRAKLIELFEKDKKPTLAKIKKALGLSKNDQLNFESGNKNFKGNTTAIAIREAYSGWDDLALKQQNKLEEDLVSFVSKKALKKRLETHWGLDTETAINLCVTELEPEHSDLSLKAINNLLPYLEQGQIYSDARVSAGYGYEIVTNEPQDKLSAPPEIPNPIVMKGLHEVKRVVNAIIKQYGKPDAIRLEMARDLEMNTKRYKAFVSQQNKNKSDNQEAQDQFESIAAANRHLGLSKYPSHTDKLKYRLWKEQQKLCAYSHKPISLTELFTGAVEIDHILPYSLTLDDSYMNKVVCFASENQFKGQRTPKEAFESNSTKWEQIEQGISRWYAKGLMTKRDAFYKTSEDLDKDFIGSQLTDTRYISREALHYLQTLGVEVTTIKGQVTSWLRHIWGMNSLLDDAKNEKDRSDHRHHAIDAAVVACADRKLYNTIVRVAKDLEKQPGTLNIKDIHIDPMFDQFRQQVGSRLQDIIIAHAPVRKITGALHEDTGLGFIEGVGTVYRKNLDETLTAKSAENILDPVVKALVKAHLEKHGNKPKVAFSKNNPVFHKDGKTPIKRVRILQSKNTLKDLEHSKLGIKNQNGEVFKWMTLGNTHHVEIFRHKETGKYKAEFITALEATQRVVQNKQPMIKGYLDDQYEFCFALHKNDLVRAKNSDKYEIYRIQKFEASGAKLSLRGHTASTLDKKEQEIRKAIPTLMREYEMQKIQVNAIGVMANDQTYS

SEQ ID NO: 4977 - protein, 1034 aa, synthetic construct
  REGION 1..1034: note = Synthetic
MGKIILGLDLGSNSIGWALLEEHEGKPDKIIKLGSRIFTKAVEEKTPTPKNVKRRNARLTRRITQRRARRKLRMLNYLVKLNLLPPELTNNSTPEIILNDLGNPYALRANALDYALTPFELGRVFLHLVQRRGFLSNRKTLLGDMADDPDVLDILAELEAEEDTSTEQAKEETAFKADISQLKATIAKSGCRTLGEYLASFDVHDCQRNRIRDGGHLRTDREMYRDELNKIWQQQKRHHAILTDEVKEQLEEIIFKQRPLKLNSDRVGQCSLEPKNKRAKIARLECQRFRHLQDINNLNYFDPNTNQTVLLNASDREKLIPLFENHASISFASIKDALGLKKIKGIEFNLERGDKKLKGNSTACKIRKQLPDWDGYDETKQLAIVEDLLTITKKSVLKNRLMKYWGFTLHTAVQLCLLEFEAGHSNLSLKAINKLLPYLKEGRLYSKKQDNELLGALQMAYPNCPQKEIVIDKLGTPPETANPIVNKALHELRRVINAIIAEHGKPDAIRIEMARDLEMNTQRYQDFLKQQKRNTKANDDAEKAYQTEARKSSLASSQKASKADKLKYRLWQEQKQTCIYSGKTIDLAQLFSAQLEIDHILPYSQSLDDSYMNKVVCYASENHYKGQRTPIDAFSGHTDKWQQIRHRMKSLHKAKQARFSMTAVDLQKRDFISTQLNDTRHISRLAQTYLAELGADISVSKGITTAWLRHQWGLNNLIGETDNKDRTDHRHHAIDAVVIACVDRRMYQTLVYIANDLERRHSELTMRDVHLDPPWHHLREDLELALDSVIIAHTPQRKLSGELHEVTGAGFIHGVGNVHRKTLNASFTQVDKIIDDAVKEQVQQHLARYDNNEKTAFAEPVFHKDGKTPIKRVRILQSKTTLDKLAKTKFGARDKQGKVFKWLAFGNLHHVEIIRHKETSAYSGQFVTMMEASHRAKGIKMPQQAIIKTDHGADYGFIMALHINDLVSVEKDGQRVYYRVQKLDSGINRVMFRLHTAAKLDDKTQELHLSINEKIFTIWQLQKHTINAIGKLTE

SEQ ID NO: 4978 - protein, 1034 aa, synthetic construct
  REGION 1..1034: note = Synthetic
MGKKILGLDLGSNSIGWALLEEVNGEANSIIDIGSRIFTKAVEEKVPTPKNVKRRDMRLGRRVLQRRARRKQRMLNYLVSLDLLSNELLRNHQPEIILNELGDPYELRSKALDEKLTRYELGRVLLHFVARRGFLSTKKQVAGDLIDDPDTIAYLNEIEDKPTQDKEEGAFKADISEVRKAITLSGARTLGEYLHQLDKGVCKRNRSHEGGHLRTDRAMYKDELDLIWQQQQQFFSDLPADFMEDNKGVKEIIFYQRPLKLKKDRIGKCSLEPKNNRASMARLEVQRFRYLQDVNNLQYFERQTDQWLAFTQADRQKLIEYFEQHPKITITALKKLLGLDKLTKINLEAKNLKGNITACEIRNVLKDRWDNYSDKEQFNLVEDLLSIKKKSALKTRLIKHWGLGAEVAIKLCLLEFEPSHSNLSLKAINKLLPFLQQGLIYSKKDQQTGELGALQAAGYSDEIKEQEVSNKLGAPLETSNPIVNKAMHELKRVVNALIKEYGKPDIIRIEMARDLEMNTKRYKENEARQNKNKKANEGAVEAYKGLNLGKYPSYDDKIKYRLWEEQNRRCAYSNEMIPLHSVFTSSVEIDHILPFKKSLDDSYMNKVLCYVAENRNKGDRTPKDAWSGNVEKWMQITQAISKWKGVDSKVKRFHQTEADLQKRDFISSQLNDTRYISKLALDYMAELVGNSNVSVTKGSVVSQIRHQWGFNDLIGEVEKKDRTDHRHHAIDAVVIAATSRSLYTKAVKQIERDKLKIEPPYPNIRNELAERLEQMIVSHASNRKLSGALHEETGAGYIEKHGGLVYRKNLTPDFTVKNAKQIVDDTIKLIVLNHLEQYDNDPKKAFADNIKVMHKDGKTPIKRVRVLQSNTTLKKLEQNKVSIKDKSGKVFKYMSYGNMHHVEIIQNIETGKYKGEFVTMMQASHRAKGIQSKLNPEGKKLPLVKVDHGDEWQFIMALHINDLVSVSVDGGGRIYYRVQKLEVPSGLTLRLNTSSTIENKIEGIRKSITALMRNGLKKHFINAIGVCADDKTNH

SEQ ID NO: 4979 - protein, 1031 aa, synthetic construct
  REGION 1..1031: note = Synthetic
IHYIKSAPGKSILGLDLGSNSLGWALLAANDQGSPQAIRAAGVRIFNKAVEEKTPTPKNQKRRMARLARRTIQRRARRKRKLENYLLQLGLLPTALTDCVNREGVLNGLGDPYQLRAKALDEPLSAHQLGRVLLHMVQRRGFLSNKKTAIGTDMLDDPDVQAVLASEDEAITGSDAEESAFKADISRLRTAIEAAGLRTLGEYLASLDPHECKRNRDGQLLRTDRQMYQDELALIFTQQSLHHAVLDDDVQVYINHIIFHQRPIKLKPDRVGRCSLEPSCKRAAVARLEYQRFRYLQDINHLEYFDAYTDQWCRLSPEKKHKLVELFEHHAAPSFAKIRKELGLDRKTEFNLDSGVKKLRGNTTACAIREIYTGWDALDDQQQHLLVEDLLSIEKPAALKRRLAGHWAMSREAAVRLCMVELEPEHGNVSLKAIRKLLPHLRKGLIYSDARVAASYGYGISEQAPAAKLAAPPELPNPIVNKALHELRRVVNALIAEFGKPDVVRIEMARDLEMNTKRYKEFIRRQKDNTKANDKAVEVFQDEARKNPSLKLSKYPSRDQKIRYRLWEEQGYRCAYSGNAINRATLFSAEVEVDHIIPYSQSLDDSYMNKVLCFARENRYKGQRTPIDAFGGNEDKWNTITKAISHWPKTLRSKRDRFYKSADQLDKDFVNSQLTDTRYISREAGIYLKTLGCDVTFTRGVMTDWLRHQWSLNELIGETDQKERTDHRHHVIDAVVTACIDRPLYTMLAHQAKALERERSALSMRDLHCDPPIDAIKAELETQLAGLVVSHASQRKISGALHEETGVGHVEGVGAVTRKRLTPEFKTANLKSIVDDVVRERVRAHLALHADNPKEAFAESFELYHSDGKTPIKRVRVVQSKTTRDALNQDKFAVKDRAGRVFKWHAYGNTHHVEIFRHRTKPKKIDTRFVTAMEAAKRVSRREPIIRVEHDDDWVFLMALHINDLVRACQDGNWGIYRIQKFDMNDSRMMLRLHTAARLDNAEESLRKTIGTLLSANKMEPLRVNAIGVRI

SEQ ID NO: 4980 - protein, 1031 aa, synthetic construct
  REGION 1..1031: note = Synthetic
MSKKILGLDLGSNSLGWALLEETNGKANRIIAIGSRIFTKAVEEKIPTPKNVKRRDSRLGRRVIQRRSRRKQRMLNYLVSLDLLPRELQGHTQPEIILNQRGDPYALRAKSLDTQLTAYEFGRVLLHFVARRGFLSTKKQVAGDLIDDPDTIVFLNALDDTPTKDKEETAFKADISKVKKAIECAGARTLGEYLHKLAQGECKRNRSHEGGHLRTDRKMYQDELELIWQQQGQYFSHLPDDFMEKDQGIKKIIFYQRPLKLKKDRIGKCSLEPKNNRAPMARLEVQQFRYLQDVNNLQYFERHTDKWLSISDDDKQKLIEYFEQNPKITITELRKQLGFDKLTKINLEAKNLKGNITACEIRSVLDEQWDNYSDESQHALVEDLLSIKKKSALKTRLTTHWNLDNSKAIELCLLEFEPNHSNLSLKAINKLLPFLQQGLIYSKKDKETGELGALQAAGYTDEIKEQEVLNKLAQPIATSNPIVNKGLHELKRVINAIIKQYGKPDVIRIEMARDLEMNTKRYKENEARQAKNKKENEKAVDAYRDLELGKYPSHNDKIKYRLWQQQDYFCAYSNKSIPLSAVFTAQVEIDHILPYKKSLDDSYMNKVLCFTAENRNKGDRTPKDAWGENTEKWTQITQAISRWKGVDSKVKRFYQTEADLQERDFISSQLNDTRYISKLAIDYVKQLGCDVSVTKGFVVSQIRHQWGFNDLLGETNKKERTDHRHHAIDAVVIAATSRSLYTKAVNQIERDKLKIELPYLNIKEELAERLKQTIVSHATQRKLSGSLHEETGANYIGKHGGLVYRKNLSPDFTVKNAQSIVDDTVQALVLSHLESYDNNSKKAFAENVTLYHKDGKTAIKRVRVLQSKTTPKKLEQNKFGVKDKSGKTFKYMSYGNAHHVEILKHQETGKYKGEFVTMMQASHRAKGIQSKLNPEGKKSPIVKVRHDDGWEFIMALHINDLVSVDEEKGERKYYRVQKIDTQNNKIVLRDNRASTLQNKQQELNVSITVDNFGRKDVKSHKINAIGIMTND

SEQ ID NO: 4981 - protein, 1031 aa, synthetic construct
  REGION 1..1031: note = Synthetic
MGKKILGLDLGSNSIGWALLGEKNGKPAEIINLGSRIFTKAVEEKIPTPKNVKRRNARLARRIIQRRARRKLRMLNYLIMLRLLPRELAGHAAPEIILNELGNPYFLRAKALDNSLTPFELGRVFLHLVQRRGFLSNRKTLLGDMADDPDVLDVLTELEGKNDNSSERAKEETAFKAAISQLKNTIAELGFRTVGEYLASLDHHDCKRNRSRDGGHLRTDRQMYRDELDLIWEQQKQHHAALTDDVKEQLEEIIFKQRPLKLNSDRRGKCSLEPARKRARIARLESQRFRYLQDINNLQYFDYYTEKSVSLNEPAKQKLVQLFETTADVSFAGIRKNLGFDKTLEFNLENGNKKLKGNITACEIRKQLPEWDLFDDAKQHALVEDLLTITKKSVLKNRLMNHWAFSANTAVQLCLLEFEPGHSNHSIKAINKLLPFLQQGRIYSDARVSAGYGYEVTNIIANDRLGIPPQLPNPIVQKALHELRRLINAIIAEYGKPDAIRVEMARDLEMNTKRYQEFITQQAKNAKANDEAVSKYQEMAQKNPQLALSKYPAKTDKLKYRLWQDQNYCCAYSGKSISLATLFSAEIDIDHILPYSASLDDSFMNKVVCFAGENRFKGQKTPVDAFGGNTDKWNQITQAISRWHKSLKSKKARFFTTAAELQKRDFISTQLNDTRYISKIAQTYLAELGADISVSKGITTAWLRHQWGLNSLIGETDKKERTDHRHHAIDAVVIACVDRRLYQDLVNTAHDLERKQSELNMKDIHIDPPWLNLREDCQQALNNVIIAHTPQRKLIGELHEVTGAGFIDGVGNVNRKNLDGNFTQVNKIIDPDVKTLVEEHLRIYSNNPKTAFAEGVTVFHKDGKTPIKRVRIVQSKTTLAKLENTKFGAKDKQGKVFKWLAFGNLHHVEIIRHNKTGSYSGQFVTMMEASHRAKGIKMNRQPIIKKDHGEDYEFIMALHINDLISIEKDGQRVFYRIQKLDSGGNRIMIRLNTTTVLDHKSEEIYFSINENSFTTWQFQKHSINAIGKLIE

SEQ ID NO: 4982 - protein, 1025 aa, synthetic construct
  REGION 1..1025: note = Synthetic
MGKKILGLDLGSNSLGWALLEEVEGQVSSIIDIGSRIFTKAVEEKVPTPKNQKRRDMRLGRRVVQRRARRKQRMLNYLVSLDLLSNELQRNFQPELILNSLGDPYYLRAKALDEQLTRHEFGRILLHFAARRGFLSTKKQVAGDLIDDPDTLSYLNQLDDKPSLDKEEGAFKADISELRNSIETSGSRTLGEYLYKLEHGICKRNRSHDGGHLRTDRAMYKDELNLIWEKQKQFFPDLPDDFMTDNKGIKQIIFYQRPLKLKKDRVGKCSLELEKNRAPMARIEVQRYRYLQDINNLQYFERHSEQWLSISKSDKQKLVEYFEKNLKITVAALKKELGLDKLTKINLETKNLKGNITACEIRGVLGERWDHYSDQDQHALVEDLLTIKKKSALKTRLLNHWTLSASEAVKLCLLEFEPGHSNHSLKAINKLLPYLEQGYLYSEARVKAGYDYEIVKIEPHDTLCAPDTTSNPIVNKGMYELKRVVNAVIKQYGKPNAIRIEMARDLEMNTKRYKENEKRQGQNKKANEVAVDAYKGLKLGRYPSRDDKIKYRLWEEQSHRCAYSNKTIPLNAVFTAEVEIDHILPFKKSLDDSYMNKVLCYTAENRIKGDRTPIDAWRGNAEKWNQMTQAIGKWKGLESKVNRFYQTEEDLQKRDFISSQLNDTRYIAKLAQEYVKQLGCDVSVTKGFVVSQIRHQWGLNDLLGETNKKERTDHRHHAIDAVVIAATSRGLYKKAVSQIQRNKLNIPVPYSNLREELQERLKHTIVSHATQRKLSGALHEETGAGYIERHGGLVYRKNLSPDFTVKNAASIVDSVVQDIVLSHLEKHENDPKKAFADGKTVLHKDGKTPIKRVRVLQSKTTLKKLEQNKVGIKDKAGNVFKYMSYGNMHHVEILQNKQTGKYKGEFVTMMQVSHRAKGIQSKLNPEGRKQPLVQTTHGDDWQFVMALHINDSVSVLANSGERIFYRVQKFMKEQGYLVLRLCTTSVLSDKSEEVQLPIHKLMTDQMLKLHKVNAIGVISDDKANN

SEQ ID NO: 4983 - protein, 1024 aa, synthetic construct
  REGION 1..1024: note = Synthetic
MKTTLALDLGTNSIGWALLESDSQGDPTKLIDAGSRIFIKAVEDKTPTPKNVARRNARLARRLIQRRARRRKKLLNLLIEHHLLPTQANLDSQSREQELNLIGDPYQLRAKALDTTLTHHELGRVLYHLSARRGFLSNRKIFMGDLLDDPDAQDLLPELDQSDDAEETAFKKDISELRNQIKKSGARTLGEYLSQRPEHQCKRNRQHQGGLLRTDRKMYQEEFELVQSIQKQHFDLSDDFWSKVEHILFFQRPLKLKKGRIGKCSLEPNRYRCAKARLEFQQFRYWQDINHLTYFEPYTQSDVSLSMEQKQKLADTLETKTRLTWPQARKLLGLEKSYLFNLEKSGTKDLVGNRTGYAIQQIIGDTWQQLSEQQQRQLIEDLLTIKKKTTLKNRLVNYWRLPLQQAIYLASEEFEPGHSDLSLKAINKLLPFLKQGHIYSDARIAAGYGYETKEITVFDKLPAPPNLRNPIVNKGLHEARKLINAIIATYGKPDIIRIEMARDLTLSNKDKTRVNKVNRDNLQKNKEAEEQYDITRQSSPHLGLRKYPSKDDKLRYRLWKEQGCRCPYSLKSISLQQVFSAETEIDHILPYSQSLDDSYMNKVLCFTDTNREKGNRPPYGAWASQPIKWEQLVANMLAIDKENKHAITAKKNRFLTKTTDEIEGMISSQLNDTRYLSREVFHYVKQLGCRVEVSKGILTAKLRHMWGLNHLLGSKDDHKERKDHRHHTIDAIVTALVDHKLYRTLVSLAKEVEKHQKLEWRDLHLDSPLDNIQQQTQHILDEMIVSHDVRNKLYDALHEDTGSGFIEGIGTVYRKALNEENFKTEKQIDSIIDPVIKDTVLAHFNAHNQNAKQAFAPDNPVFHPNGNRIYRIRVQRSKATREQVEQNQYAAKDRFGKTFKYIPYGNMHHVAIYQQENGKIKATVTPMFKQAEKVRLHKITGSDTDNLIMTLAINDMVELTIDETLQIYRVQKLERDKSSAALTLRLHTDATTEKNNSVIRKAVPTLIKDYQMQKVSINRLGKRL

SEQ ID NO: 4984 - protein, 1022 aa, synthetic construct
  REGION 1..1022: note = Synthetic
MSKKILGLDLGSNSIGWALLEEYEGKPDKIIKLGSRIFTKAVEEKTPTPKNVKRRNARLTRRITQRRARRKLRMLNYLVKLNLLPPELTNNPTPEIILNDLGNPYALRANALDHALTPFELGRVFLHLVQRRGFLSNRKTLLGDMADDPDVLDILAELEAEEDTSTEQAKEETAFKADISQLKATIAQSGCRTLGEYLASFDVHDCQRNRIRDGGHLRTDREMYRDELNKIWQQQKRHHAVLTNEVREQLEEIIFKQRPLKLNSVRVGQCSLEPKNKRAKIARLECQRFRYLQDINNLQYINHSGVSTTLTNEEKHTLITLFETTAHVSFAGIKKALNLKGVEFNLENGTKKLKGNLTACDIRKHLPDWDGYDETKQLAIVEDLLTITKKSVLKNRLMKHWELSLHTAVQLCLLEFEAGHSNLSLKAINKLLPFLQQGQIYSDARVSAGYGYEVSEIKPTDKLGTPPETANPIVNKALHELRRVINAIIAEHGKPDAIRIEMARDLEMNTQRYQDFLKQQKRNTKANEDAETAYQKNAPLAASKKASKADKLKYRLWQEQKETCIYSGKTIDLAQLFSAQLEIDHILPYSQSLDDSYMNKVVCFASENHYKGQRTPIDAFSGHTDKWQQIRHRMKSLHKAKQARFSTTATDLQKRDFISTQLNDTRHISRLAQTYLAELGADISVSKGITTAWLRHQWGLNNLIGETDNKDRTDHRHHAIDAVVIACVDRRMYQTLVYIANDLERRQSELTMRDVHLDPPWHHLREDLELALDSVIIAHTPQRKLSGELHEVTGAGFIHGVGNVHRKTLNASFTQVDKIIDEAVKEQVQQHLARYDNNEKAAFAENITVFHKDGKTPIKRVRILQSKTTLDKLAKTKFGAKDKQGKVFKWLAFGNLHHVEIIRHNETGAYSGQFVTMMEASHRAKGIKMPQQAIIKTDHGADYGFIMALHINDLVSVEKDGQRVYYRVQTLDSGINRVMFRLHTAANLDDKTQGLHLSINEKIFTTWQLQKHSINAIGKLTE

SEQ ID NO: 4985 - protein, 1021 aa, synthetic construct
  REGION 1..1021: note = Synthetic
MNKKILGLDLGSNSIGWALMNEADDEVNQIIDLGSRIFNKAVEEKVPTPKNQKRRDMRLGRRVLQRRARRKQRMAHYLISLDLLPQELSNNFGQEKLLNELGDPYELRTKGLDEQLKAHEFGRVLLHFVARRGFLSSKKQIAGDLVDDPDTQTYLSTLDSRQTRGEEGQFKADIAQVYQAIEDNNARTLGEYLFNLEVGKVKRNRSHDGGHLRTDRAMYKDELCKIWKKQQVYFDLPDEFISEVKKIIFYQRPLKLRKDRVGKCSLESKHYRANTARLEVQKFRYLQDVNNLEYFERHSEQWLKLSDEQKDKLKIYFEYHPEIAITALKNELGLDKPTKINLEKKNLKGNITACEIRDVIGNSWDEYSNKEQIQLFEDLFTIKKKSSLKARLITHWDFDKQTAVKLCLIEFEPSHSNHSLKAIKALLPFLEQGLRYDQARVEAGYGYEQKEVEVQNNLPAPPETSNPIVNKGLHELRRVVNAVIKQYGKPDIVRIEMARDLEMNTTRYKENQKRQKDNQQANERATKAFIEETGEKYPSHDEKIRYRLWEDQSYRCAYSGHTIALGQVFSADCEIDHILPFKKSLDDSYMNKVLCFEKENQNKADKTPIDAWGGDNNKWNQITQAISRWDKSLKSKISRFYMRENDLERGFISSQLNDTRYISRLAQNYMRELGCDVNVTKGFVVSQIRHQWGFNNLIGETDKKERTDHRHHAIDAVVIASTSRSLYQQAVNQIERNKLKIPQPYNDILQELGEKLKHMIVSHTPQCKLSGGLHEETGAGYIAKHGGLVYRKTLNPKFSIQNAEKIVDEQVKNIVLEHINKHTNSEEAFNEENLKTLKLGKNPIKRVRVLQSKINTTKNKTAEDILQQSKFGVKDKSGKIFKYMSYGNTHHVEIIQHKKTGKVKGEFVTMMEAHKRAMTGTKYAQKREVVREPMIKTNYGDDWQFLMALHINDTVSIEKDNGERIFYRVQRLGGGYDITLRLNIASTISDKKQCLPLMTKGIIENNLIKHKVNAIGGLIDD

SEQ ID NO: 4986 - protein, 1016 aa, synthetic construct
  REGION 1..1016: note = Synthetic
MQQKVLGLDLGSNSIGWALLKEENKQASEIIDLGSRIFIKAVEKKVPTPKNEKRRNMRLGRRVIQRRARRKQRMLNYLVSLDLLPQALQNSTQPETVLNELGDPYELRAKGLDIELSPYEFGRILLHFVARRGFLSTKKQVAGDLIDDPDTLDYLSTLDDKSTTKDKEEGQFKADIADVYQAIKDTDARTLGEYLFNLETGKVKRNRSHDGGHLRTDRKMYQDELCLIWKQQSQYFEHLPNDFMQKDKGVLAIIFYQRPLKLKKDRVGQCSLELKHRRANVARLEVQKFRYLQDINNLQFFDRWQEKWISINDEQKSKLKALFEHNAKITVTMLKKELGLDRPTKINLEAKNLKGNITAGDIRHIIGDAWDVYSDKQQHDLFEDLFTIKKKSALKARLITHWDFDKKVAVKLCLIEFEPSHSNHSLKAINKLLPFLEQGMIYSDARQAAGYTYEIAKIEVVDTLGMPPETSNPIVNKGMHELRRLINAIIKQYGKPDVIRIEMARDLEMNTKRYKENESRQKKNQEANKAAQLAFEGLNLGKKYASRDDKIRYRLWQDQDQRCAYSGITIALNQVFSAECEVDHILPFKKSLDDSYMNKVLCFAAENRNKSDQTPVDAWGGDNDKWNQITQALSHWDKSLDSKIKRFYTKEADLQKRDFISSQLNDTRYMSKLAQDYVRQLGCDVNITKGFVVSQIRHQWGFNSIIGEVNKKDRTDHRHHAIDAVVIAATSRSLYQNAVRKIKRDKLNIVPPYAHIREELNERLKHTIISHAPQRKLAGSLHEETGAGYIEKHGGLVYRKTLSPEFTLKNALSIVDEAVKTKVLEHFENYPNPKEAFNAEHLALLKLGKNPIKRVRVLQSKTNENKLAQTKFGVRDKTGKIFKYMSYGNTHHVEIIKNSKTGKVKGEFVTTMLASHRTKGINMPKQAIIKTNHGEDWEFVMALHINDTVSIEQEDGERVFYRVQTLEAPSRLTLRLNTTSTIDNKDEAIRKSISGLFQENILKHNMNTIGHFIEHD

SEQ ID NO: 4987 - protein, 1008 aa, synthetic construct
  REGION 1..1008: note = Synthetic
LSPGSDAYGTQFHWYGKLTIGLSRLYQGLDYTQGSIMSKKVLGLDLGTYSIGWALLEENRGRPDRIIDLGCRVFNEADGEKTPAPGNPKHRDARLNRRILQRKAKRKQRMLNYLLTLNWLPEELQASPQPEIILNRIGDPYRLRAKALDEKLSAHELGRVLLHFVQCRGFSGSRETWPGAMIDDPDVLAVLAESEEGADQRERDSGQMAFKQEAEALRTAIKEAGCRTLGEYLASRDHPDCKRIRAKNGEHLRTDRQMYKDELGLIWRQQQRHHERLTEPVKARVERIIFYQRPVKPCADRIGRCPLEPKRRRAGLARLESQRFRYMQAISNLTYLNHCTETEERLSAGQIGRLSALCETEADISFARIKELLGFDNSREFNLERDIKKLNGNVTAWQIRKVFSGWDNLGTGKQQALVEDLLTINKKSVLRKRLLGHWGLDSATVVKLCQLSLEPGYSPLSSKAINKLLPFLYQGQSVAEARVSAGYGPEVQAVAQKDKLAVPPETANPVLQKGLHELRRLINALIAEYGKPDAIRVQMARELKMNSRRYAAFSRQQKARDRMNEKAVLMFQRVKRQNPHLALTDAPGKTDQLKYRLWQDQRRLCAYSGQRIAPSALFGPEVEIDHILPYSESLDDSYMNKALCFVKEKSVKGRKTPIEAFGGNEAQWHQIEQNLKRWDRSLASKQKRFFMNAATMRKADFIGSQLNDARRISRVVHDYLQQLDAAITVSTGRATAWLRRQWDLNGLLGETPATDRGDYRRHAIDALVTACIDRRFFTKLSEAASELEGKQSELNIDDLRVDPAWQTVREDLRRALDKMIVAHVPRLKLSGEGFEETGAVFAGGGTVSHKDGKIPIQRSRIRQPEAGTASGNIHHVEILRHKTTGQYTGEFVTRLEAGHRVKGAGKHKPPVIKTDHSEPFEFVMALHVNDTVSVEQAGQRIFYRVRKLDAGGNRCLLRLHSTALPDRKTEEIDFSINAASFNRWRLQKHKINAIGKLIDVKPSGRDTG

SEQ ID NO: 4988 - protein, 813 aa, synthetic construct
  REGION 1..813: note = Synthetic
MHLRTDRQMYQDELELIWQQQQYHHVLLTEQVKKQVERIIFYQRLPKSRTDRVGRCALEPKRKPAGMARLESQRFRYLQAINSLTYREDCAEHEAFLSAGQKGRLVSLFESEAEVTFPMIRAALGFDEAMEFNLERSNKMLKGNVTACRIRKVLSAWDDLGAENQQVLVEDLLTINKKPVLEKRLAEHWGFDPVTVASLCLLEFEPGHCHLSVKAINKLLPFLYQGQSYSDARVSAGYGQEIQEREIRNKLGAPPETANPVLRKGLRELRRLINALIAEYGKPDAIRIRMARDLDMNARRQAEFIRQQKSNARANEEAMLRYQDIQRRNPHLDLAGFSDKTVQLKYRLWRDQQRRCAYSGLRISSSVLFGSEVEIGYILPYSESLDDSYMNKVLCYRKENSNKGQKTPIDAFGDHKEQWNKIVQNLNRWDRSLTPKKKRFFMTTAMVRKEDFVNKQLNDARYINRVTHGYLKQLGTDISVSKGLTTAWIRQQWGLNNLAGGASAKDRADYRHHAVDALVVACIDRPLYTHLVEAARDLEQKQSQLNLDDLPIEPAWKTLREDLQHALDNMIVAHAPLLDSSALSHEEIGAGKVYRRPLDGTFTQVNKIVDPVVKDIVRQHLERYNGKPKAAFAEGVTIYHKDGKTPIRRVRILRSETTLPKPDPAESGAGDKQGRVFKWLAYHGSFHHVEIFRNKNTGQYIGEFTAMTEANHRAWGIGKQKQPIAKTGQAEQLEFVMALHVNDMVSVEQGGQRVFYRVQKLDAGSRECVLCLHSTAISGRKDEEVIHFSINEASFGRWRLRKHKINAIGKLIG

SEQ ID NO: 4989 - protein, 1018 aa, synthetic construct
  REGION 1..1018: note = Synthetic
MQQKVLGLDLGSNSIGWALLNEDNNTASEIIDLGSRIFIKAVEEKTPTPKNEKRRESRLGRRVIQRRARRKQRMLNYLVSLDLLPKELQNHAQPEIVLNGLGDPYELRVKGLDEQLTPHEFGRILLHFVARRGFLSTKKQVAGDLVDDPDTLDYLNALDNKPTKDKEEGQFKADIADVYQAIKDADARTLGEYLFNLESGKVKRNRSHDGGHLRTERKMYQDELELIWKQQSQYFNHLPSDFMQKDKGVLVIIFYQRPLKLRKDRVGKCSLELNKYRANIARLEVQKFRYLQDINNLQFFDRWQEKWISISDEQKIKLKNLFEYNAKITVTMLKKELGLDRPTKINLEAKNLKGNITAGEIRNIIGSAWDDCSDKQQHDLFEDLFTIKKKSALKARLITHWDFDKQTAVKLCLIEFEPTYSNLSLKAIKKLLPFLEQGMIYSDARQAAGYDYEVAEIEAVNTLGIPPETSNPIVNKGMHELRRLINAIIKQYGKPDVVRIEMARDLEMNTKRYKENEFRQKKNQKANEEAQLAFEGLNLGKKYASRDDKIRYRLWQDQDERCAYSGATIALNQVFSAECEVDHILPFKRSLDDSYMNKVLCFTAENRNKSDQTPVDAWGGDNDKWNQITQALSHWDKSLISKTKRFYTKEADLQKRDFISSQLNDTRYMSKLAQDYVRQLGCDVNITKGFVVSQIRHQWGFNSIIGEVNKKDRTDHRHHAIDAVVIAATSRNLYQNAVRQIKHDRLNIAPPYAHIREELDERLKHTIISHAPQRKLSGALHEETGAGYIEKHGGLVYRKTLSPEFTLKNALSIVDEAVKTKVLEHFENYPNPKEAFNAEHLALLKLGKNPIKRVRVLQSKTNEKKLAQTKFGVRDKTGKIFKYMSYGNTHHVEIIKNSKTGKVKGEFVTTMLASHRAKGINIPKQAIIKTDYGQDWEFVMALHINDTVSIEQGDGERVFYRVQKIDTGAKRFVLRLGIASTLKNKDEEIYIGISKDNFDKYKIVKHDINTIGHFIEHD

SEQ ID NO: 4990 - protein, 1059 aa, synthetic construct
  REGION 1..1059: note = Synthetic
MSKKVLGLDLGSNSIGWALMSEENGEVSEIVDLGSRIFNKAVEEKVPTPKNKKRRDMRLGRRVLQRRARRKQRMANYLISLDLLPQALSNNFGQEKLLNELGNPYELRTKGLDEQLTPHEFGRVILHFVARRGFLSSKKQVAGDLVDDPDTIEFLKELEEQEQKKRAAREAKLLAQGKIIKTTQDDQSEDAFKDDISSVYKAIQNSQCRTLGEYLYKRDNGKVKRNRSHDGGHLRTDRKMYQDELQLIWQTQQQYFPDLPKDFMEKNKGVLKIIFYQRPLKLRKDRVGKCLLEPKHYRANVARLEVQRFRYLQDVNNLKYSKPHSQERQLNDEQKDKLKTYFEHHPKITMTVLRKQLGLDKSTKINLETKNLKGNITACNIRNVIGDKWDKYSDEERSQLFEDLFTIKKKSALKKRLITHWGFDKQTAVKLCLIEFETSHSNHSLKAIKKLLPFLEQGLRYDEARVKAGYGYEVVENEVQNKLSAPLETSNPIVNKGMHELRRVVNAIIKQYGKPDTVRIEMARDLEMNTKRYKENKARQKKNQKANESATEAFRQETGRQYPSHKQKISYRLWEDQDKRCAYSGKTIALGQIFSAECEIDHILPFKKSLDDSYMNKVLCFEAENRNKGDRTPVDAWGGDNDKWNQITQAISRWDKSLKSKVSRFYMQEADLQERDCVSTQLNDTRYISSLAQDYMRKLGCDVNVTKGFVVSQIRHQWGFDNLIGEADKKDRTDHRHHAIDAVVIASTSRSLYQQAVRGIEHNKLKIPQPYSDILQELSEKLKHTIVSHVPQYKLSGALHEETGAGYLALKDRQTGKIIKQGLVYRKTLNQEFTLKNAQNIVDEGVRNTVLQHILDHDENTKKAFTSDTLKYLKLGQNPIKRVRVWQSETTPEKLAKTKCGIKDKQGNIFRWMAYGNNHHVEIIQHKETDSIKGVFVTMMEASTRAKGIGIKKQPIVNKNHGKDWQFLYALHINDLVSIEDEQEERIFYRVQKLAGGYDLTLRLHTDTSPNKINDKTSAETRMFLLKHKKILENSLKNFIQKYDMKLHKTNAIGKLLDD

SEQ ID NO: 4991 - protein, 1052 aa, synthetic construct
  REGION 1..1052: note = Synthetic
MSKRILGLDLGSNSIGWALLKTTDAGKPTGLIDLGSRIFNKAVEDKTPTPKNQKRRNSRLARRVVQRRARRRQRMLNYLVSLNLLPASLKDHPKPESVLNALGDPYSLRAKALDSPLSVHELGRVLLHLVQRRGFLSNRKTRLGREMLDDPDVQAVLAELEEDTTGGDRDRTDEEKEENAFKQDISQLRKTIEASGCRTLGEYLASLKPSQSKRNRQRDGGHLRTDRQMYQEELDAIWEEQKKHHTVLTDKVKEQIEQIIFHQRPLKLQADRVGKCSLEPRCTRARIARLEYQQFRYLQDINNLQFFDPYTETWSALSDENRATLVTLFESTPTLTFPGLRRALGLARTTEFNLEKSEVKKLKGNTTACKIRKVLPEWDAFSQDKQYALVEDLLTIQKKSVLKKRLIGHWQFDSATAVNLCMVEFEPGHGNFSTKAVRKLLPYLEQGEILSEARVEAGYGYEQEAITAKDRLGPPPTIANPIVQKGLHEIRRVVNAIIAEYGKPDAVRIEMARDLEMNTKRYAARLKQQRANTKANEEAAQKYAEMRQKNPHLGLSENSSRNDKMKYRLWKDQEEKCVYSGRQIIVSELFGPAVEIDHILPYSLTLDDSYMNKVICYTEENRDKRNRTPMDAFGSNEDKWNQITQTISRWGKSLKSKRERFYKREADLQERDFINSQLTDTRYISREASRYLSTLGVEVTFPKAAFTGWLRRQWGLNSLIGTTDEKERTDHRHHAVDATVIACVDRGFHQRLVRLAKKLERSHSELNLRDISIDIPWQTFRQDVHDQLQSLIVSHVPQRKISGALHEETGVGFIAGNGVDGPGTVYRQALDTDFKVTQIDKIVDPVIREQVRKHLANNGNDPKQAFADGKGVVHKNGKTPIKRVRVRQSKVPDLDTLKKTKFGVRDRQGKVFKWMAYGNTHHVEIIRHRKTEKYEGRFVTAIEAAHRARGINGSKRLVIQTDHGEAYEFVMALHINDLVSTEADGKTEFYRVQKFEQDGSRLELRLHTAATLENKEEGLRKSISTLMKDYSLQKHLVNAIGKLRNDKTDHRH

SEQ ID NO: 4992 - protein, 1051 aa, synthetic construct
  REGION 1..1051: note = Synthetic
MWGITMKKVLGLDLGSNSIGWALLEEKDGKAHRIIDLGSRIFTKAVEEKTPTPKNVKRRDKRLARRVLQRRARRKQRMLNYLASLDLLPTKLKGHNQPEIVLNPLGDPYELRAKALDTPLAPHELGRVLLHLVQRRGFLSNRKTLLSDMMDDPDVLSVLNELDAQDEHDDTTEKAKEETAFKKDISELRNKINAAHCRTLGEYLSKLPRHTAKRNRIRNGGHLRTDRQMYQEELDLIWAEQKKHHAMLTANVKEQIERIIFFQRPLKLKEDRVGKCSLEPRNKRAQIARLEYQKFRYLQDINNLQYLDFFEDKWVALNDGQKEVLKPLFESKISVTFSNIRTKLKLDKSTEFNLEHGNKKLKGNITACEMRKALPQWNDLSPDDQLALVEDVLTMHKKSALKTRLMNHWSLDARTAVNLCLLEFEPGYGSHSLKAIHKLLPFLKKGEIYSEARQKAGYGYEQEDEDTIDRLGMPPEIPNPIVSKGLHELRRVVNAIIAKYGKPDKIRIEMARDLEMNTKRYKAFEKQQKANTDANKDATKLYQEMGKKYPHLHLSKYPSHADKIKYRLWKDQQALCAYSLQGMKISDAELFSANIEIDHILPYSQSLDDSYMNKVVCHTRENRVKGQRTPIDAFGSDEDRWQQISGRFNKWNRNLKSKKNRFYMTAEDVQKRDFINSQLNDTRYISKVALEYLKPLGADINVTKGIMTSWLRHQWNLNSLIGQDKKNKDRVDHRHHTIDAVVTACIDRTFYQALVKLAKDLEKEKSQFTPKDIHTDTPWPNLRNDLNEALENMIVSHAPQRKITGSLNEETGAGFIEGVGTVYRANLSPDFKLSQVKKIIDSEVRELIAKHFLAYDNDPKKAFAEGITVYHKDGKTPIKRVRIVQSKTTHKKLESTKFGVKDKQGNVFRWMAYGNMHHVEIVQHKETGTYKGIFITMMEAHRRAMTGTKSARKRDVRFEPMVMTDHGEDIRFIMALHINDLVSIETDDGERFYRVQTLDSFNKRVYLRLHTASTIANDSETLPDRELTVMALIKKGMKLHRMNAIGKVMDD

SEQ ID NO: 4993 - protein, 1051 aa, synthetic construct
  REGION 1..1051: note = Synthetic
MKSKTIGYSWLHYATDYRRRFGMSKKILGLDLGSNSIGWALLEEHNGKPGKIIGLGSRIFTKSVEEKTPTPKNVKRRNARLTRRILQRRARRKLRMLNYLISLKLLPQELTDNPSPEIILNTLGNPYQLRAKALDYPLQPFELGRVLLHLVQRRGFLSNRKTLLGDMADDPDVLEVLAELEGEDDNGSERAKEETAFKADISKLKSTIAESGKRTLGEYLASLDHHDCKRNRKTDGGHLRTDRQMYRDELDLIWRQQKQHHPVLTDTVKEEIETIIFYQRPLKLRADRIGQCSLEPAKTRTRIARLESQRFRYLQDINNLQYFDPYSDTYVTVNENDKQKLVKLFETTETISFAAIRKALGFGKNYEFNLETGNKKLKGNITACEIRKQLPTWDTFGDAKQRDLVEDLVTITKKSVLKKRLMVHWRFDAATSVQLCLLEFEPGHSNLSLKAINKLLPFLQQGQIYSDARISAGYGYEVKEITVKEKLGTPPELPNPIVKKALHELRRLINAIIAEYGKPDAIRIEMARDLEMNTKRYQDFIKQQGKNTKANDEAEEKYKQQAQLSPHLKLSKYPSKPDKLKYRLWQDQKQLCAYSGKTISLSELFSANIEIDHIWPYSLSLDDSYMNKVVCYVKENRNKGQRTPVDAFGGEQWNQITQAINRWDRPLKSKRDRFFTPTAELQQRDFINNQLNDTRYISKVAQTYLKELGADINVSKGATTAWLRHIWGLNDLIGETDKKERTDHRHHAIDALVIACINRSLYQALVKTAQDLERKQTGLDMKDMVIDPPWLNLREDLDQKLKEIIIAHAPQLKLSGELHEVTGAGFIEGIGNVNRKDLDGTFTQVDKIIDSTVKEIVAQHLQDYGNNPKLAFTEGVKVLHKDGKTPIKRVRVLQSKTTLAKLEKTKFGARDKQGKVFKWLAYGNMHHVEIIKNKETGAYSGQFVTMMEASRRVKGINMPRQPIIKTDHGADYDFVMALHINDLVSIEKEGKRVFYRVQKLDSGSNRFVLRLHTTTTLDNKNEEIYFSINENSFATWRLQKHSINAIGKIIE

SEQ ID NO: 4994 - protein, 1042 aa, synthetic construct
  REGION 1..1042: note = Synthetic
MVKTILGLDLGSNSIGWALLGEENGCPSRIIALGSRIFIKAVEEKTPTPKNVKKRNARLTRRVLQRRARRKQRMLNYLLSLRLLPDALQNCLTPEIHLNAIGDPYKLRSKALDEPLTAYELGRVLLHLVQRRGFLSNRKTLLGDMADDPDVLAVLTELEGQEDTSSERAKEETAFKQDITELRKTIATANCRTLGEYLAAKGLHDCQRNRTRDGGHLRTDRQMYREELMAIWQTQKNHHSVLTDDVTAQIEHIIFYQRPLKLQADRVGKCSLEPKRSRANIARLECQRFRYLQDINNLQYFESHTEQWLTLSGPQKKRLEQLFEQQASLSFAGIKKHLGFDKSTEFNLERGNKKLKGNTTAYEIRRVLPDWDKLDDDKQRALVEDLLTFQKKSALKKRLETHWGFAPDSAVQLCLLEFEPGHSNLSLKAINALLPFLQLGQLFSEARVSAGYGYEVEQLVLQDKLPAPPETNNPIVNKGLHELKRLVNAIIAEYGKPDAIRIEMARDLEMNSKRYAEHEKQQKANTKANNEADSKFLEMRQQNAHLGLRNYAGKTDKIKYRLWKDQDGRCAYSGQAISLSILFGPEIEIDHILPYSESLDDSYMNKVVCYTQENRVKSQQTPLDAFGKDETKWNQITQAIKHWDRRLQSKKNRFFMTAADVQKRDFISSQLNDTRYISRVALEYLKPLGADISVSKGITTAWVRHQWGLNNLLGESDQKDRSDHRHHAIDAVVIACIDRRFYTALVGMAKDLERKQSQLNMKDIHIDPAWPCLRSDLEQALNNLIVAYAPQLKLSGELHEVTGAGFIKGIGNVNRKNLDASFTQVDKIIDPVVKAQIEKHLQQYGNKPKEAFAEGKVVVHKDGKTPIKRVRIVQSKTTLDKLKKSKFGARDKQGKIFKWLAYGNLHHVEILRDKQTGKYKGEFVTMMEASQRAKGIGKVKQPIIKTDHGEALEFVMALHINDIVSIENNGQRVFYRIQNLDSHNKRLKLRLHSDALAKTQDKAKDKARQQNTTLADKDSTIPALMVYGLQKHKINILGKIIA

SEQ ID NO: 4995 - protein, 934 aa, synthetic construct
  REGION 1..934: note = Synthetic
LRTRALDERLDPHELGRVFLHLVQRRGFLSNKKTRLGGEMLDDPDVQAVLAELGDDDADDGADAEETAFKTDIKELRNEIEKSGKRTLGEYLASRNTDEGKRNRQRNGGHLRTDRQMYRDELDKIWQQQAKHHPVLTAAVKGEIEEIIFHQRPLKPPKNIGKCSLETRNKRCKVARLEYQRFRYLQDINNLKYHCPHSEGDIRPAEDPDKHTKMVNIFERKAAPTFAEIRKALGLKRIKFNQEYENSVKKLKGNATACAIREILPEWDGWTEDKRIRLVEDLLTIRKQTALKARLMGHWKFPSKTAVQLCMLEFEPGYGDHSLKAIRKLLPHLEHGKIYSDAREAAGYGYEQQKTLSANRLGPPPEIPNPIVQKGLHELRRVVNAIIAEHGKPDVIRIEMARELEMNTKKYKAFLKQQKANTDANDRAIKAYEAIAKRESGLRMSSHVGKTNKIKYRLWEEQGERCVYSNRPISQTALFSDEVEIDHILPFSQSLDDSYMNKVVCYAKENRYKGNRTPKDAFSGDPAKWGQITSAISGWPKQELKSKHKRFYMTEADILKRDFIGSQLTDTRYISKEAGKYLESLGAEITYTRGAMTAWLRHHWDLNRLISETDKKERTDHRHHAIDAVVTACIDRGFYQALAANAKREERTGVRMRDLITDAPWDDLRSETEDKLNQIIVSHVPQRKISGALHEETGVGFIDGVGTVYRKNLDGNFTQKNAESIIDPVIKERVTQHLKAYGNDSKKAFADNVTVYHKNGRTPIKRVRVVQAKTDEAKLKKNKFGVRNKQGEIFRWMAYGNIHHVEIIRNKKNGKYEGVFVTTMEAAQRARGINSSKEPIIRTNHKEDREFVMAIHINDLVSIKVDGNTQFYRVQKLDRGPKQIKLRLHNAATIKNEAETLTAKESTIPALMKKELRVCKINAIGKLQDDKTHS

SEQ ID NO: 4996 - protein, 1025 aa, synthetic construct
  REGION 1..1025: note = Synthetic
MKKILGLDLGSNSIGWALMRETDGEVSQIIDLGSRIFNKAVEEKIPTPKNQKRRNMRLGRRVLQRRARRKQRMVNYLISLDLLPQALSNNFGQEKLLNELGDPYELRTKGLDQQLEPHQFGRVLLHFVARRGFLSSKKQVAGDLVDDPDTQTYLSTLDRKQTKDEEGQFKADIAEVYQAIKGNHARTLGEYLFNLEVGKVKRNRSHDGGHLRTDRAMYKDELYKIWVTQQLYFDLPNEFISEIEKIIFYQRPLKLKKDRVGKCSLEPKHYRANTARLEVQKFRYLQDINNLEYFERHSEQWLKLSDEQKNKLRIYFEHHPKITITALKKELGLDKPTKINLEAKNLKGNITACEIRRVIGNTWDEYSDEAQSQLFEDLFTIKKKSSLKARLITHWDFDKQTAIKLCLIEFEPSHSNLSLKAIKKLLPFLEQGLVYSKKDVDTGELGALQAAGYQEEIVENKKTESLDKLPAPQETSNPIVNKGMHELRRVVNAVIKQYGKPDVVRIEMARDLEMNTKRYKENEMRQRKNQKANEKAIEVFRQEVGKKYPSHDEKIRYRLWRDQDQRCAYSGNVIALGQIFSADCEIDHILPFKKSLDDSYMNKVLCFEKENRNKADRTPIDAWGGDNDKWNQITQAISQWKFLKSKVDRFYMTEKDLKERYFIFSQLTDTRYISRLAQEYLRQLGCDVNVTKGFVVSEMRHQWGFNSLIGETDKKERTNHCHHAIDAVVIASTSRSLYQQAANQIKQNKLKIPEPYADIRTELEEKLKHVIVSHTPQRKLSGGLHEETGAGYVAKHGGLVYRKTLNPEFTLKNAMSIIDEQVKTKVLEQLENYGNSKEAFNEENLKTLKLGKNPIKRVRVLQSKIKTTKKNTAEDILQQTKFGVKDKSGKVFKYMSYGNNHHAEIIQNIETGKIKAEFVTMMEASNRVKGINMPKQPIIKTDYGNEWKFLMALHINDTVSIEKGNGERVFYRVQKLGGGYDITLRLNIASTTNDQNQCLPLMAKGVIENNLIVYKINAIGGLIDD

SEQ ID NO: 4997 - protein, 1030 aa, synthetic construct
  REGION 1..1030: note = Synthetic
MSKKVLGLDLGSNSLGWALLEETDGSVNSIVDIGSRIFTKAVEDKVPTPKNVKRRDMRLGRRVIQRRSRRKQRMLNYLVSLKLLPKELQGHTQPEIILNELGDPYELRVKALDTPLTPHEFGRILLHFVARRGFLSTKKQAAGDLIDDPDTIIFLNELDNESVGSKEEGAFKADIKEVHASIDASGSRTLGEYLHKLAQGQCKRNRQHEGGHLRTERKMYQDELALIWIEQEQYFSHLPTDFMSKDQGVLQIVFYQRPLKLKKDRVGTCSLEPKNYRAAMARLETQRFRYLQDVNNLQYFERHTDQWLSITHEDKQTLINYFEHNPKITITALKKQLGFDKLTKINLEAKNLKGNITACEIRSVLDEQWDHYTEEKQAALVEDLLSIKKKSALKTRLISHWGIDKSIAIKLCLLEFEPGHGSLSLKAIRKLLPFLQQGLIYSKKDYATGELGALQAAGYLDVEEEQANFDKLGPPAETSNPIVNKGLNELRRVVNAIIKQYGKPDIIRIEMARDLEMNTKRYKENEARQQKNRKENEKAVAAYKKLALGKYPSHDDKIKYRLWEDQGHSCAYSNKTIMLSQVFTAQVEIDHILPFKKSLDDSYMNKVLCFVSENRAKGDRTPKDVWGGDENKWLQITQAISRWKGLDSKVKRFYQTEVDLQKRDFIASQLNDTRYIAKLALDYVQQLGCDVSVTKGYVVSQMRHQWGFNDLIGETDKKERTDHRHHAIDAVVIAATSRQMYKKAVAQIERNKLNIERPYESIKDELAEQLNQTIISHASQKKLSGGLHEETGAGFIEKHGGLVYRKNLAPDFTVKNANSIVDETVRELVLAHLLKHDNEPKKAFADGFIVYHKDDKTPIKRVRVLQSKTTKEKLEQSKFGIRDRSGKIFKYMAYGNMHHVEVVQHNETGKYKGAFVTMMEASHRAKGIRSKLNPEGEAQAIVKRDHGSEWKFVMALHINDIVSIDNGEGQLFYRVQKLDSANNRFYLRAHQASTLNNKEDALAVTINQENFGRHSLKVHQINAIGIFADD

SEQ ID NO: 4998 - protein, 1016 aa, synthetic construct
  REGION 1..1016: note = Synthetic
VKKILGLDLGSNSIGWALMNETDGRVNQIIDLGSRIFNKAVEEKVPTPKNQKRRDMRLGRRVLQRRARRKQRMANYLISLDLLPQELSNNFGQEKLLNELGDPYELRTKGLDEQLTSHQLGRVLLHFVARRGFLSSKKQIAGDLVDDPDTQTYLSTLDNKKAKDEEGQFKADIAEVYQAIKDNNARTLGEYLFNLEVGKVKRNRSHDGGHLRTDRAMYKDELYKIWEKQQSYFDLPDEFINEVEKIIFYQRPLKLKKDRVGKCSLETKHYRANTARLEVQRFRYMQDVNNLEYFERHSEQDLKLSDKQKEKLRNYFEHHSKITITELKKELGLDKPTKINLEAKNLKGNITACEIRTVIGNIWDEYSDEKQSQLFEDLFTIKKKSSLKARLITHWDFDKQTAVKLCLLEFEPSHSNLSLKAIKRLLPHLEKGLTYDKARVECGYDYEVKEIVALDKLPAPPETSNPIVNKGLHELRRVVNALIKQYGKPDIVRIEMARDLEMNTKRYKDNEIRQRKNQKANEEATEVFRQETSRKYPSHDEKTRYRLWKDQSERCAYSGKAIARCQVFSAECEIDHILPFKKSLDDSYMNKVLCFEKENRNKGDKTPVDAFGGDNEQWNQITHAIANWDKSLKSKIARFYTKEEDLGKRDFISNQLNDTRYISRLAQDYMRELGCDVSVTKGLVVSKIRHQWGFNNLIGETDKKERTDHRHHAIDAVVIASTSRGLYQQAAMQIECDKLKISQPYDNILQELGEKLKHMIVSHMPQCKLSSSLHEETGAGYIAKHGGLVYRKTLNPEFTIKNAMSIVDEQVKNIVLEHIENHDNSKEAFSEKNLQTLKLGKNPIKRVRVLQSKIKATKKQTAEDILQQTKFGVKDKSGKIFKYMSYGNTHHVEIIKNLKTNKIKAEFVTMMEASNRAKGINISKQPIIKTNHGDEWEFLMALHINDTVSIEKNDGDFFYRVQQLDIQNKKFVLRLGIASTLQNKNEELSVGINKENFDKYKINLHKVNAIGRLIDD

SEQ ID NO: 4999 - protein, 1044 aa, synthetic construct
  REGION 1..1044: note = Synthetic
MFKQKILGLDMGSNSIGWALLEGEDGVPTGVIDAGCRIFNKSVEEKTPTPKNVKRRDKRLSRRVIQRRSRRKKRMQNYLIKLKLLPETLLKNPQPEIILNSLGNPYLLRTKALDHKLSPYELGRVFLHLVQRRGFLSSKKTLLGDMIDDPDVLSVLAEEDDTLSDSQRKDKEETAFKQDISEFRNTIKKADCRTLGEFLAGLDHHDCKRNRSREGRHLRTDRQMYKDELNLIWKEQLKYHDILDKNVRAEIEQIIFFQRPLRLKSGRQGNCSLEPLKKRARMGRLEVQKFRYLQDINNLQYRLHGEYKWISLEKDQRKSLVDLFEHVQSSSFRKIRTALKLKGAQFNLETDVKKLNGNTTAVKIRNILPDWDEWPGDRQSALVEDLITIMKKSVLNKRLTGHWGFSLKTAVQLCLVELEPGHNNLSSKAIKKLLPFLEQGQIYSEARISAGYGYEIKKTDERDRLGPPPEIPNPIVSKGLHELRRIVNAIIAHHGKPDIIRIEMARDLEMNTQKYKKFKKQQKANTKANDEAVNKYREMRDQNPHLHLSAYPSRDEKLRYRLWKEQDGRCAYSNISIMLPTLFSSEAEIDHIIPYSLSLNDSYMNKVVCLSTENRYKGQRTPIDAFGGNKKKWNQITEAVENWPKNLRSKKDRFHFTAEDIVERDFISSQLNDTRYICKEALTYLNQLGNEVTTTKGFLVSWMRHMWGLNSLIGKTDHKERTDHRHHTLDAVVIACIDRKFHTTLVKAAKIIEQNQLELKTRKLPIPLPWETIRTDTDLVLKKLIVSHAPQKKVSGELHEETGAGFIKGLGNVYRKDLDGKFTVGKAKDIIDPEVKEIVVKHLSKFDNKPKDAFAQGETVYHKDGKTPIKRVRIIQSKTNLKKLEKRKFGVRNKQGDIFKWMPYGNLHHVEIIKNKDTETYSGVFVTMMEARRRAMTNTKRAHKKRINPESIIKINHGPETQFITALCKKDLVSITYKKGERRIYRVQKLDGPPNNRIRLRLHTAATDKNNAETLPDRESTIPALIKKKMKRINVNVLGKLLDD

SEQ ID NO: 5000 - protein, 1032 aa, synthetic construct
  REGION 1..1032: note = Synthetic
MSKKILGLDLGSNSIGWALLKETEGKPSEIINVGSRIFTKAVEEKTPTPKNVKRRNARLTRRVLQRRARRKLRMLNYLIQLELLPKELTNNPTPEIILNELGNPYTLRAQALDHPLTPFELGRVLLHLVQRRGFLSNRKTLLGDMADDPDLLDILAELEGEDDNSSDRAKEETAFKKDINELRHAIAEQGFRTLGEYLGSLEHHDSKRNRSRDGGHLRTDRQMYRDELNMIWAKQSQHHSILTDEVKTQIDEIIFKQRPLKLNADRIGKCSLEPSRKRAKVARLECQRFRYLQDINNLQYIDPYTDKSVSLSETDKQKLISLFENTANVSFAGIRKALGFGKNYEFNLEIGAKKLKGNITACEIRKQLPEWDSFNDTEQLALVEDLLTINKKSVLKNRLVSHWGFNINVAVQLCLLEFEPGHSSLSLKAINKLLPHLQAGQIYSDARKNAGYGYEVTEIAVIDKLGIPPETTNPIVNKALHELRRLVNAIIAEYGKPDAIRIEMARDLEMNTKRYQDFLKQQSRNTKANDEATTQFQEIASRNPHLALSKYPSKTDKLKYRLWQDQKQCCAYSGKTISQSELFSSVIEIDHILPYSESLDDSYMNKVVCYTAENRFKGQKTPIDAFGGNAEKWNQITQAINRWDRSLKSKKARFFTTFAELQKRDFISTQLNDTRHISVLAKNYLVSLGADISVSKGITTAWLRHQWGLNSLIGETDKKERTDHRHHAIDAVVVVCVDRRLYQALVNISKDLERSQSELNMKDIYLDPPWHTLREDLQQTLDKVIIAHAPQLKLTGELHETTGAGFIEGLGNVNRKNLDPSFTQVKKIIDPTVKALVEQHLAGFGNDPKKAFAEGVTLLHKDGKTPIKRVRVLQSKTTLEKLQKSKFGAKNKLGKVFKWLAYGNMHHVEIVRDSKTGKYTGHFVTTMEATKRAKGILIPKQSIIKTDHGADTMFVMALHINDTVSVIHNNQKVFYRIQVLDSANKRISLRLHTASTLKNDNETLLDRDSTIESLMSAGLEKHLLNIIGKILA

SEQ ID NO: 5001 - protein, 1061 aa, synthetic construct
  REGION 1..1061: note = Synthetic
LPTKNKFHWYEKQIIDLSRLLYGLIITGKNKMSKLILGLDLGSNSLGWALYSEDEQQQKNLVDIGSRIFSKAVEEKVPTPKNVKRRNMRLGRRVLQRRARRKQRMMNYLISLNLLPTNLKDSQQPEIILNELGDPYQLRAKALDQQLTAYEFGRILLHFVARRGFLSSKKQVAGDLIDDPDTIAYLQLNDESESADKEEGQFKTDIAEVKKAISEAGSRTLGEYLYNLERGKCKRNRSHEGGHLRTDRQMYREELALIWQQQQAFFTDLPTDFMEDKKGVKRIIFYQRPLKLKADRVGKCSLELAKNRSLVARLEVQQFRYLQDINNLTYFERHSEKDIPASAEQKALLIAHFENNTKITSTKLRKILGVDKSTKLNLEAKSFKGNLTGCAIKKIISDIWQNYSAEQQINLVEDLLTIKKKSVLKNRLMNHWNFTSQQAIELCLLEFEPGHSNHSLKAINKMLPHLKNGLIYSDARIQAGYQYETKADLTTFNELLDKPPETANPIVNKGMHEIKRVVNAIIKEHGKLFAIRIEMARDLEMNTKRYKENEAQQKRNQKANEIAEKAYQSLGLGQYPKHTDKLKYRLWKDQYKRCAYSNKSITLNQVFSASVEIDHIIPYKKSLDDSYMNKVVCFTAENRYKGDRTPKDTWGEQEDKWNQITQSIAKWKGLDNKKARFYKTEKDLQDRDFISNQLNDTRYISKLAISYLKTLGCDVSTSKGVTTAWLRHQWGLNSLIGETDKKERTDHRHHAIDAAVVACVDRSLYKKILHWTQTNEKKLKITPPTSHFREQLAEHLKHMIVSHDVQRKLSGGLHEETGAGYIEKHGGLVYRKTLTGDFTVKNANSIVDKTIKNQVLAHLKSFDNDSKKAFSPEVTVYHQDGKTPIKRVRVLQSKTSLKKLEQNKLPVKDTNGKIFKWMAFGNNHHVEIIKNTETDKIKGVFINMFEAHRRAMTGTKSAKKRGIVQEPIIQTKHDGNEFIMALHINDLVSVEIENGERVFYRVQKLGGGYDLTLRLHTVTTTKREKEFIENKTMLENSFSNFIKINNMKLHKINCIGTLLDD

SEQ ID NO: 5002 - protein, 1053 aa, synthetic construct
  REGION 1..1053: note = Synthetic
MSNTKIKKVLGLDLGSNSIGWALLETNDGRPHKIIDLGSRIFNKAVEDKTPTPKNVTRRAARLTRRVLQRRSRRKIRMLNYLISLDLLPKSLRDNPAPEIILNTLGDPYELRAEALDKPLEKHQLGRVFLHFVQRRGFLSNRKTILGDLVDDPDVTAVLAEAESEEDTSTEQAKEETVFKKQISVLRQTISETPAPQDSESENKKCRTLGEYLFTIKAPLTRRNRTHSGGELRTDRQMYRDELELIWKKQATHHTVLNEDVKEQIEDIIFAQRPIKLRSDRIGKCSLEPTKNRISIARLEYQCFRYLQDVNNLEYMLPCDNHWTKLNEDQRQKLILLFESKSSVSFTEVKKTLDLKRNVKINLEEGGTKKFKANVTASAIRTVIPEWDQFDSSQQLSFVEDMLSIRKKSTLKKRLTGHWNLNPETAVQLCMLEFEPGHGNLSLKAINKLLPFLEQGMLFNEARVEAGYGYEKENTEINERLGMPPGTSNPIVNKGLHELRRLVNAIIAEYGKPDIIRIEMARDLEMNTKRYKANEAQQTANTKANEKATEAFQEIGSQNPQLGLRHYPSHTDKLKYRLWFDQEKRCAYSNQSINLTSLFTGQVEIDHILPYSQSLDDSYMNKVVCFANENRNKGQRTPVDAFKTNPEKWEQIKQSVFRWGKKLKSKQNRFFMSEADVQKRDFISSQLNDTRYMTKVALDYLKQLGADITTCKGITTSHVRHWWGLDSLLGEKNTEKDRTDHRHHAVDAAVIATIDRGFYNKIVSTAKQLERGNSSLKMNDLKVAPPWVDFRNDLDKKLKSMIVAHSPSRKISGSLLEETGVGFIKGQGTVYRKLLGPEMKVKQAEKIIDPQVKAIVLDHLEQYGDDPKKAFAEGIAVLHNDGKTPIKRVRVLQSKTTLDKLEKHKFAVRDRQGKAFKWLAYGNLHHVEIVRDRQSEKVSGVFVTMMEAANRAKGIRIPKQTPVQTNHGPQTEFLMALHINDLVSMMQDGERKFYRVQKLDSGINMVMFRLHTASTLDDRNQELHLTINKQLISQWNLQIEKVNAIGKLQPIHD

SEQ ID NO: 5003 - protein, 999 aa, synthetic construct
  REGION 1..999: note = Synthetic
LLTEESGQSSEIVDLGSRIFSKAVEEKVPTPKNQKRRDMRLGRRVLQRRARRKQRMLNYLVSLNLLPKELQNNTQPEIILNEIGDPYELRTKALDEQLTPYEYGRILLHIVARRGFLSTKKQVAGDLIDDPDTLNYLSTLDEKPTKDKEEGQFKADISQVYQQIKDCGARTLGEYLHGLEIGNVKRNRNHDGGHLRTDRKMYLDELGLIWKQQAPYFDNLPSDFMQKNKGVMNIIFYQRPLKLNKDRVGRCSLEPKHYRANMARIEVQKFRYLQDINNLKFFDRWQEKWISISDEQKSKLKKIFEHNAKITITALKKELGLDRPTKINLDTKNLKGNITAIEIRSVIGDTWDKYTAKQQHDLFEDIFTIKKKSTLKARLITHWDFDKKTAVKLCLIDFEPSHSSHSLKAINKLLPYLEQGMIYSDARKAANYDYQIEEIKVTGTLGIPPETTNPIVNKGMHELRRLINAVIKQYGKPDIIRIEMARDLEMNTKRYKENESRQKKNQKANEAAQHAFEGLNLGKKYASHDDKIRYRLWQDQDERCAYSGNTIALNQVFSSECEIDHILPFKKSLDDSYMNKVLCFTSENRNKSDQTPVDAWGGDNEKWNQITQAIGHWDKSLDNKAQRFYTKEADLQKRDFISSQLNDTRYISKLAQDYVRQLGCDVNITKGFVVSQIRHQWGFNSLIGEVNKKERTDHRHHSIDAVVIAATSRNLYQNAVRQIKQNRLNIAPPYSHIREELAERLEHTIVSHAPRRKISGALHEETGAGYIEKHGGLVYRKTLNQEFTIKNAMSIVDEQVKTTVLEHIENHGTSKQAFNEANLKTLKLGKNPIKRVRVLQSKTNEKKLAQSKFGVRDQTGKIFKYMSYGNTHHVEIIKNTKSGKIKGEFVTTMLASHRAKGINIPKQSIIKTDHGEDWEFIMVLHINDTVSIELENGERVFYRVQKFMIAQGFLVLRLNTASTLKNKDEEIQMSIHRLFTEMKLRNHQMNTIGHFIDHD

SEQ ID NO: 5004 - protein, 1035 aa, synthetic construct
  REGION 1..1035: note = Synthetic
MGKKILGLDLGTNSIGWALLEETNNKPSKIIGLGSRIFQKAVEEKTPTPKNVKRRDARLARRVIQRRARRKQRMLNYLVKLDLLPKEIQGHTQPEIILNSLGDPYQLRAKALDHQLGKHELGRVFLHLVQRRGFLSNRKTLLGDMVDDPDVKAVLDEIEDREDTSSERAKEETAFKKDISELRSTIKEKGYRTLGEYLASLEHHDCKRNRSREGGHIRTDRQMYRDELNLIWEKQSNFHDVLTKNVKEQIEKIIFYQRLLKLLSDRIGKCSLEPSRKRANIARLESQQFRYLQDINNLQYLDYYTDTWKELTQENREKLIELFEHKAHPTFKTDVRNALGLDKGTEFNLDTDNKKLKGNITACEIRKVLPKWDEFPDEKQHALVEDLLTINKKSVLKKRLINQWVFDKEIAINLCFLEFEPGHANVSIKVMKALLPHLRKGQIYSDARVSAGYGYETEEIKIVDNLGKPPEIANPIVNKALHEVRRLVNTVIKEYGKPDAIRVEMARDLEMNTKRYKAFLKQQAANTKANNEAVEEYQTMGTKSPHLKLSKYPNRSDKIKYRLWKDQDERCAYSGKVINSATLFSPEIEIDHILPYSQSLDDSYTNKVVCFAGENRYKGQRTPIDAYGGDEEKWNQISQSISRLGKKLKSKKNRFYTTDGELQKRDFINNQLNDTRYISKVTLDYVKQLGANVSASKGITTAWLRHQWDLNSLIGETDKKERTDHRHHAIDAVVIACVDRQFYKDLVGLAKDLEKRQPELNMRDIHIDPYWPNLRSDLDEKLQNIIISHATQRKLSGALHEETGAGFIEGKGTVYRANLNGDFKLTQVKKIIDKEVRQIVEQHIKKYDNNPKTAFAKGVTVYHKDGKTPIKRVRILQAKTTKDKLEKSKFGVRNKEGEVFKWVPYGNMHHVEIIKHNQTGKYSGVFITTMEASHRTRGISRDKCPIINTDHGDGYEFVMALHINDIVSVKVDDIDTYYRIQMLDSPNKRIKLRLHTASVLNNDADTFPDRELTIPALIAKKLTPFTINSLGKKLK

SEQ ID NO: 5005 - protein, 1013 aa, synthetic construct
  REGION 1..1013: note = Synthetic
MSKKVLGLDLGSNSLGWALLEETDGKANSIIDIGSRIFTKAVEEKVPTPKNVKRRDSRLGRRVIQRRSRRKQRMLNYLVSIDLLPRELQGHTQPEIILNELGDPYELRAKGLDTQLTAHEFGRILLHFVARRGFLSTKKQVAGDDTPTEDKEETAFKADISEVKKAIDSAGARTLGEYLHKLVRGECKRNRSHEGGHLRTDRKMYQDELALIWQQQSQYFSHLPNDFMEKDQGIKQIIFYQRPLKLKKDRIGKCSLEPKNNRAPMARLEVQRFRYLQDVNNLQYFERHTDQWLSISNDDKQKLIEYFEHHPKITITELKKQFGFDKLTKINLEAKNLKGNITACDIRSVLNEQWDNYSGVSQYALVEDLLSIKKKSALKTRLIKHWGLDASKAIELCLLEFEPSHSSLSLKAINKLLPFLNQGLIYSKKDKGTGELGALQAAGYDDELKEQEVLDKLVQPIATSNPIVNKGLHELKRVVNAIIKQYGKPDVIRIEMARDLEMNTKRYKENEARQAKNKKENEKAVVAYKDLKLGKYPSHNDKIKYRLWEEQNYCCAYSNNSIPLSAVFTAQVEIDHILPYKKSLDDSYMNKVLCFTAENRNKGDRTPRDAWSGDAEKWTQITQAISRWKGVDSKVKRFYQTEDDLQKRDFISSQLNDTRYIAKLALDYVKQLGCDVSVTKGFVVSQIRHQWGFNDLLGETNKKERTDHRHHAIDAVVIAATSRQLYAKAVNQIERNKLKIEMPYPHIHDELKERLEHTIVSHASQRKISGGLHEETGAGYIEKHGGLVYRKNISPDFTVKNAQSIVDETVQALVLSHLESYDNVPKKAFADDVTLYHKDGKTPIKRVRVLQSKTTRKKLEQNKFGIKDKSGKVFKYMAYGNMHHVEILKHKETGKYKGEFVTMMQASHRARGIQSKLNPEGLRQVITKIDHGDKWHFVMALHINDLVSIEGENFERIYYRVQKLESPTGLTLRLSTASTLDNKEEEIRVSISTLMNKGVTMHVVNSIGIISDD

SEQ ID NO: 5006 - protein, 1041 aa, synthetic construct
  REGION 1..1041: note = Synthetic
MICMIYKRMNMSKVILGLDLGSNSIGWALLKEQNGKPNEIINIGSRIFTKAVEEKTPTPKNVKRRNARLSRRVTQRRARRKLRMLNYLVKLNLLPQELTGNPTPEILLNELGSPYLLRAKALDSPLTKFEMGRVLLHLVQRRGFLSNRKTLLGDMADDPDVLDVLSELEGEDDNSSDRAKEETAFKADISQLKKAINENGFRTVGEYLASLDHHDCKRNRSRDGGHLRTDRQMYRDELDLIWEQQKTHHEELTDAVKDQIEDIIFKQRPLKFNADRIGKCSLEPSRKRAKIARLECQRFRYLQDINNLQYFDYYTEKSISLDGLAKQKLVQLFETTANVSFAGIRKALGFDKTIEFNLENGNKKLKGNITACEIRKQLPEWDSYEDGKQHALVEDLLTINKKSVLKNRLTGHWGFCPNTAVQLCLLEFEPGHSNHSTKAISKMLPFLKQGQIYSDARVNADYGYEITKLEFTDKLGAPPETSNPIVNKALHELRRLINAIIAEYGKPDAIRIEMARDLEMNTKRYQDFIKQQSKNTKANDEAVNSYQEMGQKNPHLALSKYPSKTDKLKYRLWQDQKQSCAYSGKLISKSELFSSAIEIDHILPYSESLDDSYMNKVICYTSENRFKGQKTPIDAFGGNTDKWSQITHAINKWDRSLKSKKARFFTTFSELQKRDFISTQLNDTRYIGQVAQGYLAELGADISVSKGITTAWLRHQWGLNSLIGETDKKERTDHRHHAIDAVVVACVDRRLYQALVNTAKELERSQTELNMKDIYIDPPWDNLRDDLEKSLAKVIIAHVPQLKLTGELHETTGAGFIEGIGNVNRKNLDGSFTQVDKIIDPIVRELVEQHLENHGDNPKNAFAEGVTVYHKDGKTAIKRVRVLQSKTTLEKLGKSKFGAKDKQGKVFKWLAFGNMHHVEIIKHKATGKCSGQFVTTMEATHRAKGINMPKQSIIKTNHGKDHEFILALHINDLVSMEKDGQCFFYRVQNMEAGDNRIMFRLHNTSVLGNKSEGLRLSVNNGLFDIWQLQKHSVNAIGKLIG

SEQ ID NO: 5007 - protein, 813 aa, synthetic construct
  REGION 1..813: note = Synthetic
LLTEESGQSSEIVDLGSRIFSKAVEEKVPTPKNQKRRDMRLGRRVLQRRARRKQRMLNYLVSLNLLPKELQNNTQPEIILNEIGDPYELRTKALDEQLTPYEYGRILLHIVARRGFLSTKKQVAGDLIDDPDTLNYLSTLDEKPTKDKEEGQFKADISQVYQQIKDCGARTLGEYLHGLEIGNVKRNRNHDGGHLRTDRKMYLDELGLIWKQQAPYFDNLPSDFMQKNKGVMNIIFYQRPLKLNKDRVGRCSLEPKHYRANMARIEVQKFRYLQDINNLKFFDRWQEKWISISDEQKSKLKKIFEHNAKITITALKKELGLDRPTKINLDTKNLKGNITAIEIRSVIGDTWDKYTAKQQHDLFEDIFTIKKKSTLKARLITHWDFDKKTAVKLCLIDFEPSHSSHSLKAINKLLPYLEQGMIYSDARKAANYDYKVEEIEAVNTLGMPPETSNPIVNKGMHELRRLINAVIKQYGKPDIIRIEMARDLEMNTKRYKENESRQKKNQKANEAAQHAFEGLNLGKKYASHDDKIRYRLWQDQDERCAYSGNTIALNQVFSSECEIDHILPFKKSLDDSYMNKVLCFTSENRNKSDQTPVDAWGGDNEKWNQITQAIGHWDKSLDNKAQRFYTKEADLQKRDFISSQLNDTRYISKLAQDYVRQLGCDVNITKGFVVSQIRHQWGFNSLIGEVNKKERTDHRHHSIDAVVIAATSRNLYQNAVRQIKQNRLNIAPPYSHIREELAERLEHTIVSHAPRRKISGALHEETGAGYIEKHGGLVYRKTLNQEFTIKNAMSIVDEQVKTTVLEHIENHGI

SEQ ID NO: 5008 - protein, 1035 aa, synthetic construct
  REGION 1..1035: note = Synthetic
MFKKILGLDLGTNSIGWALLEEDNGKPFRIIDLGCRIFTKAVEEKTPTPKNMKRRNARLARRVIQRRARRKKRMLNYLVKLELLPKELQEHSQPEVILNDIGDPYVLRSRGLNKDLTKHELGRVILHLVQRRGFLSSRKTLLGDMVDDPDVQAELAELEASGDETISSEQAKEENAFKKDISELRDRIKNAGCRTLGEYLASFGPHGAKRNRQRLGGHLRTDRQMYKEELDLIWARQSQCHPFLTDEIKEQVEKIIFFQRPLRLRSDRVGKCSLEPRCQRAQLAKLECQRFRYLQDINNLQYFDLGTDTWQPLNDGERGKLIYFFENHASITFPGIRKVLELDRKTEFNLESDTKKLKGNITACEIRKALPAFDSLSIDQQHALVEDLLTIRKKSVLKNRLLNHWRFSTTESVKLCLLELEPGHGSHSLKAIRKMLPFLEQGQIYSDARQSADYSYNPDKVNPADRLGAPPEIPNPIVLKALHELRRLVNAIIAEYGKPDTIRIEMARDLEMNTKRFKEFMKQQAANTRANDEAAEKYKEMAGKNPHLKLSSYPTRDDKIKYRLWKDQEERCIYSGRQISLSNLFSPEIDVDHILPYSKSLDDSYMNKVVCYAAENRYKGQRSPVEAFGGSDKWTQIIQSVRRWPKQLRSKTNRFFVTEEELQQRDFINSQLNDTRYISRLAREYLLQLGTDITVSKGITTSWLRNMWNLNSLLGNSQVKERTDHRHHAIDAVVIACIDRSFYKTLVDMSKWAERRNPEFRMRDIHFDPPWQNLRGDLAQILGRTIIAHSPQRKLSGALHEETGVGFIPGIGNVNRVNLDRDFKMTKVKRIVDENVRKLIEEHLSRYGNNPKEAFAEGITLYHKDGKTPIRRVRIVQSKTTLNKLEVSKHGVKDSRGNIFKWLAYGNIHHVEILRDRGNDTYHGVFVTAMEASCRVRGINMPKQPIIRTDHGDGLEFIMALHINDLVRLKNGGTNDIYRIQKLDSANKRLELRLHAAATINNEVETLPDRESTIPALMNAEMVKLRVNCLGKIIQ

SEQ ID NO: 5009 - protein, 1041 aa, synthetic construct
  REGION 1..1041: note = Synthetic
MSNTKIKKVLGLDLGSNSIGWALLEEVDKRPQSIIDLGCRIFNKAVEDQTPTPKNVSRRNARLTRRVLQRRSRRKQRMLHYLISLSLLPESLRNDHSPEITLNSIGDPYELRAKALDDPLEKYELGRIFLHFVQRRGFLSNRKTILGDLVDDPDVIAVLAEAEEEEDTSSEQAKEETLFKKQISVLRQTIADKKCRTLGEYLFSIKAPLTKRNRTHSGGQLRTDRQMYREELDLIWKEQAKYLSTLTDEVKEQIENIIFFQRPLKLRSDRIGKCSLEPKKNRASIARLECQRFRYLQDISNLQYMLPNQDQYTKLNEKEKGTLVTLFESKGVVSFTDVKKALDLKRNVKINIEEGGNKKLKGNVTSTTIRKVFPSWDKLNSTERVALAEDMLTIQKKTTLKKRLTGHWGLSPEIAVELCMLEFEPGHMNLSLNAINKLLPFLEKGMLFNEARVKAGYGYEVEETELKDRLGMPPEIANPIVQKGLHELRRLVNAIISEYGKPDVIRIEMARDLEMNTKRYQAFTKQQNANTKANDEATEAFQDVSSQNRHLELGQFPSHTDKLKYRLWIEQEKRCAYSNQSINLTSLFTGQVEIDHILPYSQSLDDSYMNKVVCLTSENRNKGQRTPVDAFKTNPEKWEQIKQSVFKWGKNLKSKQNRFFMFDADVQKRDFISTQLNDTRYISRVALDYLKQLGADITTCKGITTSHVRHWWGLNNLLGDTDKKERTDHRHHAIDAAVITIIDRGFYNKIVSTAKQLERGNSSLKMNDLKVAPPWGDFRNDLDKKLKTMIVAHSPSRKISGSLLEETGVGFIKGQGTVYRKLLGPEMKVKQAEKIIDPQVKAIVLDHLEQYGDDPKKAFAEGIAVLHNDGKTPIKRVRVLQSKTTLDKLEKHKFAVRDRQGKAFKWLAYGNLHHVEIVRDRQSEKVSGVFVTMMEAANRAKGIRIPKQTPVQTNHGPQTAFLMALHINDLVSMMQDGERKFYRVQKLDSGINMVMFRLHTASTLDDRNQELHLTINKQLISQWNLQIEKVNAIGKLQPIHD

SEQ ID NO: 5010 - protein, 1035 aa, synthetic construct
  REGION 1..1035: note = Synthetic
MSKKILGLDLGTNSVGWALFEANDDLAPHKLVDLGVRIFQRAVEDKTPTPKNQARRNARMARRILQRRARRKQRMQNFLIAHDLLPSILSDTTQPEMILTGTRDLPGLGDPYELRAKALDYELKPYELGRVLLHLVQRRGFQSNRKTLLGDMADDPDVVSILSEENEDLTSEETAFKKDIAQLRDEIKKSGARTLGEYLHQLPQGQVKRNRSTEGGNLRTDRTMYKDEFWQIIEAQKAFHPVLEEIDLALFEIIFFQRPLKLKKDRVGKCSLEPTKHRAKKAWQTYQRFRYLQDINSLKLFNSYTTEWRSLNTEDRTKLIELFEQDKRPTLTKIKKVLGLSKNDLLNFETGNKNFKGNTTGIAIREVYPGWDDLIQDQQNKLEEDLISFVSKKALKKRLETHWGLDTETAINLCVTELEPEHSDLSLKAINKLLPYLEQGQVYSDARVSANYGYEVTKHEPQNKLSAPPEIPNPIVMKGLHEVKRVVNAIIKQYGKPDAIRLEMARDLEMNTKRYKAFVSQQNKNQSDNQEAQDQFESIAAANRHLGLSKYPSHTDKLKYRLWKEQQKLCAYSHKPISLTELFTGAVEIDHILPYSLTLNDSYMNKVVCFAKENQVKGQRTPKEAFESDTAKWEQIEQGIARWYSKGLMTKRDAFYKTSDDLDKDFIGSQLTDTRYISREALHYLQTLGVDVSTIKGQVTSWLRHIWGMNSLIDDAKTEKDRGDHRHHAIDAAVVACADRKLYNTIVRVAKDLEKRPGTLNIKDIHIDPVFDDFRHQIESRLQEIVIAHAPVKKITGALHEDTGLGFIEGVGAVYRKKLDESLTAKSAENILDPVVKSLVKAHLEKHGNKPKVAFSKANSLYHKDGKTPIKRVRILQSKASLKDLEQTKLGIKNKNGDIFKWMTLGNTHHVEIFRHKETGKFKAEFVTALEATQRAVQHKQPVVKSYLNDQHEFCFALHKNDLVRAKNGSEYEIYRVQKTDSTSNRLMLRKHTASRLDNKTDEIFKSITALMGEYEMQKIQVNAIGIMAHDQTHP

SEQ ID NO: 5011 - protein, 1032 aa, synthetic construct
  REGION 1..1032: note = Synthetic
MGKKILGLDLGSNSIGWALLEEQDGQPNKIIDLGCRIFIKAVEEKTPTPKNVKRREARLTRRVLQRRAQRKERMLETLIQQGLLPQELSTHPQPEIILNVLGDPYLLRAKALDEKLEAHELGRVLLHLVQRRGFLSNRKTLLGDMLDDPDVQAVLDELEQDEDLSNERAKEESAFKKDIAELKREIALTGCRTLGEYLAGFDRHRCRRNRAHDGGHLRTDRQMYQEELELIWQTQQEYHPQLTETFKEAIESIIFYQRTLKLKADRIGKCSLEPKYNRIRIARLEYQCFRYLQDINHLEYLESQTERWLKLNEAQRNKLVELFEREANITLPKIRKTLCFDRTVEINLERGDKKLKGNITACEIRKILPDWDNFDAERQQALVEDLLTFQKKSALKKRLTTHWRFSPDIAVNLCLLEFEPGHGNLSCKAISKLLPFLERGQIFSDARISAGYDYEPETIAVIDKLGLPPDIANPIVRKGLHELRRLINALIAEYGKPDAIRLEMARDLEMNTQRYADYIKQQKANTKANDEAAEKFGEMRRLNPHLQLSRYPSRDDKLKYRLWRDQKECCAYSGQTISLSTLFGPEIEIDHIVPYSESLDDSYMNKVVCYAKENRNKGQRTPIDAFSGNEQQWNQIVQALDRWPKSLQAKKRRFFMTGTESQQRDFINNQLNDTRYMSRVALDYLKPLGADISVSKGQTTAWMRHQWGLNNLLGDGNEKDRGDHRHHAIDALVIACIGRSFYRNLVETAKQLERQRSQLTMRDIHLDPPWPNLRNDLQQKLTEMIVSHAPHRKLSGELHEATGAGFIEGIGNVNRKVLDGGFTQVDKIIDPTVKQLVTRHLQRFDGKPKEAFANGVNVYHKDGKTPIKRVRVVQSKTTLAKLQKTKFGAKNKQGQVFKWLSYGNLHHVEILRDKETGKFYGEFVTMMEASHRARGIGKPKQAIAKTGHGEQYEFMMALHINEIVSVEHERKRVFYRVQKFEREQKRIKLRLHTAATLNNDQETLADRYSTIEALMTSGLKKHRINAIGKILS

SEQ ID NO: 5012 - protein, 653 aa, synthetic construct
  REGION 1..653: note = Synthetic
MLMSVLGSYNQTQQYALVEDLLTIHKKSVLKERLRGHWGLSSEQAIQLCMLEFEPGHGNLSCKAINKLLPYLEQGMLFNEARVAAGYGYEIKESSAAERLGVPPETANPIVNKGLHELRRLVNAIIAEYGKPDVIRVEMARDLEMNTRRYQENLKQQTANTKANDQATEAFQEVGEKNPHLGLRHYPSHTDKLKYRLWLDQNKRCAYSNQSINLTSLFTGEVEIDHILPFSESLDDSYMNKVICLAAENRSKGQQTPVDAFNGNLEKWEQIRQSLNEWCKGPKLKSKRDRFFMTASDVQKRDFLSSQLNDTRYISRLAVAYLKLLGSDVTTCKGVITAQVRHWWGLDSLLGEKNSEKDRTDHRHHAVDAAVISTIDRGFYQKIVRTARELENTGSGLGMNDLKVDAPWDDFRDDLAAKLETMIVAHTPSRKLSGALHEASGTGFIEGQGTVYRKLLSPDMTLKQVGKIIDPQVRIMVLEHLEIYDNDPKKAFAENITVFHIDGKTPIRRVRLLQSKTTSKKLAENKHHVEIIHDLNSGNVKGEFVTMMEASQRAKGIGMPRQPIVKTEHGPDKEFLMALHINDLVSIEQDGIRDYFRVQQLDAPNKRVKLRLHTASTLDNSHETLKDQDSTIHALIEIKLRLHKVNPIGKLIE

SEQ ID NO: 5013 - protein, 1218 aa, synthetic construct
  REGION 1..1218: note = Synthetic
MEIDTKQRILGLDTGTNSLGWAVVDRLPEGYKLVDKGVHIFQEGVTIENGNQEKSRAAERTKQRSLRKQYWRRKVRKIFLLQELSNAGLCPPLSLEELHRWRVEGIYPLSNEPFMRWQRTDENKGVNPYAARCQCIERELDMENKNDRYLLGRALYHIAQRRGFLSNRKNQTDNKETGVVKEGIKELTQKINDAGCEYLCQYFYQLYQRGERIRSCYTDRKEHYEKEFAAICEKQHLNGALVEKLYKIIFVPRPPKKQNNAIAKCPFEPSKHCAPISHPLFEEFRMWSFIRNIKVQTPDDTNLRALSADEISKIQRLWYRYKKGQTNYNFHFEEIAKALAGKGKYCYYKSAEDKPFRFNYYLDSNVAGSPVSAQLKDIFGESILQDREALDKIWNALDFYTDDVKLSEWGIKHYNLTDEQADKLAQMRLPEGYASLSLKAIENIMPLMRGHGLMYSSATLIAKLRDLLKGYDFDEEVDAYLINDIEDYLTIPTDKNGKPLMSREERKQILDRKWQTHYNLSDKDLKKLYHPSMIEAYPKVEDKTDGVYQLKSPRISALKNPMAMRSLFRIKAVVNQLLKEGTIDENTIVHIEFARSLNDANRRAALLRYQTILRDERESAREEIKKYVPNPTDDDILKYLLWKDQGGVSVYTGKPIPPDLLFKGDQYNFEHTVPRSMGGEWTRENLTICEQYFNTDIKGSQLPSQLSEQYKQIFEEQIQAWKDKYEDLDKQIRKLQKQSSGATTKEAKDGIIKKIRLLQLQSKFWHNKYEAFIIEDDKVKGFTLRQGTDISVINKYGRSFLQTLFERVDVVKGTMTAAFREVWDIQEPYEKKDRTNHVHHCIDAITIACMGKREYDKLSEYCHEEEENRHRLHGVRLPKPWPTFTEDIQEIEREILVSHYTPNPMGKQTKKKLRDSRGHIICDKGKQPLYAAGDTARVVLHNDKIYGKILNSHDIDPKHPSGKECTVKRIPLAEVKVNEVVDPVVKQVIANAIAKYGSIKAAIEAEQENQDGSIWLNKEKNVRLKKVRCFQDFASGAEPIRALRDMSAKEYKRFHYSRPDGNYVAAIYEGTDNKGNRKRKSVIVTNLDAAKAFNKHQPLVPETKEGYALLCTIKKGDLILLYENSPEELRNTTQAELSKRLYKIAKMSDSGGLQITIRHHQEARETTKLQKLYGNPKTGKYSSSQEVYPQRLLLPNQFNALIQGQDFELTETGKIIFK

SEQ ID NO: 5014 - protein, 1195 aa, synthetic construct
  REGION 1..1195: note = Synthetic
MENSGKKRILGLDAGTNSLGWAVVERGDDGYQLIDKGVQIFQEGVNIEKGTIEKSRAAERTEHRSLRKTYWRRKVRKIRVLAVLSKAGLCPPLTSEELHKWRVEGRYPLENEAFIQWQRTDENRDINPYASRVKCIKQRLDMDKATDRYILGRALYHIAQRRGFLSNRKDQADKTTGAVKTGIKELSTKIQDSGCEYLCQYFYQLYQKGERIRGCYTDRTEHYEKEFEAICTKQQLDEALKIELHKVIFEQRPLKSQRCGVARCPFEPSKHCAPISHPLFEAFRMWSFIRNIKVMGPYDNALRPLSGAEIEKILSLWQRKSKDNFHFEDIAKTIAGKGQYCYYKSSEDKPYRFNYHLDSNVSGCPVSTRLREIFSDDILSDRAQIDMIWHALDNFDDDHKLREWVIRHYNVSEEQADAFVKIHLPQGFASLSLKAIENILPPMRDHGMLYTEATLIAKLRELLKGYNFDDEIEAYLKDDIRDYLKIPTDKNDKPTISRDERKQALLIKWRERYHLEPKDLDKLYHPSMIEEYPKVESKINGVFQLGSPRISALKNPMAMRSLFRLRAVVNQLLKDGTIDENTIVHIEFARELNDANHRDALRRYQNDLKKEREEAKKQIISYVPNPNDDDILKYLLWEDQDHKCIYTNKTISLEALYNGTDFDIEHTIPRSMGGDTTRENLTICDSTFNREVKKTNLPINLSNYKIIEQNIAPWKEKYENLDKQIRKINTSGVSDKGTKDSMISKRHYLELQRDFWKNKYNAFTIEEKDVQGFTRRQGTDISVINRYGRLFLRSLFNRVDVVKGSMTAAFRKLWGLQSAYEQKNRENHVHHCIDAITIACMGKAEYDNLSAYYREDEENRYHNSGKIFPKPWATFTEDVRHIEDELLVAHHTNNPMGKQTRKRIRTAKGKIIPNQFAQGDTARGALHKDTQYGAIKIEDQIKYVVRKPLDANFTDVKNIVDQEVKAKVEAAIAEYGSLGKALESGPIWMNKEKGIAIKRVRVFTPSVTRPNHIRQQRDLSKYEYKRQYHVMSDSNYALAIYEGVVGNNTKRAIKLLSNLDAAIIYNNNNNHPLIPEYDEHNYHLLLTLYSGSLVLLYEKSPEELYSAHNDILKRRLYKVTGLNSTLIGNVNYGRIELTYHQEARPSTEVKSKNGAFEANEELRPKITMLHTQIKALVEGKDFIMSETGKIEFRHA

SEQ ID NO: 5015 - protein, 1225 aa, synthetic construct
  REGION 1..1225: note = Synthetic
MENVIKQRILGLDTGTNSLGWAVVDRLPLGGYELVDKGVQIFQEGVNIEKGTQEKSRAAERTSHRSLRKIYWRRKVRKIQLLKLLSGSGLCPELSKEELRAWRVDGNYPTNNSAFVRWQQTDEQKGINPYAARCKCVEDELDMSNPVDRYIVGRALYHIAQRRGFLSNRKDQTDDKDKESGAVKAGIKELTQKIHDAGCEYLCQYFYQLYQKGERIRSCYTDRKEHYEHEFDAICAKQYLDEALVQQLRKAIFEQRPLKSQRRGVAKCPFEPSKHCAPVSHPLFEEFRMWSFIRNIKMQTPEDAELRMLTNEEINKVKHLWFRKSKANFPFEDIAKTLAGKGKYCYYKSAEDKPYRFNYYMDTSVAGCPVSAQLRDVFGEDLLKDRAQVDSIWLALDFFDDDLKLREWAIKHYNLADEQADAFVKIRLPQGYASLSLKAMENIVPLMRDHQMIYPNATLVAKLRDLTKDYPFEKDFDEDVEAYLKADIEEYLTIPTDKNGKPLMSREERKEALDVKWMQHYNLSAKEIKKLYHPSMIEEYRHVEHTTNGVYQLGSPRISALKNPMAMRSLFRMKAVVNQLLKDGTIDENTIIHIEFARELNDANRRAALRRYQAALRKEREDAVEAIKEFIPNPSDDDVLKYLLWKDQEGKCVYTGKSISLSALYNGTEFDIEHTVPRSMGGDTTRENLTICDAKFNREIKKNRLPSQLSEQAQELLQANIQTWKENCEALDKQLRKMKNATSGLSTKEAKDSVIAKRHLLEMQRDFWRNKYKAFTIEEKDVQGFTRRQGTDISVISRYGRLYLLSLFNRVDVVKGSMTAAFRKIWGIQTAYEKKNRENHVHHCIDAITIACMGKREYDELSAYYHADEENKYHSSDILMPKPWKTFTEDIKDIEQEILVAHYTSNPMGKQTKKKLRDSRGHIIRDANKRPRFAQGDTARGALHNDMIYGMIVNSQNVDDKHKVGNLCAVKRIILSSVASKDEEKMAASIVDPIIKKTVNDARAKYGSLSAAIEAEQENGDGSIWLNKEKNVKIKKVRCFQDFAINASPIRSLRDQSKKEYKRSHYSMTNGNFMSAIYEGIDAKGKKKRSFVIISLYEAAQAYGKHEPLVPTVSEEGYALIKTIRLGDLVLLYENSPEEIYNASQEELVKRMYEIIGMSDSKGLQIRLKHQQEARPNGELQQINGAFKNGDSAPIRMLLHTQFNALVQGQDFDISDTGKITFKSC

SEQ ID NO: 5016 - protein, 1240 aa, synthetic construct
  REGION 1..1240: note = Synthetic
MMENTGKQRILGLDTGTNSLGWAVVDRLPYGGYELIDKGVHIFQEGVNIEKGTIEKSRAAERTEHRSLRKIYWRRKVRKIRLLAVLSNAGLCPPLSSEELHTWRVEGIYPLRNENFMRWQRTDENKGINPYAARCQCIERELDMENRIDRYLLGRALYHITQRRGFLSNRKDRTDDKNSESGKVKEGIKDLTQKIQDAGCEYLCQYFHQLYQRGERIRSCYTDRKEHYEKEFDAICKKQHLGEALVNELRKVIFEQRPLKSQRRGVAKCPFEPSKHCAPVSHPLFEEFRLWSFIRNIKMQTPADNGLRMLTDEEVNKILPLWFRKSKANFHFEDIAKTLAGKDKYCYYKSAEEKPYRFNYYLDTNVAGCPVSAQLKEIFGEEILKNRDTVDTVWHALDFFTDDMKLREWGIRHFNLTDEQADALVKIRLPQGYASLSLKAMENIVPLMRDHGMIYSAATLVAKLRDLTRDYPFDTDFDGEVDAYLKTDIEDYLTIPTDKDGKPTMTREERKQALDNKWKTHYNLSDIDIQKLYHPSMIEEYRKVEHKTKEGVYQLDSPRISALKNPMAMRSLFRMKAVVNQLLKDGTIDENTIIHIEFARELNDANRRAALRQYQAALRKEREEAVEAIKDVVPNPSDDDILKYLLWKDQGGKCVYTGKTISISALGRCTYTGREISLKALYNGTEFDIEHTVPRSMGGDTTRENLTICDAKFNREVKKNRLPSQLSEQQQAIVQANIEEWKKKYEDLGKQLRRMKGSTSGLSTKDAKDRVITKRHLLEMQRDFWKNKYKTFTISSDDVKGFTRRQGTDISVISRYGRLYLLSLFNRVDVVKGSMTAAFRKIWGIQSAYEKKNRENHVHHCIDAITIACMGKQEYDDLSAWYHADEENRSHNSGQYIPKPWQTFTEDIKNIEREILVAHYTANPMGKQTRKKLRDSQGHIIRDKQGNPRYATGDTARGVLHNDMIYGMITNSHDMDDKHAAGKRFAVKRIPLRDVDIKNVVDPIVKQVIIDAITRYGSLQNAITAEQENNDGSIWLNKEKGVRLKKVRCFQDNAINAKPIRPLRDLSEKEYKRNHYSMTNGNYMSAIYEGVDEKGKRKRTFEIRSLFEAAQAYSRNEPLVPATKDGCHLIMTLKLGDLVLLYESTPDEVRNASQKELVKRLYKITGMSDSSGLQITLRHQQEARDAGVLKNEYGNPKTGLFNAQQDIYPRRMLLHTQFNALVQGQDFEISDTGKITFKQC

SEQ ID NO: 5017 - protein, 1533 aa, synthetic construct
  REGION 1..1533: note = Synthetic
MKKILGLDLGTNSIGWAIVERDDNKGSIIKSGSRIIPMDVATLGDFASGNTKSQTAERTSKRTARRMRERFLLRRERLHRLLHLLGFLPKHYEERIGWDLDNDRKHYGTFVDGEEPKIAWIMNDNKKFEFVFQSSFHEMLEDFKKYHPVIISDKKKIPYDWTLYYLRQKALTQPISKEELAWIILNFNQKRGYNQQRDEILETSDDKKEEYMCLTVSSVTPDEGAKGKDIWYNIRFENSDIIYRRKSKYPLNWVGKKRNIIVTTKLDEEGNPKLKKDGSIDYSVKSPNDNDWALLKIKTEQDLKASHQTVGQYIYAALLANPSEKIRGGLVKTIERDFYKDELEKILQKQSEFHAELKDRSLYEHCIKELYRNNETHRNNIAKNDFTYLILEDTLFYQRPLKSKKSLIDDCPYESHQGIDKETGEICTYPLKCIAKSNPYFQEYRVWKFLSDLRIIANTKEINGHIHADVDITNELLPDNKSWSHLFAWLNDKGHITQGDLLTYLGIKRKEQSKFRWNYVADKHYPMNATRHAILNRMKDSEELSRDMEQAIWHLLYSTTSKAEIDKSLSPSDNPKGIFKKLIETGISVESIEKIKTIKLPDEGYGGYSEKAIKKLLPLMRCGEFWDERNIHPATLKRIKEYQTGNCMDDFSERVKQLMSTMIDIHSYQRLPEWLACYVVYGKHSEANDIVKWKTPDDINIYLNNFKQHSLRNPIVESVILETLRVVRDIWKRYGNMDEIHIEMGRDLKNPSDKRAQITQRVLQNENTNIRIKTLLAEFLAEEYKIDNVRPHSPSQQDLLRIYEEDVLAHNEPDEEIQNIINNLSNPTKQPSRTQVLRYKCWLDQKYCSPYTGQPIPLSRLFTSDYEIEHIIPQSRYFDDSFSNKVICESEVNKLKDNQLGYEFIKRHHGQTVQIASGRMVRVLEVDQYEQLVKNIFAQNKRRKLLMDDIPAEFIQRQLNDSRYISKVVKGLLSNIVRTTDEDGNLEREAISKNVITCNGSVTTRLKRDWGLAEVWNAIVLPRFQRLNKITGRDCFTALNSHHQEIPAMPLELQKGFSIKRIDHRHHALDAIVIACTTRDHVNLLNNESALPENQANKHALSHKLRHCEEVVINGKKRTVYKEFLMPWNAFKSDTFNSLQEIVVSFKQNLRVLTQATNLYTKYMDDEKKQQAQHSPDHFAIRKSLHKDTVFGHVNLQRITTVKLKDALKNVNRIVDKRLKKKIKELVCKHYNEKQLLVYFKDYAYEWKGYDFNKVKVFYYTDEKEMMVATRFCNDLVSVFSGKTKKQDIEKTIEQITDTGIQRILTNYLNANLEQIEYAFSADGLEKMNENIATYNNGKQHKPIFKVRLFQPKGNKFQVGQTGNNSKKFVVADAGTNLFFAVYQTSDGNRKFKTIPLEEVLARMKMRLHPVNETDEEGNTLLFSISPNDMVYLPTPDELSDGHINKENIDANRVYRFVDSSGTTANFVPSKIANVIYHLKKDQAELFCQGDTIQDELGKGSPQSKNQKAITGEMVKDLCVPLIVSRIGEIKIK

SEQ ID NO: 5018 - protein, 1513 aa, synthetic construct
  REGION 1..1513: note = Synthetic
MKKILGLDLGTNSIGWAIVERKDNDGRIIKSGSRIIPMDAATLGDFASGNTKSQTAERTAKRSARRMRERFLLRRERLHRLLHILGFLPKHYEEKIGWDLDNDSKHYGTFLENEEPKIAWMRNEEKKYEFIFQSSFHDMLEDFKKYHPDILSDDKKIPYDWTLYYLRQKALSQPIGKEELAWIILNFNQKRGYNQQRDEILDVSDDKKEEFMSLTVSSVTPDEDAKGKDIWYNIRFENSNIVYRRKSKYPLNWVGKKRNIIVTTKLDEDGNPKIKKDGSIDYSVKSPNDDDWALLKIKTEQELKASRQTVGQFIYSALLANPSEKIRGGIVRTIERDFYKDELEKILKKQSEFRAELQDRCLYEQCINELYRNNEAHRNNIAKNDFTFLILEDVLFYQRPLKSKKSLIDNCPYESHQGIDKETGEICTYPLKCIAKSNPYFQEYRVWKFLSDLRIIANTKEINGHIHTDVDITSELLPDNDSWSNLFIWLNNKGHITQSDLLAYLGIKKKEQSKYRWNFVADKHYPMNATRHAILNRIKDDEALSREQEQAIWHLLYSTTSKAEIDKSLSPSDNPSNIYAKLIKAGFSQESIEKIKTIKLPDEGYGAYSEKAIKKLLPLMRCGKLWNEKGIHPSTLQRIEAFSEKGGMDTFSENVKQRLFSMNIIDSFQRLPEWLACYVVYGKHSEANDIVKWKSPDDINIYLNNFKQHSLRNPIVESVILETLRVVRDLWKRYGDIDEIHIEMGRELKNPSDKRAQITQRVLQNENTNLRIKTLLAEFLAEEYKIDNVKPHSPSQQDLLRIYEEDVLAHNEPDDEIKDIINGLSNPTKQPTRTQVLRYKCWLDQKYCSPYTGQPIPLSRLFTSDYEIEHIIPQSRYFDDSFSNKVICESEVNKLKDNQLGYEFIKQHHGQTVQLASGKMVRVLDVEHYEQLVKDNFAQSKRRKLLMDDIPAEFIQRQLNDSRYISKVVKTLLSNIVRTTDEDGNLEREAISKNVITCNGSVTTKLKRDWGLGEVWNYIILPRFQRLNELTGRNCFTTFNTHGNEIPAMPLELQKGFSFKRIDHRHHALDAIVIACTTREHVNLLNNEAALPEHQEMKHALSHKLRRCEEIVINGKKRKIFKEFIMPWASFKNDTLLSLQQIVVSFKQNLRVLNQATNLYTKYENGQKTLSAQHSSDHFAIRKSLHKDTVFGHVNLQRKTTIKLKDALKYVNRIVDKRLKQKIKELRAKHYNDKQLLVYFKDYAYEWKGYDFNKVNVFYFTDEKEPMVATRFCNDLVSIFSGKTKKQDVEKVIAQITDTGIQKILTNYLNENFDNIEYAFSAEGLEQMNENIIHYNDGKQHKPIYKVRLTETLGQKFQIGLSGNKTAKYVEAAKGTNLYFAVYQSEEGSRAYTSIPLNIVIERLKQHLSPVPERNDKGHNLLFYLSPGDLVYVPTLDELTTPCSNEIKPDRIYKLVSCTSYVADFIPAYIASPIITTTELGSNNKSQRAWTGEMIKDICKLLSISRIGEIKIK

SEQ ID NO: 5019 - protein, 1529 aa, synthetic construct
  REGION 1..1529: note = Synthetic
MMKRILGLDLGTNSIGWAVVEKEDNCGRIIKSGSRIIPMDAATLGDFANGNTKSQTAERTAKRAARKMRERFLMRRERLHRILHILGFLPKHYEECIGWNLDNDSKHYGTFLEGKEPKIAWRKNENGIYDFLFKDSFYEMLEEFKKRHSIPAHEKIPYDWTLYYLRKKALSEPIEKEELAWIILNFNQKRGYNQLRDEVLVDSTNKREEFVCLTVESVKADETSKDKNVWYEIRFKESDIIYRRKSLYPLNWVGKKRNLIVTTKLDSNGNPKLKKDGSIDYSVKSPNEDDWALQKIKTEQDLEASHLTVGQYIYNALLSNLSEKIRGGLVKTIERKYYKEELKKILQVQEQFHPELRNKKLYEQCVEELYRNNIAHKKAIMKNGFEYLLLDDVLFYQRPLKSKKSLIDNCPYENHKGVDKRTGEICIYPIKCIAKSNPYFQEFRIWKFLSNLHIIANSKAVNGHIVTDVDVTEDFIPNDDIRCKLFEWLNDKDYIQESDLLTFFGIKKKEQKKYRWNYVSDKRYPMNSTRHSLLRKMQKGEVLSRETEQILWHLLYSTKSKSEIDKSLSPRKDGIFNYLIKTGLSEETIEKIKSVKLPDEGYGAYSEKAIKHLLPLMRCGKFWTVNNIQAKTKQRINSYLLGNALNLFSVNVRNRISTLTDITMYKGLPEWLACYIVYGRHSEGNNITKWRTPDDIDIFLNNFKQHSLRNPIVECVVLESLRVVRDIWKRFGDFDEIHVELGRDIKNPSEKRAKLTQQILKNEKANLRIKYLLAEMAKEEYGIQSVRPYSPNQQDLLRIYEEEVLENNEPDKEIQEIINDLSNPSSQPKKSQILRYKCWLDQKYCSPYTGQPVPLSRLFTSDYGIEHIIPQSRFFDDSFSNKVICESEVNQLKGNQLAYEFIKKHHGQTVMLASGRMVRILEVSQYERLVNDTYIKNKRKKLLLDDIPLEFTNRQLNDSRYISNIIRGFLSNIVRDVDSEGTLEREAISKNLVTCNGTITSRLKRDWGMNEIWKEIVLPRFLRLNDLTKRELFTSTNSQGKIIPAMPLELQKGFSIKRIDHRHHALDAIVIACASKEHVNLLSNEYSSPDKKNIKYSLSHKLRKVKEEVVNGRKYNFFKEFIMPWPSFKTDVKVSLQGIIVSFKQNLRVLNQATNLYTKYEDGQKRYIAQHSIEHFAIRKSLHKDTVYGHVNLQRITTVKLKEALKNPSRIVDKKLKKTVKSLIKLHYNEEQLLVYFKNHAYEWKQLDFQKIRIFYFTDEKEMMVATRFCNDLINLFSGKVNKKDIESTINQITDTGIQRILYNYLNANINQLEFAFSAEGLEKMNEDILLYNNGKKHKPIYKVRLFQPKGNKFQIGIRGNNKMKYVVADAGTNLYFAVYQTKEGTRRYRTIPLEEVIERLKQHLHPVNEKDENGNTLLFSISPNDLVYLPNQDESKGNIYLKDINPERIYRFVDSSGSTANFVKASIANVIYHLKKEEAKLFCIGDVIQDELGVGSPQSKNQKAMSGEMIKEICIPLSVNRIGEIVMR

SEQ ID NO: 5020 - protein, 1040 aa, synthetic construct
  REGION 1..1040: note = Synthetic
MKISYRLGVDLGANSIGWSALMLDTAGAPCGLLDMGVRVYPDGRNPKDNTSLAAARRGPRGMRRNRDRYLQRRRNLLNALTRMGLMPADTDERQNIAARDPYALRAKALHEKLAPEDLGRVLFHLNQHRGFQSNRKTDRDSNEDGKISDATKRTIAELQLTGHPTIGSWLAERHQARQPVRVRLAGSGKTEAYPFYPSRDMIESEFDTIWTAQAGWNRNLTEPMRQSLHHIIFHQRDLKPPKLGKCWLEPDQFRAPRALPTAQRFRIAQTLSHLRVVRPGVPDEPLTNDQRAILATTLYRGRDLTFDQIRKRLGLPGDTDFNFRDEKLIGCATANRLANGKKAPIGDAWHSLDLTTQDAVVTAILDAETVEEGIEILKTIGLAGEIAERAVNTTLVDGHTSLSMVAMGKILPHLESGMRYDEAVKAAGYVHHSDRRTGEIREQLPYYGELLFDRIGTGTGEPADPDEKRLGKAPNPTVHVALNELRRVVNDIIKRHGPPAEIVVETLRDLGRSKLQREAYSADQKKNRDANDARRAMLTEMGMPLNGRNIMRLRLWQEQAADPKNRLCPYTGTLITCRTALSDAIEEDHILPFAVTLDDSSANRMLVTREANRSKARQSPFTAFGHTAQWPDIQDRVAFLPQNKRWRFQPDAMDKFAKEGDFLARHLTDSATIARWATEYLEILAPGKVWSIPGRLTALLRDKLGLRPDVILGSGGARKNRDDHRHHAIDAVVVALTDRGLLKRTTDAAKRAETTGERLVVKMEPPWETFVADIAKRARTVVVSHKPDIGWQAALHNDTNYGIIKGAREDQDNVVTRRAVTDLLKKDGTLAFTVRDPALMAKIQATVAGAQDIPSRKAALSALTHSGGYVVRRVRTTERLNATQDINDRRTGMPYRTVKRDGNHRMELWRMPDGSFLSRVVSTFAAAQQAMAAARGDKTDRTNDPRPHPSAKLLLRLHGADMVTISADGNRRLMRVVQISDGQLTLAAHNEGGKLRDRHRADDDPFRYVFLSSGATMVKANLRKIFVTPSGRVINGDQKQ

SEQ ID NO: 5021 - protein, 1038 aa, synthetic construct
  REGION 1..1038: note = Synthetic
METRYRLGVDLGANSIGWCALMLDTSGSPCGLLDMGVRVYPDGRNPKDNTSLAAARRGPRAMRRNRDRYLRRRGNLLAALTRFGLMPESDADRQAVALFDPYNLRAKALHEKLTAHEIGRVLFHLNQHRGFKSNRKTDRASNEGGKISEATARTIAALAGAGHPTIGSWLAERHSRKAPVRVRLAGSGKNAAYEFYPLRAMVEAEFDTVWAAQAGWNPQLTDAMRDALRHIIFLQRELKPSIVGKCWLEPEEERAPRALPSAQRFRIAQTLAHLRYAKPGSPEQPLTDEHRGPLADILYRGRDLTFDQIRKRLGLPGDTDFNFRDDKLVGCATASRLGNGKNATIGDAWHKLDLATQDAAVNAILNAETDDEGQEILKTLGIAADAATRAVRAILVDGHAALSAVAMGKILPYLEGGQRYDQAVQDAGYHHHSDTSTGEIRTQLPYYGELLFARIGTGTGEPLDAEEKRLGKAPNPTVHVALNELRRVVNAIIERHGPPTEIVVETLRDLGRSKKQREEYRDIQKKNETTNDSRRQQLREMGLPLNARNMMRLRLWEEQATDVKDRLCPYTGTVITARTALTDEIEEDHILPFAVVLDDSSANRILVTREANRIKTRRSPYEAFGHTAEWPAILERANLLLPHSKRWRFQPDAMEKFAREGDFLARHLTDSATIAKWAKDYLEILAPEKVWSIPGRLTALLRDKLGLRPDVILGTGGPRKNRNDHRHHAIDAVVVALTDRGLLKRTTDAAKRAADIGERLVVKMEPPWENFVADIARRAKTVVVSHKPDTGWQAALHNDTNYGIIVGARSEEHNVVVRRAVADLLKKDGTLPFTVRDPVLGAKIEAAVAASADQATRKAALAGLTHSGGHAVRRVRTTDRLNATQDIADRRTGKPYRTVKRDGNHRMELWRMPDGSYVAPVMSTFAAGQQAEASRLMRPIADTRPHPAAKLLMRLHKDDMVTIGEGSERRLMRVAKISAGQLALSAHNEGGILIDRHKAADDAFRYVFLSSGNTLMNANIRKVFVTPDGRVLDGGLKR

SEQ ID NO: 5022 - protein, 1034 aa, synthetic construct
  REGION 1..1034: note = Synthetic
MHYRLALDIGANSIGWCCLRLNEAGQPAGILAMGVRVFPDGRNPKDGSSNAAARRQPRAMRRNRDRYLQRRRALLNALTRFGLMPADEAARCAVAQRDPWALRAEALTRRLAPEELGRVLFHLNQRRGFASNRKADRGNEEKGKIAEAADRLRAELARAEAATLGAWLAERHAKREPVRARLVGAGAKAAYDFYPTRDLIQAEFDTIWAAQAGWNPALTEEMREALRTIIFHQRPLRAVRRGKCWLEPGEDRAYRAMPTTQRFRIAQDLANLRLNTPGEPARGLTEGERALLASALRKGKDLSFDRIRSVLKLPADTDFNLQSAKRDELKGDETAHRLGGKKALGDAWHKLPLDAQDEAVEALLEAEDEAALIARLAVIGLDEAAARTANDVTLPDGTASLSLKAMRTILPHLERGLRYDEAVQAAGYVHHSDRRTGEIMKRLPYYGEVLGERIGTGSNQPDDPEEKRFGRAPNPTVHVGLNELRRVVNALIDRFGHPHEVVVEVLRELGRSQKQRQQIEREQAENQRANERRAQELKALGFPVNGRNLMRLRLLEEQAFDPKDRVCPYTGTIITPRTALSEEVEEDHILPFALTFDDSTANRVLCTREANRLKRRQTPFEAFGHTPQWPAILERTKSLPQNKRWRFQPDAGQKFKDEEQFLARHMKESAWLARLARMYLEAIAPERVVAVPGRITAMLRDTLGLNSDSVLGKGGARKDRTDHRHHAIDAVVVGLIDRSFLQRVQTAARRSEEEGRRRFADLGEPWPGFVAEVGAAARAIVVSHKPDHGWQDALHNETAYGPIVGAQRGGPNVVVRRPIETLADKGTEAADAVRDAPLREKLRAVLAITDKAARKAALAAIEHPAGVRVRRVRMVERLDSTLAIADRRTGKPYKVMKREGNHRAEVWRMPDGKLKLWVVSTFDAAQEAEARRLGRKVPDLRPHPAAKLLMRLHKNDMVALGEEEGRRLMRVVKFSEGNITLAPHQEGGNLKARDASKDDEFKYYYLSGKRLREDKARPVSVDPAGVVRDPGPLP

SEQ ID NO: 5023 - protein, 1046 aa, synthetic construct
  REGION 1..1046: note = Synthetic
MSYRISIDIGANSIGWCLLSLDEDGEPSGILDMGVRVFPDGRDPKTQTSLAAERRLARGMRRRRDRYVQRRTALLNALTRLGLMPEPDDDRKNIAGLDPYQLRRDALLRKLSPHELGRAIFHLNQRRGFRSNRKTDRSNEEAGKIASAADKLRTEIIRANAPTLGSWLADRHERQLWVRARLVGTGAKAAYDFYPTRALVEEEFNAIWDAQLKWSPNLTNAMRETLANIIFHQRPLKQPPIGKCWLEPACTRAPKALPSTQAFRIAQDLAHLAIRRVGEPDQALDIDQISRLAAKLNNGFDLSFHHVRKELGLDQGVTFNLESSSRDQIKGAETASRLAGRKGPLASIWPSLPIDQRDAIASALLNSDMPFETIDALVSLGISEADAELAERIPLPEGHASLSTKAILNVLPHLERGLRYSDAVIAAGYAHHSDDRDGVIHDRLPYYGAILASRLGTGSGEPDDLAEIRFGRAPNPTVHVALNQLRHVVNALLDRYGHPKEIVVEVLRELNHSAFERRRISKEQEKNARRREEWARQLQEIGVKVNGANLARMRLWTEQGEDPRERLCPYTGERISLTRLFSAEVEEDHILPFAQTLDDSFANRVVVMREANRGKAKQTPHAAFHASPQWPEIQQRAKLLPPSKAWRFAPDAMQKWQGGNSDFLARHMTDSAYLARLTRLYLRAVCDPDKVWCVPGRLTAMLRDALGLNSKTVLGKGGARKDRTDHRHHAIDALTIGLIDRSLLNRVSRAAGRAENNGNRLLDRLDEPWPGFIQDVSCRVRQIAVSFKPDTAAVGRLHNDTAYGAIPGADGRMPNVRHRVPIQSLAGWKSDEIAKAIADFRLAAKISSVVSAHPKVPDQAAALSSIAHDGAGRQVRRVQVRERLEGVHPIADRQTGRPYKLVKLDANHCAEFWRVPGKAGQKSAVQMSVVPMLEAAAEEVAKHKRLEIPDRRPHPAAKLLMRLHKNDVLAIGTGTERRLYRIVKFTHGVVTCAELHEGGALKARDADRGDSFKYLNASKSKLSAGNARKVLVDPSGHVFDTGPLVW

SEQ ID NO: 5024 - protein, 1085 aa, synthetic construct
  REGION 1..1085: note = Synthetic
LLTEGPHSPIGQHRNDGLPQKRLKPRVGTRQALRAMTYRLALDLGANSLGWCLLELDPAGAPCGLRDMGVRIFPDGRDPKTLASLAAARRLARGMRRRRDRYLQRRTALLNALVRRGLMPADATARAALARCDPYALRAAALHRPLAPEELGRAIFHLNQRRGFRSNRRTDRANDAEQGKIAAGAEALKREMARSGAPTLGAWLAERRDAGEWVRARLTGVGAKAEYPFYPTRDLVRAEFDAIWAAQAGWNPALTPEARDEIAGILFHQRPLKPVTPGRCWLEPDEERAPKALPTAQAFRIRQELANLAIRRIGEPDQPLTPEQRALLAAALERGEDLSWHQIRKRLGLSGGESFNLESQAREKLKGAETAQRLVGKKGPLAALWPGLDAARRDALVLALLRAETPEAAIAALIELGLPRAAAEQAERIALPEGHAALSAKAMRAILAAWQEGMTYDKALQAAGYAHHSDDRTGVILDRLPYYGAVLRERLGTGDPSRPPEEEERHFGRAPNPTVHVALNQLRHVVNAILDRHGPPREIVVEVLRELNHSAFQRRQIEKEQAENARRREVWARQLEQLGQRVNGRNLALMRLWHEQSKDGDARERLCPYTGERIGLARLFSGEVEEDHILPFSLTLDDGFANRVLCMRGANRRKTNQTPFQAFGGTPEWPAILERAALLPARKAWRFAPDALERWKGAHEGFLDRHLTDSAYLARLAHLYLRAICDPNRVRVVPGRLTALLRHALGLNSAALLGKGGARKERDDHRHHAIDALAVGLMDRAMLQRLQTAAGRGAELGRLLDDLPPPWPGFLEEARSRLARLVVSFKPDTAPSGKLHNETAYGEIPGAGPREPNVAHRVPIQSLAGWTAKEVRAALGHPALAERVVQALAAAEGKPAQAAALGALAHDVKGGLVRRVRVRERLDNTAAIADRRTGRPYKRVKLDANHRVEFWRLPPRERGAPGKVVTLVVPLLEAARDAEAARLGRPLPDRRPHPAARLLLRLHKDDVVAFGLGEARRLLRVVKFSGGQVVLAPLHEAGNLKARDADRNDPFKYVNASRSRFAEEGARKVHVDPAGRVRDPGPIEW

SEQ ID NO: 5025 - protein, 1032 aa, synthetic construct
  REGION 1..1032: note = Synthetic
MPYRLALDIGANSIGWAALTLSPDGHPIGLADAGVRVYPDGRNPKDGSSNAAARRAPRAMRRNRDRYLQRRGNLLNALTRFGLMPADPDARTQIAALDPFALRAAALERPLLPTELGRAIFHLNQHRGFQSNRKTDRGDNESGLIKDAAANTAAELARTGHLTIGSWLAARHLRHAGVRVRLAGRGKLAAYAFYPTRDMLKAEFATIWAAQSAWNPALTDAMREALHGIIFHQRPLKSPPVGKCWLEPDQLRAPRALPTAQRFRLAQTLAHLQLGQPGHPTRPFNAKERELLLGILHRGSDLTFDQIRKKLGLSAETDFNSREDKIPGCAAAARLGAKKNLGATWHALPLATQDAAVNIILDAETDAAAIAALIALGLSPADAACANAINLPDGRAALSARALGKILPFLEAGEIYSTAVQSAGYTHHSDRRTGEIRDRLPYYGEILHARIGTGTGEATDNDEKRLGRAPNPTVHAALNEIRRVVNAIVERHGPPAEIVVETLRELGRSKLQRQAKDKEIATNRAANDALRDELVRLGVPTTGRNQMRLRLWKEQAADPRDRCCPYTGTNITARTALSDAVEEDHILPFALSLDDSTANRILVTREANRIKSRRDPFAAFGHTPQWSEILARVANLPEQKRWRFQPDALVKFAADGDFLARHLTDSATIARWAVEYLDILAPEKVRAVPGRLTSLLRNALGLNSESVLGKGRAMKDRTDHRHHTIDAIVVGLIDRSMLQSVTAAAQRAADAGRRLLMDVAEPWPNFVADVAARVSRVVVSHKPDTGWQAALHNDTAYGEIANAGPKDPNVVVRRTIDVLADKSPDDIRKSVRDFMLAAKIAAAVEGRDPTARKAALADLTHTGGHPVHRVRMVERLDSVQPITDRRTGQPYKLVKRDGNHRAEIWRMPDGKSKMCIVSTFAAAQQAEAERLGRPSPDVRPHPAARLIMRLHKNDIVALGRVGGLRLVRVVQMTEGRLVLADHNEVGDLRRRHADKDDPFAYIFAGCSRLIDDQARKVQVTANGRVRDPGPPR

SEQ ID NO: 5026 - protein, 1123 aa, synthetic construct
  REGION 1..1123: note = Synthetic
LINLYIKFLSSNLIIILKNIFVNRKVRIMKYIIGLDIGIGSVGWAVVRNDDDCKRLEDFGVRIFESGEIIESNKNIRKSQRRRKYRGMRRRIRRRNHRKERLKNYLENIGFVSRAELSEFFAKNNHDIIDIRVRALDEMVTPVELTAALLHIAKRRGYKAFYELSDENNNAKDKKAKEEEEKDIYKALTNTADVIKNGGYRSIAEAIMKDSEHFSDKISGRYKYRNIKEKDEKGKKKSDSKISENDILFPTEMFEDEVRKILGKQKEFYSQLTDESIDKIFDIIFSRRDFEDGPGNTDDENRPYKGFVDSIGNCPYYKNEKRGHRYTVIGDLFALANKLSQYKYVEKNTGEVVKLPRDLMRNIVNQSLQSGSITKTKINELAKEFNIVILNTKTAKNENIADCIKYLKAVKPIFESYGFDWDKLISEEYTDQNSLLNRVGDTISFNITPKRRIDALNKIDELKGKDELIKKLSKQNFSGTAKVSDKYMIDAINAFFDGTLVGEFQANVQQDEFSVSIKTEKLLKLKPFDNNSEYAQNPVVFRAINETRKVVNAIVQKYGAPNAMNIEIASELNKSFDTRQKISTQQNKNEKERKNAIKQISLITGLDEREIRPQYIERYLLGELQGWRCMYSNEEITNKKEAILNKGKQYEIDHIVPFSRILDDTLNNKALVLARENQKKGARTPLMYLSAEKEKEFKQRVNKLFKGNKITEKKYRYFMLESLVGEDAEKILGDWKTRNLNDTRYIAKFLVKYFNDNLYFAREKGDDKRPVVYAVKGAITSSLRRQWLNKETWGRYDKGELKKITYFDHAVDAIVIANCLPAYVIIAAENHKLRDIYYSAGKIKTEEYRKSLDNCVDTLMKYYGMSPAVSRKLLEKVKETPSLLKNIRFEVEYRVRDYELMKYFFNYDTKVGEDTLDQIFRNDLYKIYDHQFADSIEMPIVSIKPERKYSGQMVKDRFIKKKDAISGKNSVKTIGENNSTVLNDSRFYCVDVYRTCNDETNLNFIKYTDLLKRNNHLYLRSDYRYPDDYAMHEMYLFRGDYIEITKKNIIRCGYYFSLKDSSKNELYISKGNTRRKLNNMKEKEACSITKKDTVKKFEIDILGKKLGEVKKYGEPLSLLPEKN

SEQ ID NO: 5027 - protein, 1121 aa, synthetic construct
  REGION 1..1121: note = Synthetic
LINLYIKFLSSNLIIILKNIFVNRKERIMKYIIGLDIGIGSVGWAVVRNDDDCKRLEDFGVRIFESGEIIESNKNIRNSQRRRKYRGMRRRIRRRNHRKERLKNYLENIEFVSRAELSEFFAKNNHDIIDIRVRALDEMVTPVELTAALLHIAKRRGYKAFYELSDENNNAKDKKAKEEEEKDIYKALTNTADVIKNGGYRSIAEAIMKDSEHFSDKISGRYKYRNIKEKDEKGKKKSDGKISENDILFPTEMFEDEVRKILGKQKEFYPQLTDESIDKIFDIIFSRRDFEDGPGNTDDENRPYKGFVDSIGNCPYYKNEKRGHRYTVIGDLFALANKLSQYKYVEKNTGEVVKLPRDLMRNIVNQSLQSGSITKTKINELAKELNIVILNTKTAKNENIADCIKYLKAVKPIFESYGFDWDKLISEEYTDQNSLLNRVGDTISFNITPKRRIDALNKIDELKGKDELIKKLSKQNFSGTAKVSDKYMIDAINAFFDGTLVGEFQANVQQDEFSVSIKTEKLLKLKPFDNNSEYAQNPVVFRAINETRKVVNAIVQKYGAPNAMNIEIASELNKSFDTRQKISTQQNKNEKERKNAIKQISLITGLDEREIRPQYIERYLLGELQGWRCMYSNEEITNKKEAILNKGKQYEIDHIVPFSRILDDTLNNKALVLARENQKKGARTPLMYLSAEKEKEFKQRVNKLFKGNKITEKKYRYFMLESLVGEDAEKILGDWKTRNLNDTRYIAKFLVKYFNDNLYFAREKGDDKRPVVYAVKGAITSSLRRQWLNKETWGRYDKGELKKITYFDHAVDAIVIANCLPAYVIIAAENHKLRDIYYSAGKIKTEEYRKSLDNCVDTLMKYYGMSPAVSRKLLEKVKETPSLLKNIRFEVEYRVRDYELMKYFFNYDTKVGEDTLDQIFRNDLYKIYDHQFADSIEMPIVSIKPERKYSGQMVKDNFLKKRVANSENKYVKTIDKNNDAVLDNSYYYCVEVYRTRSGNIDLQGIKYTDLVNKNKKLYLKPCYKYPENYYKYIMYLFKGDYLRIKGPKSTRLGFYKAVNNINQNSIKITRYNSKYTRAFREESTTISADAEIEKIYVDILGKKGKVLTKHGEPLSLLPEKN

SEQ ID NO: 5028 - protein, 634 aa, synthetic construct
  REGION 1..634: note = Synthetic
MIDAINAFFDGTLVGEFQANVQQDEFSVSIKTEKLLKLKPFDNNSEYAQNPVVFRAINETRKVVNAIVQKYGAPNAMNIEIASELNKSFDTRQKISTQQNKNEKERKNAIKQISLITGLDEREIRPQYIERYLLGELQGWRCMYSNEEITNKKEAILNKGKQYEIDHIVPFSRILDDTLNNKALVLARENQKKGARTPLMYLSAEKEKEFKQRVNKLFKGNKITEKKYRYFMLESLVGEDAEKILGDWKTRNLNDTRYIAKFLVKYFNDNLYFAREKGDDKRPVVYAVKGAITSSLRRQWLNKETWGRYDKGELKKITYFDHAVDAIVIANCLPAYVIIAAENHKLRDIYYSAGKIKTEEYRKSLDNCVDTLMKYYGMSPAVSRKLLEKVKETPSLLKNIRFEVEYRVRDYELMKYFFNYDTKVGEDTLDQIFRNDLYKIYDHQFADSIEMPIVSIKPERKYSGQMVKDNFLKKRVANSENKYVKTIDKNNDAVLDNSYYYCVEVYRTRSGNIDLQGIKYTDLVNKNKKLYLKPCYKYPENYYKYIMYLFKGDYLRIKGPKSTRLGFYKAVNNINQNSIKITRYNSKYTRAFREESTTISADAEIEKIYVDILGKKGKVLTKHGEPLSLLPEKN

SEQ ID NO: 5029 - protein, 684 aa, synthetic construct
  REGION 1..684: note = Synthetic
LHFYCFFITHKQRIDALNKIDELKGKDELIKKLSKQNFSGTAKVSDKYMIDAINAFFDGTLVGEFQANVQQDEFSVSIKTEKLLKLKPFDNNSEYAQNPVVFRAINETRKVVNAIVQKYGAPNAMNIEIASELNKSFDTRQKISTQQNKNEKERKNAIKQISLITGLDEREIRPQYIERYLLGELQGWRCMYSNEEITNKKEAILNKGKQYEIDHIVPFSRILDDTLNNKALVLARENQKKGARTPLMYLSAEKEKEFKQRVNKLFKGNKITEKKYRYFMLESLVGEDAEKILGDWKTRNLNDTRYIAKFLVKYFNDNLYFAREKGDDKRPVVYAVKGAITSSLRRQWLNKETWGRYDKGELKKITYFDHAVDAIVIANCLPAYVIIAAENHKLRDIYYSAGKIKTEEYRKSLDNCVDTLMKYYGMSPAVSRKLLEKVKETPSLLKNIRFEVEYRVRDYELMKYFFNYDTKVGEDTLDQIFRNDLYKIYDHQFADSIEMPIVSIKPERKYSGQMVKDGFIKKKDAISGKNSVKTIGENNSTVLNDSRFYCVDVYRTCNDETNLNFIKYTDLLKRNNHLYLRSDYRYPDDYAMHEMYLFRGDYIEITKKNIIRCGYYFSLKDSSKNELYISKGNTRRKLNNMKEKEVCSITKKDTVKKFEIDILGKKLGEVKKYGEPLSLLPEKN

SEQ ID NO: 5030 - protein, 957 aa, synthetic construct
  REGION 1..957: note = Synthetic
LINLYIKFLSSNLIIILKNIFVNRKVRIMKYIIGLDIGIGSVGWAVVRNDDDCKRLEDFGVRIFESGEIIESNKNIRKSQRRRKYRGMRRRIRRRNHRKERLKNYLENIEFVSRAELSEFFAKNNHDIIDIRVRALDEKVTPVELAAALLHIAKRRGYKAFYELSDENNNAKDKKAKEEEKDIYKALTNTADVIKNGGYRSIAEAIMKDSEHFSDKISGRYKYRNIKEKDEKGKKKSDGKISENDILFPTEMFEDEVRKILGKQKEFYPQLTDESIDKIFDIIFSRRDFEDGPGNTDDENRPYKGFVDSIGNCPYYKNEKRGHRYTVIGDLFALANKLSQYKYVEKNTGEVVKLPRDLMRNIVNQSLQSGSITKTKINELAKELNIVILNTKTAKNENIADCIKYLKAVKPIFESYGFDWDKLISEEYTDQNSLLNRVGDTISFNITPKRRIDALNKIDELKGKDELIKKLSKQNFSGTAKVSDKYMIDAINAFFDGTLVGEFQANVQQDEFSVSIKTEKLLKLKPFDNNSEYAQNPVVFRAINETRKVVNAIVQKYGAPNAMNIEIASELNKSFDTRQKISTQQNKNEKERKNAIKQISLITGLDEREIRPQYIERYLLGELQGWRCMYSNEEITNKKEAILNKGKQYEIDHIVPFSRILDDTLNNKALVLARENQKKGARTPLMYLSAEKEKEFKQRVNKLFKDNKITEKKYRYFMLESLVGEDAEKILGDWKTRNLNDTRYIAKFLVKYFNDNLYFAREKGDDKRPVVYAVKGAITSSLRRQWLNKETWGRYDKGELKKITYFDHAVDAIVIANCLPAYVIIAAENHKLRDIYYSAGKIKTEEYRKSLDNCVDTLMKYYGMSPTVSRKLLEKVKETPSLLKNIRFEVEYRVRDYELMKYFFNYDTKVGEDTLDQIFRNDLYKIYDHQFADSIEMPIVSIKLKENIQVRWLRIVS

SEQ ID NO: 5031 - protein, 501 aa, synthetic construct
  REGION 1..501: note = Synthetic
MPPVSMRVILYSNEEITNKEEAILNKGKQYEIDHIVPFSRILDDTLNNKALVLARENQKKGARTPLMYLSAEKEKEFKQRVNKLFKDNKITEKKYRYFMLESLVGEDAEKILGDWKTRNLNDTRYIAKFLVKYFNDNLYFAREKGDDKRPAVYAVKGAITSSLRRQWLNKETWGRYDKGELKKITYFDHAVDAIVIANCLPAYVIIAAENHKLRDIYYSAGKIKTEEYRKSLDNCVDTLMKYYGMSPTVSRKLLEKVKETPSLLKNIRFEVEYRVRDYELMKYFFNYDTKVGEDTLDQIFRNDLYKIYNHQFADSIEMPIVSIKPERKYSGQMVKDNFLKKRVANSENKYVKTIDKNNDALLDNSYYYCVEVYRTRSGNTDLQGIKYTDLVNKNKKLYLKPCYKYPENYYKHIMYLFKGDYLRIKGPKSTRLGFYKAVNNINQNSIKITRYNSKYTRAFREESTAISADAEIEKIYVDILGKKGKVLTKHGEPLSLLPEKN

SEQ ID NO: 5032 - protein, 914 aa, synthetic construct
  REGION 1..914: note = Synthetic
MKDSEHFSDKISGRYKYRNIKEKDEKGKKESGGKISENDILFPTEMFEDEVRKILGKQKEFYPQLTDESIDKIFDIIFSRRDFEDGPGNTDDENRPYKGFVDSIGNCPYYKNEKRGHRYTVIGDLFALANKLSQYKYVEKNTGEVVKLPRDLMRNIVNQSLQSGSITKTKINELAKEFNIVILNTKTAKNENIADCIKYLKAVKPIFESYGFDWDKLISEEYTDQNSLLNRVGDTISFNITPKRRIDALNKIDELKGKDELIKKLSKQNFSGTAKVSDKYMIDAINAFFDGTLVGEFQANVQQDEFSVSIKTEKLLKLKPFDNNSEYAQNPVVFRAINETRKVVNAIVQKYGAPNAMNIEIASELNKSFDTRQKISTQQNKNEKERKNAIKQISLITGLDEREIRPQYIERYLLGELQGWRCMYSNEEITNKKEAILNKGKQYEIDHIVPFSRILDDTLNNKALVLARENQKKGARTPLMYLSAEKEKEFKQRVNKLFKGNKITEKKYRYFMLESLVGEDAEKTLGDWKTRNLNDTRYIAKFLVKYFNDNLYFAREKGDDKRPVVYAVKGAITSSLRRQWLNKETWGRYDKGELKKITYFDHAVDAIVIANCLPAYVIIAAENHKLRDIYYSAGKIKTEEYRKSLDNCVDTLMKYYGMSPAVSRKLLEKVKETPSLLKNIRFEVEYRVRDYELMKYFFNYDTKVGEDTLDQIFRNDLYKIYDHQFADSIEMPIVSIKPERKYSGQMVKDNFLKKRVANSENKYVKTIDKNNDAVLDNSYYYCVEVYRTRSGNIDLQGIKYTDLVNKNKKLYLKPCYKYPENYYKYIMYLFKGDYLRIKGPKSTRLGFYKAVNNINQNSIKITRYNSKYTRAFREESTTISADAEIEKIYVDILGKKGKVLTKHGEPLSLLPEKN

SEQ ID NO: 5033 - protein, 1045 aa, synthetic construct
  REGION 1..1045: note = Synthetic
MSSGYVMGIDIGVASIGWSVVEPGSEERPGRIVRLGTHLFEPGVDGTQTAIEQGKDEPKGAARRGARQVRRQLWRRAHRKRKLLFALMKHGIMPHATVPDGAAIDAYIKALDSRLRAAWCRAGDHQAHQIMPYLIRSAGVQRKITLEEFGRALYHLAQRRGFLSNRKAKKKKDEDTSQVKAEINELQSLIDRHVPATLGAYLASLNPDEQRLRDRWTARSMYLHEFEALWTEQSRHHRELTDEAKAAIHRAIFHQRPLKSQAHLIGRCSLEPGRKRAPLAHREFQYYRVLQGVNHLTIAPPGEAARKLDAAQRKVLTDALLAQGDLTIAKVRTLLKLPKGTDIAGERGEEEKKIVGHRTDAKLRDAIGPRFDAMSDRERDQLVLDLRSFRETEPLIGRLKSHWGLSDEQARKVADADLEEGYASYSLAAIRRLIPHLERGLSVSEARKAEYPESFRATQVHDLLPPVTDVMGDLRNPSVMRALTEARKVVNAIIRRYGKPEKIHVELARDLKHGRDRRAAITKQIRQREKQHADAKHRILAEIKGYEPTRIDREKVLLADECDWRCPYTGKKFGMKELIGEHPQVDVEHIWPFSRSFDNSFMNKTLCWHDENRRVKRGRTPYEAYSASPERYQEILGRVLAFKSDRRTVSEKFRRFTAEAIDEDFTNRHLSDTRYIARAVSEYLGVLYGGRTDADGKQRIVACSGGLTSWLRREWGLDALLSPTGDDAEAEKNRIDHRHHAVDALVVALTTPRTQAMLQAAAARQEQEGRFRLFGRIEPLWSAFPREAKAAVEAIVVSHRQQRAVSGKLHAESNYSKPIHGGHRIRKELHKLTRNEVSRIVDPRCRALVEAQLEKLGVDDPAKAFSLRENCPVIKGRDGVERRLRRVRLFSTASPTIVGQNARIRYVEPDSNHHCIVWAKRTKEGEEGPWEFEPVRLLDAYDRVCRGLPVVNRDGGSDRIFKFSVSINEFIEMDDPDSGGRQLYRIKKTSLREIGVQLHHDARTVDEVRKAGDLNKYRISPSALKSRNARKVFVNHLGEVSGAGG

SEQ ID NO: 5034 - protein, 1086 aa, synthetic construct
  REGION 1..1086: note = Synthetic
MKNNGKGFRYRLGIDVGVASLGIAILALEDDANPSTGEPGYDILGGAVRTYPLPIGAEERRGQRGARRNTERLTRRLDRLSELLSGHGVGYPRKQATKDLLDLSPIKLRAKASREKVELPHLARALLHMARHRGSSAIREADIEQDDKEARQTAEGIKCLRREMENLDFTTYGQYLRWREKQNKPIRIDQTKMAASGDGYAFYPSREMLREEFSIIWGKQAEFHPQTLTDALRAGVEKELFFQRSITPPPPGDCPFFPNEKRLPKTSRLFQTRRIYEAVNHLRFYDKQGRLLPYTLEQRDRIVARLMAGEDLSIAEIKKEIGLSRTDKARVEESAAGPKPIKGYPFDRVLCDEVILGKRWTQLSSDKQDEILNILATEHDDSLAIEDIRHALGGDAGTAFKIVQAPLPSGYGNMGARATEMILQELKKDVVPARVAQDRAGLVHATSPDGVVYERLPYYGEILVGHTVKPMWESRYRRETDTPPNTDANEQRFGRIPNPVVHTALNQIRKVVNAVIKRYGQPETIHIELARDLNKSAEERDAITKRNEDNRKKNDAIRKELTALKVPTDRLNIQKYKLWDEQKSLCVYTGRTIELSDLYGGDADVDHILPRSKTFSDALNNKVVCCRAANADKDNRSPYEAFADNPNYNWNAILRRIPKGKEWRFKADAMDRFKDEEGFRARYGTDNSYIARVAAQYLSCLYGEPSKVVAVSSHIVGLLRAKWGLQKILGGKDDGKKARDDHRHHFIDALVAACATRSMVQRIQTEAKRCEREKLGAFVEKITPPFGDSKAFFNAARDAALNRVTVSRKADHGAGGQLHEDTLLGIVGDGPDDKGRYICRKRKKLTDYASLDALNKAKIEKTLPNLEAITVAKKDLKALKESLKNLSAQAVQELEDERQAAIEVGKKGKKITATAIYARAVRLHEAKGGKATFTLFERQKLVNIRRTPDNNRPYGGYKSGRNHRVDVYLDAKGKVKWQLISMLQANDKGFVPEATQPDHDLLWSAHKEDVLVMDNPDNLAERIRVTVAWFSEGKLVVCPITDARDAKTRKTWGEKGLSFYARHRAQRIVTDALGDITWRFPTLPNP

SEQ ID NO: 5035 - protein, 1098 aa, synthetic construct
  REGION 1..1098: note = Synthetic
MNNQNRHFRYRLGIDVGVASLGIAILALKNSNNSDTGEPDYSIFGGSVRTYPLPEGAAERREKRAMRRNIERRERRLDRLSELLAANGFGYPRERIPKKILDLSPIKLRAKASREKVDPAYLARALLHMARHRGSSAFRESAIKEDDKEARQTAKGMEILREEMKAKGFKTYGQYLRWREKQIPTLPIRINQEKMAAGKGGYAYYPSREMLQEEFEIIWDKQASFYPEKLTPALKEKVRDELFFQRSITSPPPGKCPYFTDELRLPRTSRLFQIRRIYEETNNLRFSGKRGETIPYGMAERDKIIARLMAGEDLTFAEIKTTMDLKRTDKVSIEDTKTRKGIASYPFDRELGAPGRLGGAWLEADENTQDKILEVLATEHDDSKAKDKLSKILGGDREAAKRALEAPLPSGWGRMGLTATKKILEELKKDVVPARVAEDRAGLVHAMTADGVIYDKLPYYGEILVGHTVEPMWVSDYRRATDRPPYTAPEEQKYGRIPNPVVHLALNQIRRTVNAVVGKYGTPESIHIELARELNKSAEARDEIAKQNLKNQKASDAAARELKEINVKVNRLNIQKYKLWKEQGGECVYTGKPLNLESLYNGEVDVDHILPRSKTYSDSMANKAVCLRSANADKRNRAPYDAFADNPNYDWAAIMRRVDKLQDNKKWRFKADAMKRFEEDEDGFRARYGTDNSYIARVARQYLSCLYGEPHNVVAVSSYIVAMLRGKWGLRKILGGKADGKKARDDHRHHFIDALTAACATRGIVQRIMREAARCEKEQLDDFVKNIAPPFGDPKEFFNAAREATFERVTLSRKADHSKGGQLHEDTLMGIVDVDGPDENGKYVCRKRKKLADYNTLEKLEKPKIKNTLPDIEEINQAKKELEDIKESVRNCVMQATQELEEERAADIASGMKGKKVSDLAVYSRAVQLHKDAGGKTAFIIYEKNKLVNLRRAGGGNRPTGGYKSGRNHRKDFYLDKKGKLKWQLVSMMDANDANFAPEAEKPGNQLLWSAHKEDVLEMDDPDDAGRRIRVVVAKFNETKMGVVPEADARDSKERVMWEKGLSFFYKAGAQRIVTDALGDIIWWFPALPRSGKADTSP

SEQ ID NO: 5036 - protein, 1517 aa, synthetic construct
  REGION 1..1517: note = Synthetic
MTKQILGLDIGTNSIGWAVVRGQGDDAQPLQEIVAAGSRVIPVDAGVLGDFERGVSSKSKAAERTAFRQVRRMIERSHLRRQRLLRVLQVMDYLPPHYARCLDRYGKFLPHTEPKIAWSETADGHYEFLFRDAFDEMMAAFRQRNPEWVARGGKVPYDWTLYYLRTKALSQPVSPYELAWILLSFNQKRGYRQARGEQQEDDSRKLEEYKSLKVLSVEDTGEKKGDQTWYRVLLEDGSEYKRLSRNPLPWEGQVRDFIVTTTLDAQGNPKTEKDGRVKRTYRSPKADDWTLLKKKTEAQIAQAHQTVGAYIFEALLRNPSQKIRGKLVHTIDRKLYYDELKAILQAQQPYHAALTDSAVLERCVRTLYQKNEAHARQALCHDLMAFLLDDVLFYQRPLKSQKALIANCSFESLTYYDRQTGEEKQAPVKCIPKSHPLYAEYRLWQFLDNLRIYQLEGEVDGKKCFDIDVTRQFLPDHEAYARLFDWLYHRENVSWKDLPKYPPFGLTRTTADLYRWNYAQDKSYPCHETWAHMQQCLKKAGLSPDFLTPEREEALWHILYSVSDMQELGRALHTFAHKNELTDDEAERFAKFFGKMEPFAHDYGACSAKALKKLLPLMRRGSYWSEEALAPGVRERIGQLLAGTDDAALPAKAREALKALHAVSDYQGLPLWLASYVVYNRHAEAKDIVRWETPADIDRFLLNFRPNELRNPIVELVVRETLRVVRDIWTRYGSFDEIHVELGREMKMPAKQRQKLSERMLENERTNLRIKMMLACFQHPEFGVDDVRPYSPYQQEILKIYEEYVLRDVKDIPDDIAAILRKFGESTAAKQPSAKEVLRYRLWLDQKYTSPYTGQIIPLGRLFTRDYEIEHIIPQKRYFDDSLSNKVICESAVNKLKSAQLAHEFISQHHGEVVELGNGRTARILELEDYERLVKDNYSHVRLSHKRRNLLLDEVPEAFIARQLNDTRYISKYVSMLLSNIVRGEDERSVNSTHLIATNGSITTRLKQDWGINDVWNAIVMPRFERLNGMVQTGDHMENVYVKLNTQGHLIPNVPLDRQRGFSMKRIDHRHHAMDAIVIACASRNMVNYLNNESARKGAKVTRMDLQHLLCTKTRADANGNYRWVMNKPWPTFTTDVRHALEDIVASFKQNRRIMSPTVNYFDHYDPATGKKRRKKQTQGEMQAVRMSMHDATFYGEINLRSIKEVSLKQALEQPQRIVNKDLKHKLQTLQAEGLNLKQMTAYFEEHHDEWADVNVKKIAVYVYSKEEGKARYFASRTVLDQSFTRDYIERKVADTGIQQILLRHLAHYENAEQAFSPEGIEDMNKNLKELNNGRPHQPIYKVRTYTQGVKSAVGQRNCKAAQFVNGAKGTNLYFAVYEGTKGESSGCKRSFATFSLRDVLPCLKDGKPVIPEFDKKGKRLKFVLSPLDLVYVPTPEELKLGQVQLPLNKKRIYKMVSSSGNQCFFVLANVASAIVDKYEFSSKNKMERSVTEEMEMIKEICLPLDVDRLGNVHLRQ

SEQ ID NO: 5037 - protein, 1494 aa, synthetic construct
  REGION 1..1494: note = Synthetic
MKNIIGLDLGTNSIGWAWIQHEEKEKSATNDKFLIPTGRIIKTGCRIIPMDAEMIGNFDKGNSISQTSQRTKARIARRLKTRFKSRRERLNRLLRLTGFLPEHYAAQLDGYGKISDHQEPRIPWLTTTEGQCQFLFKPAYKEMLELFRQKHPEIKSVPYDWTIYYLRRKALTEKITGEELAWILHSFNHKRGYNQSRDEVEETDNNKTVEYFKTKVKEISSTGETSKGKNIYKVTFENGVEHLVTAKERPQWEGTVREIVVTTLLNAQKDGSPKVTTRMPKDDDWQLIKTRTQDLIKKENLTVGEFIFKALLDDPSQKIIGELVRTIDRNFYIDELQKILRHQEKSHPELTDRTLYKQCVEALYPSNEAHRRNVEAWSMSHFIVKDILFYQRPLKSKKSLIAECPLESRTFQDEQGNLHRTGIKCIPRSHPAYQEFRLWQFLANLRIVQRQSHEDGHQLTDIDRSTEILNEEALVKLFNHLRNVKEINQKNLLKLLGLKEEDYRWNYVEDKTYPMGETRYQLISRLKKAGLSNEVPDDKMEEALWHLLYSISDYAELQRALSTFARKRGWDAEAFRKAFEKCPPFKKDYGAYSLKAIRKLLPLMRRGSHWHETAISPDVYRRIEHFVSGEEDTAISLHVRQIVAEEGLQNISQFSGLAPWLAAYVAYGRHSEATDAQKWETPEELAEHISKFRQHSLRNPVVEQVALETMRIVHDLWQKMGSIDEIHVEIGRDMKQTAAERKKAHDRNLQNEAINLRIKALLTEFMNPEMEIKDVRPYSPRQQTLLHIYEEGAFEKARHDNDAELEEMNNIIDKFRQTDSQKRPTRAEIHRYRLWLDQKYVSPYTKRPIPLAKLFTTAYEVEHVIPRARYFDDSYNNKVICEAEINKLKDKMLGFEFIKKHGGGTVNCQGREVRILTPDEYTCLVEEHFCRNPRKKKNLLSEEIPAQFTARQLNDSRYIARFVVGILSNIVREKDAKGRLEPESTSKNVIVCTGKVTDWLKRDWGLQDVWNHIIYSRFERLNDKVKSKRFGQWENKKGKRVFQINMPLELQAGFSRKRIDHRHHAMDAIVIACASRPIINYLNNCSSGEKEHYGLRENLCTGKSRFIKKPWSTFTQDTEEALRDIVVSIKKNLRVITKSTNFYQRYDPETGKKIFVRQTRGDHFAIRKSLHKDTVYGEVNLQKTGEVKLKEAIKQPGRIVDKTLRQKIRELKRLPNYSDTLIEKFFLQNADPIWKNYDFKKIKVRQFSKDKEATRQVATRKPLDQNFNQKNIADITDTGIQKILFRHLEKYAGKSEEAFSPDGLKALNENIRELNDGKPHHPIKKVRVAEKLGLKFPIGTRGNRKMKFVVADKDTNLFFAVYQREDGKRSYATIPLKEAIERAKQNLPPAPETDEAGRRLQFILSPNDLVYLPTKEELNDEVREEHIDVNRIYKMVSATKERCYFIPHHIAGIIAPGEEYNAMNKIEISDDGLSIKEHCILLKTDRLGRYKLKK

SEQ ID NO: 5038 - protein, 1156 aa, synthetic construct
  REGION 1..1156: note = Synthetic
MKNIVGLDLGTNSIGWAVVNGSVNDDGSEQLVKIQASGSRIIPMDAAMIGDFNKGNSISQTAERTRLRGVRRLSERYLLRRERLHRILDILGFLPFHFAQDLDRHGKIVKGKEPKLAWRKNEAGQFEFIFQDSFKEMLEDFKLNHPNLITDDKKVPYDWTIYYLRKKGLTSKISKEELAWILLNFNQKRGYYQLRGEEEKKNDNVMIINSKVIDVVKAEKDKKYEKYWYNVLLENGLLYRAAFYNDISFWKGHTKEFVLKTIKLKSGGTKQELSFLPSFDEIEKMEKKQKDKMYFKIKLKTEADIDQAHKTVGTYIYDTLLGNPSQKIRGRLVRTIERKYYKEELKLILDKQKEFHPELQDRALYAACVEELYTINEAHRNNIGNRDFTYLFLEDILFYQRPLKSKKSLIDNCPYEENQGLDKETGEIKSFPVKCIAKSHPLFQEFRLWQFIINLRIYRKDLAQDVDVTNELLKTEEDYVALFDWLNGKKEIDQKAFLKYPVFGLKKEIENYRWNYVQDKPYPCNETRLLMLARLEKCDISIEFLTKENEEALWHILYSVEDKNEIVKALQKFADKHDLNASFVDVFRKFPPFKKEYGSYSAKAIKKLLPLMRMGKYWSEDSIDKGTRKRMDKIITGEYDEKIENRVREKVIHLADVSDFRGLPLWLVCYIVYGRHSEAKEITQWKSPADIDSYLKSFKQHSLRNPIVEQIIIETLRVVRDIWKQVGNIDEIHVELGREMKNPADKRKKMTQQMSENENTNLRIKYLLTEFLNPEYEVENVRPYSPSQQDILRIYEEGVLNSVSDLPEEISDILKKFTETDLKKRPSRSEILRYKLWLEQKYRSPYTGEVIPLGKLFTPAYEIEHVIPQSCYFDDSFSNKVICEAEVNKLKSNLLGHEFIVKHHGEIVELPFGKKVRIFTVDEYEQFVKDNYSRTRGKMKKLLMDDIPEEFVARQLNDSRYISKVVKSLLSNIVREKGEEEAISKNVIPCTGGVTDRLKKDWGINEVWNKIILPRFQRLNELTGTNKFTTKNVGIQEIPTMPLELQKGFNKKRIDHRHHAMDAIIIACANRNIINYLNNESATAKAELSRYDLQKLLCDKAKTDNNGNYKWVIRKPWASFTQDTYLALENIIVSFKQNLRVINKATIIMKKAKRSL

SEQ ID NO: 5039 - protein, 904 aa, synthetic construct
  REGION 1..904: note = Synthetic
MKNILGLDLGTNSIGWSVIQEKHNDNNECQKLILGAGSRIIPMDAAVLGDFAKGNTISQTKDRTQYRGVRRLRERCLLRRERLFRVLDIMGFLPQHFSNALTRYGKFKDADEEPKIAWRKDDEGKMHFLFADSFNEMIEEFRSVQPELLKRGMKVPYDWTLYYLRKKAMREAVTPFELAWLILSFNQKRGYYQLRGEEEGEADNSKCEEYLAQKVVDVIDTGEKKGKSTWFDIVLENGMVYHRSAEIKPDWIGKTKEFIVTTQFDKDGNPKKDKEGNVKMSFRMPNENDWNLQKKKAEKDIDESGMTVGEYIYNALLHNPKQKIKGKLVRVVERKYYKNELQKILESQKRFIPQLSDSALYEKCIKELYQSNEAYRNSISTRNDFTYLFVDNIIFYQRPLKSKKSLIDNCPYESLTYTKDGEEHKAPVKCIAKSHPLYQEFRLWQFISNLRIYQRQKQVGDKVKLDVDVTDEFLPTDDRREALFDYLNDKTEIKQDVLLKEFFNMKKPKGKDSVYPYRWNYVEDKSYPCNVTRGKILAKLNRAGISADFLSSNGNEESLWHILYSVEDKGELRKALARFAAKNGLDDAFTEALADIEPYKKEYGAYSAKALKKLLPLMRLGKYWNYDNIAPTTKARISKIIDGEYDENIRNRVREKAMSLTSASQFQGFPLWLACYIVYDRHSERADSGRWSSPEDIDKYLSDFKQHSLRNPIVEQVVTETLRTVRDIWKRYGEISEIHVELGREMKNPADKRSKMNRRMLENENANMRAKLLLTEFMNPEFGIENVRSYSPSQQELLRIYEDGAISNAGSEIDDEISDIMSRLSQVDVKKQPTASEVKRYILWLEQNYRSPYTGQMIPLAKLFTPAYEIEHVIPQSRYFDDSFSNKVICEAEVNKLKDRMLGY

SEQ ID NO: 5040 - protein, 877 aa, synthetic construct
  REGION 1..877: note = Synthetic
MKNILGLDLGTNSIGWAVIKASTNEEGKEQLHNIDSAGSRIIPMDAAILGDFDKGNSKSQTADRTQSRGIRRLYERSNLRRERLHRVLSLLGFLPAHYARYIDRYGRFIDYAEPKLSWDKDEQGHPVFIFQDSFDEMLNDFRQFQPALVDNGRKVPYDWTIYYLRKKALTQKIRKEELAWILLNFNQKRGYYQLRGEETNTSTTAKSRQYFDSQIVIDIIDTGQLYKGMKVLTVVLEDGSKGKIFKKEIPDWIGQKKDIIASVDIDKDGNDKYDENGELSCRFKIPSEQEWDEKWELIKTKTQHDLDVSDKTVGAYIYDTLLQMPCQKVRGKLVRTIERKYYKKELYQILEKQKEFHEEFRNRDLYLACINELYSLNEAHRNEIASRNLVYLFIEDILFYQRPLKSKKSLIADCPYEEYTCTNKETGEIEHFGVKCIAKSHPLYQEFRLWQFLANLRIYQKEQVDNGKTCYDVDVTSDFLKTEDDYTELFDWLCEQKSIKQDSILKCPVFGLKKNDINKYRWNYVEDKSYPCNETHALLLEWLNKAGIASSFLNSTTEEDLWHILYSVSDKKELEKALNKFAERYGLAAKFVEVFQSVPPFEKDYGAYSAKAIKKLLPLMRMGKYWSEDNIDEQTRRRIDKMISGEYDDTIRNRVREKAIHLTDVTSFRGLPLWLACYIVYNRHSEARDVKKWTEPADIDDYLRKFKQHSLHNPIVEQIILETLRTVRDIWRQVGHIDEIHVELGREMKNPKDKRAKMTRQMQENENANLRIKAMLVEFMNPEFEIENVRPYSPSQQELLRIYEEGVLNSVSEISDEIATIIKKFNESDIKKRPTTSEVLKYKLWLEQKYRSPYTGEMIPLGKLFTPAYEIEHIKTQ

SEQ ID NO: 5041 - protein, 835 aa, synthetic construct
  REGION 1..835: note = Synthetic
MNKILGLDLGTNSIGWAVVQKDEQGSYEKIINAGSRIIPMDAETMKNFNNGITQTQTSERTRLRGVRRLLERSLLRRERIHRLLNTMNYLPPHYAEKIDFVNRLGKFIGEEEPKYAYMVDEDGKFQFIFKESFNEMLKDFQDKQPELVLNNKKVPYDWTIYYLRKKALDRAISKEELGWIILQFNNKRGYYQLRGEEDETLKEGKKEEYFALKVIRVEADSSSAGKKGEVWYNVLLENGWIYRRTSKIPLDWEGKTKEFIVTTDVDENGNALKDKEGKEKRKFRAPAENDWTLLKKKTESDLVKSGKTVGTYIYDTLLSSPDQKIKGGLIRTIERKFYKSELIAILNKQKEFHPELKDKTLYNKCVEELYRSNESRRLSLSNYDFTRFITEDVIFYQRPLKSKKSLIENCSFERRYFLDPITKELAYAPIKCIAKSHPLFQEFRLWQFIKNLRIIEREKIVGDKLMFDQDVTTEFLPTQNDYVILFDWLNEHKEIDQKALLKYPAFDLKKNIDKYRWNYVENKSYPCNETRALLKTKLNKAGNIPSEFLDNDTLESLWHILYSVEDKLEIEKALTSFATKKELSEEQTVAFVEQFINIPPFKKEYGSYSAKAIKKLLQLMRMGSRWSENEIAESTKGRIQKLIDGECDESIKTRTRDKALKFNEINDFQGLPLWLASYIVYDRHSESGDVMKWETPEDIDYYLKHVFKQHGLRNPIVEVVVVETLKVVKDLWKTYGSFSEIHIELGREMKNPADKRIRMTNQNVENENTNLRIKALLAELANQKDIEGVRPYSPSQHEILKIYEEGVLNMLTKEDPDYDTISKIIAVPLKSKIVL

SEQ ID NO: 5042 - protein, 702 aa, synthetic construct
  REGION 1..702: note = Synthetic
MKHILGLDLGTNSIGWAVINSNFDEATQKEQLKGIEAAGSRIIPMDAAQLGDFNKGNSVSQTANRTQYRSTRRLYERKKLRRERLHRVLQLLGFLPSHYAGQLDRYGKFIANSEPKLAWEKGANNLSYFIFQESFQEMLKDFSQEDRCTKKVPYDWTLFYLRKKALTQKIEKEELAWILLNFNQKRGYYQLREEEAEKSTSKTRQYFDSQIVIDIVDTEETYKGLKIFTLTLANGEKGKWYGKNIPDWKGQKKEIIVSIDLDKNGNDKCDENGEPVRHFKIPTEKEWEEQWGLVKAKTEKDLNTSKKTVGTYIYDTLLRTPDQKIRGKLIRTIERKYYKDELYQILTTQEKFHPELRDGNLLQSCIEELYHNNEAHRNTISKYSMSKLLVEDVIFYQRPLKSKKSLISNCPYEEHTYVDKETGEIHTASVKCIAKSHPLFQEFRLWQFLSNLRIYQKEGILNGKFTTDIDVTNEFLKNADDYTNLFDWLNQKKEIKQDAFLRYPPFGLKKNVANYRWNYVEDKTYPCNETHSRILLYWEKAGIDQSILTTDIEEKLWHILYSISDKNELQKALKHFADKNKLEDKFADIFQQIPPFKKDYGSYSAKAIKKLLPLMRMGKYWHLESIDNATLTRIHQILNGEMDEATASRIKEKYIHLDNFSSFQGLPTWLACYIVYNRHSEIKDITKWKQPSDIDAYIQSFK

SEQ ID NO: 5043 - protein, 635 aa, synthetic construct
  REGION 1..635: note = Synthetic
MKKILGLDLGTNSIGWALLNAQELENGNGFVFDHIERAGSRIIPMDAAILGDFDKGNSKSQTSERTRFRGVRRLRERHLLRRERLHRVLNLLGFLPEHYLREIDFENHPGKFITSVEPKLPWVKNISGQFEFLFNSSFEEMLNDFKNSQPQLVVDGRKIPYDWTIYYLRKKALHEKISKEELVWLLLNFNQKRGYYQLRGEDEEEDRSKRVEFHALKVLSVKATDQKKGKDVWYEVTLENGWIYRRASSLPLDWEGKVKEFIVTTDIAEGGTPKMDKDGNVKRSFRAPKEDDWTLLKKKTEADIEQSNKTIGAYIYDTLLQDPFQKIRGKLIRTIERKYYKAELEAILRKQKEYHQELNSPDVYKKCIEHLYPNNEPHRENIANKDFVYLFLDDIIFYQRPLKTKKSLISDCPFEYRRYKDPKTGEEKISTIKCIAKSNPLYQEFRLWQFISNLRIYQREKEINGQLKIDVDITNEWLKSEEDYAALFEWLNDRKEIKQDTLIQSYFKQKKIKGQTTFPFRWNYVEEKIYPCNETRASILSRLENANISSGFLTKEREVALWHILYSVEDKYEIIKALRTFKEKNQLDDTFVDAFCKFPPFKKEYGAYSEKAIKKLGNYIRLYTNDSKKIKRYNE

SEQ ID NO: 5044 - protein, 625 aa, synthetic construct
  REGION 436..603: note = misc_feature - Xaa can be any naturally occurring amino acid
  REGION 1..625: note = Synthetic
MKKILGLDLGTNSIGWALTTQDFNNKKGEINGLGSRIIPMSQDILGKFDSGQSYSQTAERTKYRGVRRLYQRNLLRRERLHRVLNVLNFLPQHYKESIDFEKHFGQFKNGTEEKLNYRKNEVGKHEFIFMDSFNEMVTEFKQAGKETTIPLDWTIYYLRKKALTKKISQEELAWILLNFNQKRGYYQLRGEDEEGGKENNKSFETLFVAEVKVSGDVIKKTGELLYDIYFNNGWKYDKQTTKPESWLNKLKEFIVTTTELKNGEIKRSFKIVDSETDWIAIKESTQKKIKSFNSEKSLVGVGQFIYETLLQNPTQKIRGKLVKTIERKFYKEELQEILKTQIKFHSELQDRELYDACINELYPRNEAHQNNIKDNGFDYLFIDDIIFYQRPLKSKKSTISDCPYEERFFIKEGIKNTQKIKCIAKSNPLFQEFRLXXXXXXXXXXXXXXXXXXXXXXXXXXXXXXXXXXXXXXXXXXXXXXXXXXXXXXXXXXXXXXXXXXXXXXXXXXXXXXXXXXXXXXXXXXXXXXXXXXXXXXXXXXXXXXXXXXXXXXXXXXXXXXXXXXXXXXXXXXXXXXXXXXXXXXXXXXXXXXXXXXXXXXXXSQLLPTTYLYMKICDSSRKIQF

SEQ ID NO: 5045 - protein, 549 aa, synthetic construct
  REGION 1..549: note = Synthetic
MKKILGLDLGTNSIGWAVVCHSDTDGQTERKWIEMAGSRIIPMDAAILGDFDKGNSKSQTSERTGFRGIRRLRERVLLRRERLHKVLKLIGFLPQHYIDSLDFSNHSGKFQLGTEVKLPWRKNEIGKYEFLFQNSFNEMLADFAKKQPELVAMGRKVPYDWTIYYLRKKALSEKITKEELAWILLNFNQKRGYYQLRGEEEEEKKNRLEDFYALKVVEVEQTDDKKGKDIWYNVHLENGWIYRRSSNVPLDWKDKIKEFIVTTELNEDGTPKVDKDGCVKRSFRMPKEDDWKLLKKKTEADIERSHKTIGCYIYDTLLQSPQQKIKGKLVRTIERKFYKDELKLILDKQQAFHPELQDRELYKACLDVLYPMNVAHKNNVANRGFVYLFMEDILFYQRPLKSKKSLIDNCPYEENQYIDVTTGEIKKAPIKCIAKSHPLYQEFRLWQFIANIRIYQKEKKVDGKLLTDIDVTTEYLSSKDDYVALYEWLCVRKEIEQKTFLKYPAFGLKKEIENYRWNYVEGKSYPCNETRSLILHYLEIFLTILKIYT

SEQ ID NO: 5046 - protein, 507 aa, synthetic construct
  REGION 1..507: note = Synthetic
MKHILGLDLGTNSIGWAVINAIKEENTQKEQLIGINTAGSRIIPMDAAQLGDFNKGNTVSQTANRTQFRGVRRLYERKKLRRERLHRILQLLGFLPKHYASQLDRYGKFIANSEPKLAWTTNTHEPSYFIFQSSFQEMLNDFLQNNNQVKKVPYDWTLFYLRKKALTQKIEKEELAWILLNFNQKRGYYQLREEETEKASSKTRQYFDSQIVTDITDTGQIYKGLKIFTITLENGEKGKFFSKNMPDWKGQKKDIIAIIDLDKNGNDKYDENGELSRRFKIPTEQEWEEQWELIKTKTQKDLDTSHKTVGAYIYDTLLQTPSQKIRGKLIRTIERKYYKDELNQILKKQEEFHPELRDSNLLEACIEELYPNNEAHRNAIAKYSISQLLIEDILFYQRPLKSKKSLISNCPYEEYTYTNKETGEICTSSLKCIAKSHPLFQEFRLWQFISNLRIYQKEGTINGKFTTDIDVTNQFLKTEDDYANLFDWLNQKKEIRQDTFLKNQHLD

SEQ ID NO: 5047 - protein, 640 aa, synthetic construct
  REGION 1..640: note = Synthetic
MTTILGLDLGTNSIGWAKVCVDDNGNYLRDIKLGSRIIPMSQDVLGNFDKGVTESQTSVRTGFRGVRRIRERSLLRRERLHRVLHVLGYLPPHYDSAIGWNKNEPSTYGKFLNHGEPKLAWERKEDGSMRFLFMESFHEMMADFAKSQPSLVSDGKKIPLDWTIYYLRKKALSQPIRKEELAWILLNFNQKRGYYQLRGEEDDDNPTKCEEYYELKVVGVEADEEGKNGNTWYNVKLENGWIYRRQSKIPLDDWVGKIREFIVTTEYEKDGITLKKDKNGDVKRSFRSPSEDDWGLRKKRTEKLLDSSKMTVGAFVYDHLLAEPSDKIRGKFIRTIERKYYKKELYAILCEQSKYHEELRSGDYLNKCAQELYKNNQPHRNSLLTKDLAYLLLEDLIFYQRPLKTKKSLIAECPYEAYKYVDKETGEIKRQGIKCIAKSNPYYQEFRLWQFISNLRLFNKADDKEVTADYLPTQDHYVSLFAYLNDRKEINQETLLKEFFKLKKITVNSEKVFPIRWNYIEDKEKKYPCNETRHELLLALDRARIDHSWLEKPGQEYRLWHLLYSVESKEETKEALRKLKDDDAFVESFLKVKPFKREYGAYSEKAIKKLLAVMRMGTFGEKQIFVIQQRGISLRYCKEI

SEQ ID NO: 5048 - protein, 1224 aa, synthetic construct
  REGION 1..1224: note = Synthetic
MTKQILGLDIGTNSIGWAVVRGQGDDAQPLQEIVAAGSRVIPVDAGVLGDFERGVSSKSKAAERTAFRQVRRMIERSHLRRQRLLRVLQVMDYLPPHYARCLDRYGKFLPHTEPKIAWNETADGHYEFLFRDAFDEMMAAFRQRNPEWLARGGKVPYDWTLYYLRTKALSQPVSPYELAWILLSFNQKRGYRQARGEQQEDGRVKRSFRSPKADDWTLLKKKTEAQIAQAHQTVGAYIFEALLRNPSQKIRGKLVHTIDRKLYYDELKAILQAQQPYHVALTDPAVLVRCVRTLYQKNEAHARQALCHDLTAFLLDDVLFYQRPLKSQKALIANCCFESLTYYDRQTGEEKQAPVKCIPKSHPLYAEYRLWQFLDNLRIYQLEGEVDGKKCFDIDVTRQFLPDHEAYARLFKWLYRRKNVSQKNLLKYPPFGLKPTADLYRWNYAQDKSYPCHETWAHMQQCLKKAGLSPDFLTPEREEALWHILYSVSDMQELGRALHTFAHKNELTDDEAERFAKFFGKMEPFAHDYGACSAKALKKLLPLMRRGSYWSEEALAPGVRERIGQLLAGTDDAALPAKAREALKALHAVSDYQGLPLWLASYVVYNRHAEAKDIVRWETPADIDRFLLNFRPNELRNPIVELVVRETLRVVRDIWIRYGSFDEIHVELGREMKMPAQQRQKLSERMLENERTNLRIKMMLACFQHPEFGVDDVRPYSPYQQEILKIYEEYVLRDVKDIPDDIAAILRKFGESTAAKQPSAKEVLRYRLWLDQKYTSPYTGQIIPLGRLFTRDYEIEHIIPQKRYFDDSLSNKVICESAVNKLKSAQLAHEFISQHHGEVVELGHGRTARILELEDYEKWVKEHYAALPRKRRNLLLDEVPEAFIARQLNDTRYISKYVSMLLSNIVRGEDERSVNSTHLIATNGSITTRLKQDWGINDVWNAIVLPRFERLNGMVPPKDGQPAQVYVTRNTQGHPIPTVPLDRQRGFSMKRIDHRHHAMDAIVIACASRNMVNYLNNESARKGAKVTRMDLQHLLCTKTRADANGNYRWVMNKPWPTFITDVRHALEDIVASFKQNRRIMSPTVNYFDHYDPATGKKRRKKQTQGEMQAVRMSMHDATFYGEINLRSIKEVSLKQALEQPQRIVNKDLKHKLQTLQAEGLNLKQMTAYFEEHHDEWADVNVKKIAVYVYSKEEGKARYFASRTVLDQSFTRDYIERKVADTGIQ

SEQ ID NO: 5049 - protein, 751 aa, synthetic construct
  REGION 1..751: note = Synthetic
MKTVLGLDLGTNSIGWAVINSVIKEQSERSWIEMAGSRIIPMDAAILGDFDKGNSISQTAERTRFRGVRRLRERQLLRRERLHKVLKILGFLPEHYLKGIDFEKHMGKFLSGSEPKLPWVKDERGKYAFLFQTAFHEMLADFAKHQPSLVSDGKKIPYDWTVYYLRKKALTEMISKEELAWILLNFNQKRGYYQLRGEEEEDNAGKSAEFYALKVLSVEATDEKKGRDIWYNVHLENGWIYRRSSSVPLDWEGQVKEFIVTTDLNPDGTPKLDKYGEVKRSFRAPKEDDWMLIKKRTEADITNTHKTIGSYIYDTLLQEPQQKIIGKLVKAVERKFYKEELNLILQRQCTFHAELQDRGLYMKCIEALYPSNEVRRRNIANRDFIYLLMDDILFYQRPLKTKKSLIANCPYEENEYVNRKTGEVKKAPLKCIAKSHPLFQEFRLWHFLSNIRVYQKEKEVNGTLRLDVDVTTEFLKTEDDYVALFDWLNSRKEIDQKAFLKYPAFGMKKEINNYRWNYVEDKFYPCNETRYAILSRLEKAGVSIDFLSDEKEAALWHILYSVSDKQEIEKALKTFAAKNGLNESFVEVFKKFPPFKSEYGAYSAKAIKKLLPLMRCGKHWDVSLIDGTTKERIERIIAGECDESIGAKVKEKMMNLSDISCFKRLPLWLACYVVYNRHSEDKEIAKWETPADIDAYLAAFKQHSLRNPIVEQVITETLRVVRDIWKQVGKIDEIHIELGREMKNPANKRKK

SEQ ID NO: 5050 - protein, 561 aa, synthetic construct
  REGION 1..561: note = Synthetic
MRTILGLDLGTNSIGWAVINSVIKEQTERIWIEMAGSRIIPMDAAILGDFDKGNSVSQTAERTRFRGVRRLRERQLLRRERLHKVLKILGFLPEHYLKGIDFEKHTGKFLSGSEPKLPWVKDRWGKYSFLFQTAFNEMLADFAKHQPSLVFDGKKIPYDWTVYYLRKKALTEMISKEELAWILLNFNQKRGYYQLRGEEEEDNAGKSVEFYALKVLSVEATDEKKGRDIWYNVHLENGWVYRRSSNVPLDWEGRVKEFIVTTDLNPDGTPKLDKYGEVKRSFRAPKEDDWMLIKKRTEADITGTHKTIGSYIYDALLQEPQQKIIGKLVKTVERKFYKEELNFILQKQCAFHAELQDRDLYMRCIEALYPGNEVQRRNIANRDFIYLLIDDVLFYQRPLKTKKSLIANCPYEENEYVNRKTGEIKTAPLKCIAKSHPLFQEFRLWYFLSNIRVYQKEREVNGTLHLDVDVTTEFLKTEDDYVALFDWLNSRKEIDQKAFLRYPAFGLKKEINNYRWNYVEDKFYPCNETRHAILSRLEKAGIGIDFLSDEKKQPCGISYIL

SEQ ID NO: 5051 - protein, 642 aa, synthetic construct
  REGION 1..642: note = Synthetic
MKHILGLDLGTNSIGWAVINAIKEENTQKEQLIGINTAGSRIIPMDAAQLGDFNKGNTVSQTANRTQFRGVRRLYERKKLRRERLHRILQLLGFLPKHYASQLDRYGKFIANSEPKLAWTTNTHEPSYFIFQSSFQEMLNDFLQNNNQVKKVPYDWTLFYLRKKALTQKIEKEELAWILLNFNQKRGYYQLREEETEKASSKTRQYFDSQIVTDITDTGQIYKGLKIFTITLENGEKGKFFSKNMPDWKGQKKDIIAIIDLDKNGNDKYDENGELSRRFKIPTEQEWEEQWELIKTKTQKDLDTSHKTVGAYIYDTLLQTPSQKIRGKLIRTIERKYYKDELNQILKKQEEFHPELRDSNLLEACIEELYPNNEAHRNAIAKYSISQLLIEDILFYQRPLKSKKSLISNCPYEEYTYTNKETGEICTSSLKCIAKSHPLFQEFRLWQFISNLRIYQKEGTINGKFTTDIDVTNQFLKTEDDYANLFDWLNQKKEIRQDTFLKKPAFGLKKNIANYRWNYVEDKTYPCNETHYKILSYWEKAGIEQSALTSEIEEKLWHILYSISDKNELRKALQHFADKNYLSDKFADTFQQIPPFEKDYGSYSAKAIKKLLPLMRIGRYWKAENFDSTTLDRIEKNINWRV

SEQ ID NO: 5052 - protein, 865 aa, synthetic construct
  REGION 1..865: note = Synthetic
MKKVTLGLDLGTNSVGWSVINSIITEQSEKIWLEMAGSRIIPMDAAILGDFDRGNTTSQTAERTRLRGIRRLRERCLLRRERLHKVLHILEFLPEHYSEQISWDKHPGQFMNLTEPKLAWKRSDTGKYEFIFQAAFNEMLADFAQHQPTLVANGKKVPYDWTIYYLRKKALTEKITQQELAWIILNFNQKRGYYQLRGEEEEEKSNKQVEYYALKVVCVEATDEKKGKDTWYNVHLENGWIYRRSSNVPLDWEGKIKEFIVTTDLNEDGTPKVDKQGEVKRSFRAPKEDDWTLIKKKTEADVADSRKTVGWYIYDILLQKPQQKIRGKLVRTIERKFYKEELKQILEKQSVFHTELQDRDLYKKCLECLYPQNDAHKRNIANRDFVYMFTEDILFYQRPLKSKKSLIDDCPYEKNEYVDKETGEIKHASLKCIAKSHPLFQEFRLWHFLSNIRIYQKERQQGDRLLTDVDVTSEFLNTEEDCVALFEWLNERKEIDQKNFLKYPQFNLKNKAVNYRWNYVEDKMYPCNETRYLIKSRLDKAHVFSGDFILSAENEMALWHILYSVSDKVELEKALATFATKHALDKVAFVETFKKAPPFEKEYGAYSAKAIKKLLPLMRMGKYWSADAIDETTRERIDKIVTGEYDEKIHNKVHEKSIHLQSVDDFRGLPLWLVCYVVYGRHSEVKDIAKWETPSDIDAYLKAFKQHSLRNPIVEQIIVETLRVVRDIWKRVGTIDEIHVELGREMKNTAKDRAKMTMQVLENENANLRIKALLTEFVNPEYNIENVRPYSPSQQELLRIYEDGILNYVADIPEDIENFLKKLKDSKSPSKSEFMRYNYGWSRNIVLLIQEKLFLLPNCLHRLMR

SEQ ID NO: 5053 - protein, 539 aa, synthetic construct
  REGION 1..539: note = Synthetic
MKTILGLDLGTNSIGWAKVTVDDNENYLRDIQLGSRIIPMSQDVLGKFDKGVTESQTAIRTSFRGIRRLRERTLQRRERLHRVLHTLHCLPPHYDSAIGWDRKTPTTYGKFLNHGEPKLAWERREDGTMQFLFMDAFHEMIADFAKYQPALVADGKKVPLDWTIYYLRKKALTQPIKKEELAWILLNFNQKRGYYQLRGEEDEENAAKHEEYHELKVVGVEVDEAGKGDNTWYNVKLENGWIYHRQSKIPLDDWVGKVRAFIVTTEYEKDGTTPKKDKEGNVKRSFRSPDEKDWGLRKKQTEHSLEASGTPVGAFIYDHLLKEPSDKIRGKFIHTIERKYYKQELAAILREQSKHHEELCSKDMLKACIEELYPNNPLHRESLLKKNMTYLLIEDLIFYQRPLKSKKSLIAECPYEAYSYVDKETGEMKRQGIKCIAKSNPYYQEFRLWQFIANLRLRNRADERDVTAEYLPHQEDYVRLFTYLNDRKEINQETLLKDFFKLKKVAIGGEKVFPIRWNYIEDKEKKYPCNATRHELLLV

SEQ ID NO: 5054 - protein, 1283 aa, synthetic construct
  REGION 1..1283: note = Synthetic
VTFADGTEFTSTKSEAPLWIGRTREIIVTTSLDTSGKPKLDKEGKIIQSAKTPDEKDWTLIKIRTEATIDDSKLTVGEYIFHALLKNPETKIKGAHVSTIDRRFYINEINAILKEQEKYHEELRDKSLYEQCIKALYAQNEVRRNIIAPWSMKDLLTKDILFYHRPLKSKKSQISECPLEFHCYTDKDGETHRQGIKCIPVSHPLFQEYRIWQFISNLRIYEREHFDNGKHFTNVDKTSEFLTSEKKEELYEWLAERDSVSQKTLLGKIGLKVEDYHWNFPEEKTYPCGETRHLIQSRLKKANLQKAFHSLISDEQKECFERGLWHILYSVSDYNELCKALKTFARKTGFTLEEQLLFVEAFSSCPPFKKDYGAYCKRAITKLLPLMRIGKFWHEESIDTTTKTRIEHLISGEECSGIDVRVREKVAKAGLCESIEQYQGLQQWLANYVVYNRHSEASEIIKWESPDELDNYIRSFKQYSLRNPIVEQVSLETLRVVRDLWAELQKEGQTIDEIHLEMGRDLKNTAEERSKIFRRNSENEDTNFRIKLLLEEFYANEKDIKDVRPYSPSQQELLRIYEEGVWQQEKDIPQDIKDIKKRISNDKDIKDITPNDIQRYRIWMDQKYCSPYTGKTIPLSRLFTTDYEIEHVIPRSRYFDDSYNNKVICEAAVNKDKNNRLGMEYIIAAGGKTIELGNGKNVQILKEEEYVELVDKIFGNNTRKRNIMLADEITEEFSHRQLNDTRYIARFMKGILSNIVREKNADGTLEPEETSKNLIVCSGRITDRVKQDWGLNDIWSHIVTPRFERLNTKTSSNDFGEYVCKDGKRYFQTRVPLNLQKGFNKKRIDHRHHAMDAIAIACVNRSIVNYLNNAAANQTEREDLRRAVCIPERNGQTKRQLRSPWHCFAREAENALRQIVVSFKQNLRVATKATNSYECFDTASGKKIRKHQSNREHYAIRKPLHKDSVYGEVILTSIASVNLKKALLKAERILDKRLKEKIFELRKLYNYSNKQIEEHLTKVCINCPEWKNYDFKKIAVRILSNDADATHIVAIRKPLDESFDEVKINTITDTGIQKILKNHLSRYADDPKKAFSPEGIEDMNANIASLNGGKQHLPIYKVRVSEKNNGGYFPIGQKGNRHKKYVTTAQDTNLFFAIYADSKGKRSYKTIDLRTAIECRKQGLSVAPSINEKGDKLLFTLSPNDLVYMPSEGEETNGFAIDNNLNKEQIYKMVSATNNRCFFIPHTVADFISRGQEYNSVNKIELTEDGRSIKEHCVPLKVNRLGK

SEQ ID NO: 5055 - protein, 1558 aa, synthetic construct
  REGION 1..1558: note = Synthetic
LYTSHHVAANSTYPFKTGHNRTPLNRFTTHKTQPYNIMTKNTRNIIGLDLGTNSIGWSWIQQLISPTPTQPSEYLFNRTPIIRMSGSRIIPMPGDVTGSFERGETISKTKDRTAKRMARRMNERFQLRRERLNRVLNIMGFLPEHYARALDRYGKLNEESNTTIAWQSKEDGKNEFIFYPSFLEMAAIFKERHPDIQRIPLDWTLYYLRSKALHQAITKEELSWVLHSFNQKRGYYQSREDITEEDKTKKVEYIKGVVNSVEDTGEKAKGKKIYKVTFADGTEFTSTKSEAPLWIGRTREIIVTTSLDTSGKPKLDKEGKIIQSAKTPDEKDWTLIKIRTEATIDDSKLTVGEYIFHALLKNPETKIKGAHVSTIDRRFYINEINAILKEQEKYHEELRDKSLYEQCIKALYAQNEVRRNIIAPWSMKDLLTKDILFYHRPLKSKKSQISECPLEFHCYTDKDGETHRQGIKCIPVSHPLFQEYRIWQFISNLRIYEREHFDNGKHFTNVDKTSEFLTNEKKEELYEWLAERDSVSQKTLLGKIGLKVERYHWNFPEEKTYPCGETRHLIQSRLKKANLQKAFHSLISDEQKDCFERGLWHILYSVSDYNELCKALKTFARKTGFTLEEQLLFVEEFSSCPPFKKDYGAYSKRAITKLLPLMRIGKFWHEESIDSTTKNRIEHLISGEECSGIDVRVREKVAKTGLCESIEQYQGLPQWLANYVVYNRHSEASEITKWESPDELDNYIRSFKQYSLRNPIVEQVSLETLRVVRDLWAELQKDGQTIDEIHLEMGRDLKNTAEERSRIFRRNSENEDTNFRIKLLLEEFYANEKDIKDVRPYSPSQQELLRIYEEGVWQREKEIPQDIKDIKKRISNDKDIKDITPNDIQRYRIWMDQKYCSPYTGKTIPLSRLFTTDYEIEHVIPRSRYFDDSYNNKVICEAAVNKDKNNRLGMEYIMAAGGKTIELGNGKNVQILKEEEYVELVDKIFGNNTRKRNIMLADEITEEFSHRQLNDTRYIARFMKGILSNIVREKNADGTLEPEETSKNLIVCSGRITDRVKQDWGLNDIWNHIITPRFERLNTKTSSNDFGEYVCKDGKRYFQTRVPLNLQKGFNKKRIDHRHHAMDAIAIACVNRNIVNYLNNAAANQTEREDLRRAVCIPERNGQTKRQLRSPWHCFARDAENALRQIVVSFKQNLRVATKATNSYECFDTASGKKIRKHQSNREHYAIRKPLHKDSVYGEVILPSIASVNLKKALLKADRILDKRLKDKIFELRKLYNYSNKQIEEHLTKVCINCLEWKNYDFKKIAVRILSNDADATHIVAIRKPLDETFDKEKIKTITDTGIQKILLNHLSRYADDPKKAFSPEGIEDMNANIASLNGGKQHLPIYKVRVSEKDNGGYFPIGQKGNRSKKYVTTAKETNLFFAVYADSNGKRSFKTIDLRTAIECKKQGLSVAPSVNEKGDKLLFTLSPNDLVYMPSEEEEANGFSIDNNLNKEQIYKMVSATYKQCFFIPHTVADFIYKNKEFNVLNKIELTEDRRSIKEHCVPLKVNRLGK

SEQ ID NO: 5056 - protein, 604 aa, synthetic construct
  REGION 1..604: note = Synthetic
LPEEFRRQIDFEHHPGQFIDGKEPLIAYHHDENGQRVFSYMCAFKEMLTDFRATQPELVRDGRRVPYDWTIYYLRHKALTQPVTKEELAWIILNFNTKRGYYQLRSESEEVTTNKNEEYAELEVVSVEKTGEDKKRAGYYWYTITYNNEAEQKITSTIPPRQIGDKVELIVTTARDKAGETKKSVRSPKEDDWTLMKKRTEHNIEEEECTVGSYIYQHILADPTVKVRGKLVHTIERKFYKKELKQILNKQKEFIPELQDTSLYEACIKELYRNNEAHIQSIANKDFTDLFVNDIIFYQRPLKSKKSTISNCPYESYYYKNKETGELIRKPIKCIAKSNPLYQEFRLWQFVHNLRIYKKSEEVSGRLQTDVDVTDRFLTTPDDYAKLFSWLNDRKEIKQKELLRYEAFGLSKSYGDYRWNFVEDKQYPCNETLHEINRRMKSILSDKKLSSEAYQQLWHILYSIDDPIEIRKALTSFAQNQKINSDDFVNAFYQYVPEKTKSYGAYSEKAIKKLLPLMRRGSYWAIGNIDEKTRRRLDNIINGVADDSISTCTREKLNNLTDITMCKVCHFGKPVTPSMIATRKLRTQQNGNNRMTSILILAQN

SEQ ID NO: 5057 - protein, 1561 aa, synthetic construct
  REGION 1..1561: note = Synthetic
LYSSHHVAANSTYPFKTGHNRTPLNRFTTHKTQPYNIMTKNTRNIIGLDLGTNSIGWSWIQQLISPTSTQPSEYLFDGTPIIRMSGSRIIPMPGDVTGSFERGETISKTKDRTAKRMARRMNERFQLRRERLNRVLNIMGFLPEHYARALDRYGKLNEESNTTIAWRSKEDGKNEFIFYPSFLEMASIFKERHPDIQRIPLDWTLYYLRSKALHQAITKEELSWVLHSFNQKRGYYQPRKDITEKEKTKKIEYIKDIVRSVEDTGEKTKGKKAYKVTFDNGFKFISTEAEAPLWVGRTREVIVTTSLDATGAPKRDKEGDIIQSVKAPEEKDWTLKKIRTENHIDKSKLTVGEYILQTLLEKPDTKIKGAHVSTIDRRFYIHEINAILKVQEKYHKELRDKSLYEQCTQALYTQNEVRRNIIAPWSMSDLLIKDILFYHRPLKSKKSQISECPFEFHNYTDKNGASHRQGIKCIPTSHPLFQEYRIWQFIANLRIYERERFDNGKHLINENKTSEFLTSEKKEELFEWLAEKDSVSQKTLLGHIGLKVEHYHWNFPEEKTYPCGETRHLIQSRLKKANLLKSFCSLVPENQKKEFELKLWHILYSVSDYNELRKALETFARKTGFTREEQDLFVEFFSSCPPFKKVYGAYSKRAIARLLPLMRLGKYWHEEHIDSATMNRIEHLISGEECNGIDVRVRENIAKFGLNESIEQYQGLPQWLACYVVYNRHSEASEVTKWESPEELDNYIKAFKQYSLRNPIVEQISLETLRVVHDLWAEIQKEGQTIDEIHLEMGRDLKNTAEERSRIFRRNSENEDTNFRIKLLLEEFYTNEEDMEGIRPYSPSQQELLRIYEEGVWQQEKEIPQDIKDIKKKLSSDKDINEITHSDVQRYRIWMDQKYCSPYTGNPIPLSRLFTPDYEIEHVIPRSRYFDDSYNNKVICEAAVNKDKNNRLGMEYIMEAGGKTIELGNGKNVQVLKEREYVELVNEVFKNNTRKRNILLADEIPEDFSHRQLNDTRYIARFMKGILSNIVREKNADGTLELEETSKNLIVCSGRITDRIKQDWGLNDVWNHIITPRFERLNQKTSSDNFGEYVCKEGKRYFQTRVPLNLQKGFNKKRIDHRHHAMDAIAIACVNRSIVNYLNNAAANQTEREDLRRAVCIPERNGQTKRQLRSPWRNFAKDAENALRQIVVSFKQNLRILTKATNSYECFDTTSGKKIRRHQVNEEHYAVRKPLHEDFVYGEVILSSIASVNFKKALQKANRILDKRLKDKIFELRKLYSYSNKQIEEHLTKVCINTPEWKDYDFKKINIRILSNDEGATHIVAIRKPLDESFDKVKINTITDTGIQKILLNHLSRYAEDPKKAFSLEGIEDMNANITSLNGGKQHLPIYKVRVSEKDNGGYYPIGQKGNRSKKYVTTAKDTNLFFAVYADSNGKRSFKTIDLRTAIECKKQGLSVAPSVNEKGEQLLFTLSPNDLVYMPSEEEEANGFAIDNNLNKEHIYKMVSTDSNRCFFIPHTVADFISRGEEYNRHNKIELTEDRRSIKEHCVPLKVNRLGKKTL

SEQ ID NO: 5058 - protein, 552 aa, synthetic construct
  REGION 1..552: note = Synthetic
LYAACIEELYPINEAHRNNVGNRDFTYLFLEDILFYQRPLKSKKSLIDNCPYEENQGLDKETGEIKSFPVKCIAKSHPLFQEFRLWQFIINLRIYRKDLAQDVDVTNELLKTEEDYVALFDWLNGKKEIDQKAFLKYPVFGLKKEIENYRWNYVQDKPYPCNETRSLMLARLEKCDISIEFLTKENEEALWHILYSVEDKNEIVKALQKFADKHDLNASFVDVFQKFPPFKKEYGSYSAKAIKKLLPLMRMGKYWSENSIDKGTRERIDKIITGEYDEKIENRVREKAIHLADVSDFKGLPLWLVCYIVYGRHSEAKEIIQWKSPADIDSYLRSFKQHSLRNPIVEQIIIETLRVVRDIWKQVGNIDEIHVELGREMKNPADKRKKMTQQMSENENTNLRIKYLLTEFLNPEYEVENVRPYSPSQQDILRIYEEGVLNSVSDLPEEISDILKKFTETDLKKRPSRSEVLRYKLWLEQKYRSPYTGEVIPLGKLFTPAYEIEHVIPQSCYFDDSFSNKVICEAEVNKLKSNLLGHEFIVKHHGEIVELPFGKK

SEQ ID NO: 5059 - protein, 800 aa, synthetic construct
  REGION 782..785: note = misc_feature - Xaa can be any naturally occurring amino acid
  REGION 1..800: note = Synthetic
MKKILGLDIGTNSIGSALVSIDENPSNSKLVYSGCRIIPMPDDQIQNFNKGSVESAASARTGFRSMRRCNERHILRRQRLHKVLNELGFLPEHYVAKIDFSNGKSDFLKDEEPKIAWQPTADGKYRFLFMDSYAEMVALIKAKHPDFGKIPLDWTVFYLRKKALTQKISKEELAWILLHFNTKRGYYQRGADEEDDNKTYECLTVKDVEKADVDRRGDQWYNVTFENSDLVYPTKSAEIRNLIGQEIELIVTREPQKDGTIKVSFPKPSKKDWVLKKKRTESLIENGKTTVGEFILNALITNPHTKIRGKLIATIERKYYRSELEKILQSQKEYHPELSDRSLYQRCVKLLYAKNESHRSNIISRDFTYLFVNDIIFYHRPLKSKKSLIDNCPFEENRVGEKAFPVKCVAKSNPFYQEFRLWQFISNLKIYRRVDDCDVTGEYLASPADYAELFDFLNDKKEISQNQIFKCGIFGRGVSSKNFYWNYADDDKKKFPCNETRALIVNALNKAGVADIEKLDLPADKSGETTWLYRLWHLIYSVTDKEQYEKGLASFADKFLSDSDKKDAFVESFAKIEPFKNDYGAYSEKAIKRLLPLMRCGKYWDFDKIDSATKSRIANIINGVDDESVSEKVREECKKNGLGEEANFQLLRPYLATYIVYNRHAEAKSTDKWETPDELDNFIRSFRNGSMRNPVVEKVILETLRVVRDIWRKYGKIDEIHVELGREMKLPKDKRERIFKQNLDNEQTNLRIKALLTEFLNPELEIEGVRPFSPNHQERLNXXXXLPKFLALSKSSLKAT

SEQ ID NO: 5060 - protein, 653 aa, synthetic construct
  REGION 1..653: note = Synthetic
MKKILGLDLGTNSIGWAVVCHSDTDGQTERKWIEMAGSRIIPMDAAILGDFDKGNSKSQTSERTGFRGIRRLRERVLLRRERLHKVLKLIGFLPQHYIDSLDFSNHSGKFQLGTEVKLPWRKNEIGKYEFLFQNSFNEMLADFAKKQPELVAMGRKVPYDWTIYYLRKKALSEKITKEELAWILLNFNQKRGYYQLRGEEEEEKKNRLEDFYALKVVEVEQTDDKKGKDIWYNVHLENGWIYRRSSNVPLDWKDKIKEFIVTTELNEDGTPKVDKDGCVKRSFRMPKEDDWKLLKKKTEADIERSHKTIGCYIYDTLLQSPQQKIKGKLVRTIERKFYKDELKLILDKQQAFHPELQDRELYKACLDVLYPMNVAHKNNVANRGFVYLFMEDILFYQRPLKSKKSLIDNCPYEENQYIDVTTGEIKKAPIKCIAKSHPLYQEFRLWQFIANIRIYQKEKKVDGKLLTDIDVTTEYLSSKDDYVALYEWLCVRKEIEQKTFLKYPAFGLKKEIENYRWNYVEGKSYPCNETRSLILHYLEKAGISSTFLSTKIEESLWHILYSVEDRIELETALRTFASKYQLSCNFVEVFKKFPPFKKEYGAYSAKAIKRLLPLMRMGKYWKVDAIDGNTAERIEKILSGECDEKILKRSSIN

SEQ ID NO: 5061 - protein, 787 aa, synthetic construct
  REGION 1..787: note = Synthetic
VRDLWAELQKEGQTIDEIHLEMGRDLKNTAEERSRIFRRNSENEDTNFRIKLLLEEFYANEKDIKDVRPYSPSQQELLRIYEEGVWQQEKDIPQDIKDIKKRISNDKDIKDITPNDIQRYRIWMDQKYCSPYTGKTIPLSRLFTTDYEIEHVIPRSRYFDDSYNNKVICEAAVNKDKNNRLGMEYIMAAGGKTIELGNGKNVQILKKEEYVELVDKIFGNNTRKRNIMLADEITEDFNHRQLNDTRYIARFMKGILSNIVREKNADGTLEPEETSKNLIVCSGRITDRVKQDWGLNDIWNHIITPRFERLNTKTSSNDFGEYVCKDGKRYFQTRVPLNLQKGFNKKRIDHRHHAMDAIAIACVNRSIVNYLNNAAANQTEREDLRRVVCIPERNGQTKRQLRSPWHCFARDAENALRQIVVSFKQNLRVATKATNSYECFDTASGKKIRKHQSNREHYAIRKPLHKDSVYGEVILTSIASVNLKKALLKADRILDKRLKEKIFELRKLYNYSNKQIEEHLTKVCINCPEWKNYDFKKIAVRILSNDADATHIVAIRKPLDESFDKIKINTITDTGIQKILLNHLSRYADDPKKAFSPEGIEDMNANIASLNGGKQHLPIYKVRVSEKDNGGYFPIGQKGNRPKKYVTTAKDTNLFFAVYVDSKGKRSYKTIDLRTAIECKKQGLSVAPSVNEKGDKLLFTLSPNDLVYMPSEEEEANGFSIKGNLIKEHIYKMVSANDNRCFFIPHTVADFISNGEEYNRHNKIELTEDRRSIKEHCVPLKVDRLGK

SEQ ID NO: 5062 - protein, 689 aa, synthetic construct
  REGION 1..689: note = Synthetic
MKKILGLDLGTNSIGWALTNNDFDNKLGNIEGLGSRIIPMSQDVLGKFDSGVSISQTAERTKYRGTRRLVQRFLLRRERLHRVLNVLDFLPQHYAEAIDFEKKFGQFKPEKEEKLSFYKNENGKNQFIFLDSHQEMLAEFQLINTDLKQVPYDWTIYYLRKKALTQKISKEELAWILLNFNQKRGYYQLRGEEQEDNKNKLEEFHTLTVVDVIEREKGKSGIWYNVILENGWIYKRESKIALFDWIGKQKNFIVTTELNDDGTVKLNKDNEEKRSFRSPKEDDWGLVKIRTEQTINQSEKSVGTFIYDALLKNPNQKIKGELVRTIERKFYKDELSKILKAQIAFHHEIFGDRNLYKKCIDELYRHNDSHKNNIKDKSFEYLFLEDIIFFQRPLKSKTSLISDCSLEFVPIKDENGILVKDDNGKQVVKPLKCIAKSNPIFQEFRLLQFVKNLKIYKKEIVNDVDVTHDFIKTEEDLVELFNFLNDRKEIDQISLIKHLLRPLKLKGKLLDAEVAKLRWNFVEDKIYPCNETRNQFLNAVAKIDVDKSFFDAKNTQDLWHILYSVTDKIEITKAITTFAKKHNLPDEFITNFSKLKPYKKDYGSFSEKAIKKLLPLMRFGSYWKESNIDIKTLARIDKIQTGEFDENMRTRVREKAIHLSKTTDFQGLPLWLASYIIYDRHSEASDVSK

SEQ ID NO: 5063 - protein, 606 aa, synthetic construct
  REGION 1..606: note = Synthetic
MYSKSHPLYQEFRLWQFIVNLRIYRKETDVDVTQELLPTEADYVTLFEWLNEKKEIDQKAFFKYPPFGFKKTTSNYRWNYVEDKPYPCNETHAQIIARLGKAHIPKAFLSKEKEETLWHILYSIEDKQEIEKALHSFANKNNLSEEFIEQFKNFPPFKKEYGSYSAKAIKKLLPLMRMGKYWSIENIDNGTRIRINKIIDGEYDENIRERVRQKAINLTDITHFRALPLWLACYLVYDRHSEVKDIVKWKTPKDIDLYLKSFKQHSLRNPIVEQVITETLRTVRDIWQQVGHIDEIHIELGREMKNPADKRARMSQQMIKNENTNLRIKALLTEFLNPEFGIENVRPYSPSQQDLLRIYEEGVLNSILELPEDIGIILGKFNQTDTLKRPTRSEILRYKLWLEQKYRSPYTGEMIPLSKLFTPAYEIEHIIPQSRYFDDSLSNKVICESEINKLKDRSLGYEFIKNHHGEKVELAFDKPVEVLSVEAYEKLVHESYSHNRSKMKKLLMEDIPDQFIERQLNDSRYISKVVKSLLSNIVREENEQEAISKNVIPCTGGITDRLKKDWGINDVWNKIVLPRFIRLNELTESTRFTSINTNNTISPPCP

SEQ ID NO: 5064 - protein, 704 aa, synthetic construct
  REGION 1..704: note = Synthetic
MKNILGLDLGTNSIGWAVVNGSVNDNGSEQVVKIQASGSRIIPMDAAMIGDFNKGNSISQTAERTRLRGIRRLSERYLLRRERLHRILDILGFLPSHFAQDLDRHGKIVKGKEPKLAWRKNEAGQFEFIFQDSFKEMLEDFKLNHPNLITDDKKVPYDWTIYYLRKKGLTSKISKEELAWILLNFNQKRGYYQLRGEEEEENNNKLVEFYALKVVAVEDSGEKKGKDIWYNVHLENGWVYRRTSNIPLDWVGKTKEFIVTTDLEKDGTPKKDREGNVKRSFRAPKEDDWSLVKKKTEADIDQTHKTVGTYIYDTLLGNPSQKIRGRLVRTIERKYYKEELKLILDKQKEFHPELQDRALYAACVEELYTINEAHRNNIGNRDFTYLFLEDILFYQRPLKSKKSLIDNCPYEENHCLDKETGEIKSFPVKCIAKSHPLFQEFRLWQFIVNLRIYRKGLAQDVDVTNELLKTEEDYVALFDWLNGKKEIDQKAFLKYPLFGLKKEVENYRWNYVQDKPYPCNETRSSMLARLEKCDISIEFLTKENEEALWHILYSVEDKNEIVKALQKFADKHDLNASFVDVFRKFPPFKKEYGSYSAKAIKKLLPLMRMGKYWSENSIDKGTRERIDKIITGEYDEKIENRVREKAIHLVDVSDFRGLPLWLVCYIVYGRHSESKEMVLIYISTLENHRKAGVGKSPNQSFLFI

SEQ ID NO: 5065 - protein, 1533 aa, synthetic construct
  REGION 1..1533: note = Synthetic
MKKKNILGLDLGTNSIGWAWLQQDDTEQTIQTEYLLQNNPTIRMSGSRIIPTSGDVINDFEAGKAVSKTKDRTTFRMTRRMNERFKLRRERLNRVLRILGMLPAHYAQHVDRYGKPDEEKQPKIAWEVAPDGKSNFLFHQSFLEMVKLFGVHQPQLQRIPLDWTLYYLRHKALTQPISKAELAWILHSFNQKRGYNQTRDELTEVNEKEKLEYTNSKVVSVKLIEQKKSPLYLVTFENGVAVETSKVDAPQWVGQMRYAIITTKLNDLGQPLHKKDGSIDQKVSLPNDDDWALNKLRTETQIDQSHTTVGNYIFQTLLKNPETKIKGAHVCTIDRRFYEDELNAILLKQAEFHPELTNRNLYEACLMALYANNEAHRYNLATQNTCNLITKDIIFYQRPLKSKKSLIAECPFEKRIFCDVEGNVQMQGIKCIPVSHPHFQEYRLWQFLNNLRIFQREVVEDGKFTMNVDVTDKYINENSLTLLFEWLQDKVTIKQKELLAKLRLKESDFRWNYVEDKAYPCGETRHVLASRLKKLKGITNDFLAQPSLNGKATVECELWHILYSVTNLAELRKALYTFARKHNFSVVDAEAFVKVFIACPPFKKDYGAYSDKAICKLLSVMRVGKYWSAENIDSTTLLRIEHLITGEEDEHINERTRKHITEKGLQQSVNQYQGLQQWLACYVVYGRHAEVAEIVRWESPTELEQYINNFKQYSLRNPIVEQVSLETLRVVRDLWQTVAKEGGRIDEIHLEMGRDLKNSAAERAKISNRNKQNEGTNFRIKLLLQEFSQYEKDIEGIRPYSPSQQELLRIYEEGVCEQTEMPKDIAKIRRELSSSSSEKDVKRSDIQRYRLWLDQKYCSPYTGQPIPLARLFTTDYEIEHVIPRSKYFDDSYNNKVICEAAVNKAKSNRLGMAFIQESGGQIIPLGNGRNVQVLNESAYVEFINKTFKHNARKRSLMLADEITEEFCNRQLTDTRYIARFMMGVLSNIVRQNDNGVLESEAISKNLIVCNGKITNRVKQDWGLNDVWNHIVTPRFKRLNQITNSSDFGEWCNKEGKRYFQTRIPLELQKGVNKKRIDHRHHAMDAIAIACTTRSLVNYLNNQSAHTKAREDYRQRLCRTDGHGQTKRLLRAPWKDFAKDAESALQQIVVSFKQNTRILTHATNSYECFDAKAGKKIIKRQISQNHYAIRKPLHKDTVYGEVVLPSIKLISLNKALSNPRRIIDKQLRSKILELQQRDKLTKKQVCDFFKKTCANSTEWRNYDFAKVAVRVWSNDEEGSRMVSVRKAIDESFDMKQIEKVYDPIVRNILTRHLKACNGDSKIAFSPQGVEEMNQHIAELNNGNAHLPIYKVKLGESKGEKFAIGQKGCKATKFVVTAKDTNLFFAVYANEEGKRSYQSVDLRTAIELKKQGCPVAPETNEKGDKLLFILSPNSLVYMPTEEEMERGNIDVQNLNLNQIFKMVSSTGNECYFVPNTLSQVIFPNKEYESMNKVGTVKEWDGYSISESKNNKKFLSIKACCIPLCIDRLGRIQLKK

SEQ ID NO: 5066 - protein, 1121 aa, synthetic construct
  REGION 1..1121: note = Synthetic
MFSQRNNPYCELLSISKGKVNKYFSESKAFSQEIHYICKCFYTEGCFRIPGRPVQQLIFKKTTRCYGLLTHKQLCILYSSHHVAANSTYPFKTGHNRTPLNRFTTHKTQPYNIMTKNTRNIIGLDLGTNSIGWSWIQQLISPTPTQPSEYLFNGTPIIRMSGSRIIPMPGDVTGSFERGETISKTKDRTAKRMARRMNERFQLRRERLNRVLNIMGFLPEHYARALDRYGKLNEESNTTIAWRSKEDGKNEFIFYPSFLEMASIFKERHPDIQRIPLDWTLYYLRSKALHQAITKEELSWVLHSFNQKRGYYQSREDITEEDKTKKVEYIKGVVNSVEDTGEKAKGKKIYKVTFADGTEFTSTKSEAPLWIGRTREIIVTTSLDTSGKPKLDKEGKIIQSAKTPDEKDWTLIKIRTEATIDDSKLTVGEYIFHALLKNPETKIKGAHVSTIDRRFYINEINAILKEQEKYHEELRDKSLYEQCTQALYAQNEVRRNIIAPWSMSDLLIKDILFYHRPLKSKKSQISECPLEFHCYTDKDGETHRQGIKCIPVSHPLFQEYRIWQFISNLRIYEREHFDNGKHFTNVDKTSEFLTSEKKEELYEWLAEKDSVSQKTLLGKIGLKVEDYHWNFPEEKTYPCGETRHLIQSRLKKANLQKAFHSLISDEQKDCFERGLWHILYSVSDYNELCKALKTFARKTGFTLEEQLLFVEAFSSCPPFKKDYGAYSKRAITKLLPLMRIGKFWHEESIDSTTKNRIEHLISGEECSSIDVRVREKVAKAGLCESIEQYQGLQQWLANYVVYNRHSEASEITKWESPDELDNYIRSFKQYSLRNPIVEQVSLETLRVVRDLWAELQKEGQTIDEIHLEMGRDLKNTAEERSRIFRRNSENEDTNFRIKLLLEEFYANEKDIKDVRPYSPSQQELLRIYEEGVWQQEKDIPQDIKDIKKRISNDKDIKDITPNDIQRYRIWMDQKYCSPYTGKTIPLSRLFTTDYEIEHVIPRSRYFDDSYNNKVICEAAVNKDKNNRLGMEYIMAAGGKTIELSNGKNVQILKEEEYVELIDKIFGNNTRKRNIMLADEITEEFSHRQLNDTRYIARFMKGILSNIVREKNADGTLEPEET

SEQ ID NO: 5067 - protein, 509 aa, synthetic construct
  REGION 1..509: note = Synthetic
MKNILGLDLGSNSIGWAIVKALKNEDGKEILQSIDLAGSRIIPMDQATLGNFENGNSVSQTRERTGYRSARRLRERYLLRRERLLRVLNCMGFLPEHYSQNIDKYGKFFLDNEVKLSWKKDKMGKNEFIFLDSFNEMLEDFRHSQPQLLLDGRKVPYDWTIYYLRKKALTEKISKEELAWILLNFNQKRGYFQLRGEDEEVQGKKIEFYALKVVRVEDTGEKKGKDTWYNVYLESGLGDTDDYWVYRRASSVPIDEWEGQVKEFIVTTTLDNNGSPQIDKEGKVKRSFSIPKPEDWMLVKKKTEVDIKSSGKTVGTYIYDTLLQKPDQKIKGKLIRTIERENYTNELSLILENQKKFHLELQDRELYHQCIELLYYKNEAHKRVIGTWDFTSLFIKDILFYQRPLKSKKALIDNCPYEESFYIENGEKKSKPRKCIAKSHPLFQEFRIWQFISNLRIYQKVKEVDGKLQFNVDVTSDFLRDESAYVELFKWLNERACTMTQTVLLLPLK

SEQ ID NO: 5068 - protein, 620 aa, synthetic construct
  REGION 541..618: note = misc_feature - Xaa can be any naturally occurring amino acid
  REGION 1..620: note = Synthetic
MKNILGLDLGTNSIGWAVVGSVTDAAEKEILAGIKGCGSRIIPMDASQLSDFAKGNTVSQTADRRSKRTARRMNERFILRRERLHRVLNLMGFLPEHYAASLDRYGKFIDADDHKIAWRTNSDGRQEFVYRQAFNEMYEEFKSKNPEFLKNGGKIPYDWTIYYLRKKALYSPITKEELSWILLNANQKRGYNQLMGMDEQQEQEDRSKSVEYLSSTIVEVTDSGDKKGKATWWNCKLDNGMVYKRPSEVKPDWEGKTKEFIITTDLDKDGKPKLNKYGEIQRSFRMPGENDWTLIKTRTEDQVNKSGEFVGEYIFNALLKEPTQKIRGKLVRTIDREFYRAELKAILGKQVGFIKELTDRDLYRQCIEELYPSNDGYRNSIASRDFIYLLADDIILYQRPLKTKKSLIDNCPYESHIYTDKETGEVKTAPVKCIAKSQPLYQEFRLWQFVQNLRIYDNFSGEDETSFVIPTEAKRVEVFKYLNDISSTNQESFFKEFLGVKKPKGKDSKLPYVWNYVEGKDYPCNETRGPILSRLKKSGIXXXXXXXXXXXXXXXXXXXXXXXXXXXXXXXXXXXXXXXXXXXXXXXXXXXXXXXXXXXXXXXXXXXXXXXXXXXXXXKT

SEQ ID NO: 5069 - protein, 723 aa, synthetic construct
  REGION 1..723: note = Synthetic
MKKILGLDLGTNSIGWAVVNSENDENGDEKIKCIEAAGSRIIPMDAATLGDFAKGNTKSQTKERTDARGIRRLHERHLLRRERLNRVLSVMGFLPEHYDNALTRYGKFKDDKECKIAWKRNDDGKWTFIFMDSFNEMLSDFAACQPDWLAGGKKVPYDWTIYYLRKKALSRALTKQELAWLLLNFNQKRGYYQLRGEDEQSDDKGKLVEYYAVKVVDVKDTGEKKGKDTWFDVILENGMVYHRPAAEAPDWIGKTKEFIVTTDVEKDGTPKKDKDGNIKRSFRMPKEDDWTLIKKKTESDIDSSGKTVGEYIYDSLLADPTQKIKGKLVRTVERKYYKSELKRILDSQKRFIPELNDRTLYTACIEELYESNDAYRQSIASYDFTYLFVDNIIFYQRPLKSKKSLIDNCPYESRSYVDKETGEVKTAPVKCVAKSNPLFQEFRLWQFISNIRIYERQKIVDGHLKADVDVTGEFIKDEDDVVRLFDFLNDRKEIKQDTLLSTYFKVKKPKGKDSSYPYRWNYVEDKTYPCNETRALMLKGLKDAGVDEAFLDKTNEYRLWHILYSVDDKQEIKKAMATFVVKYNKDEENKRKDKNNKAITLDDRFVEAFSALPPFKKEYGSYSEKAIRRLLPLMRMGKYWNVEAIDASTRVRINNIIDGVEVYHSSFTEEQIKFLDKYCKDNNLLMSGGSDCHGEKKADRKIGVGYGKLNISKEILKAWTNKN

SEQ ID NO: 5070 - protein, 843 aa, synthetic construct
  REGION 1..843: note = Synthetic
MKKILGLDLGTNSVGWAVINSVVNDEGKEQLVNISSCGSRIIPMDAATLGDFDKGNSKSPVAERTRLRGVRRLLERSLLRRQRLHRVLSVMGFLPEHYASQLDRYGKFLPEREPKLAWYQDETGKYRFLFQDSFNEMLEDFRQHYPELVAEGKKIPYDWTIYYLRKKALSQKITKEELAWILLNFNQKRGYYQLRGEEEKEDNKKSVEYYALKVVSVEDSGDRKGKDIWYNVKLENGWVYRRASSVPLDWVGKIKEFIVTTDLDEKGNPKKDKDGNVKRSFRAPKEDDWGLLKTRTQAQIDESGQTVGTYIYESLLRMPDQKIRGKLVRTIERKYYKDELRKILVKQSEFHAALQDHNLLLACIEELYPNNEAHRRLLSTSDFIYFLVEDILFYQRPLKSQKGLIDDCPYESHVYRDKKNGSLQHVPLKCVSKSHPLFQEFRLWQFLASLRIYQRERQVDGSLKLDVDVTNEFLQGEDDYVKLFDWLNDRKDIDQKTFLAYKPFGLKKNELSQYRWNYVEDKSYPCNETRADMVSRLNKAGVPEEFLTREKEEALWHILYSISDKKELTKALGTFAEKNGLNETFVEIFSKMPPFESDYAAYSLKAIRKLLALMRMGKYWDEQAIDEQTRSRIEKILTGEYDETIRTRVREKAMHLTDMSSFRGLPLWLACYVVYDRHSEAKELVKWETPDDIDHFLRKFKQHSLRNPIVEQVIMETLRTVRDIWRQEGRIDEIHVELGREMKNPAKERARITAQILENENTNLRIKALLTDFMNPEFEIENVRPYSPAQQEILRIYEEGVLSGVAEKDLPDDIASILKKFREVHSRVFLHVSHPNVQEVQGE

SEQ ID NO: 5071 - protein, 786 aa, synthetic construct
  REGION 1..786: note = Synthetic
MKKIVGLDLGTNSIGWALINAYIDEYNKEHLYGIEACGSRIIPMDAAILGNFDKGNSISQTADRTSYRGIRRLRERHLLRRERLHRILDLLGFLPKHYSDSLNRYGKFLNDIECKLPWVKDETGSYKFIFQESFKEMLANFTEHHPILIANNKKVPYDWTIYYLRKKALTQKISKEELAWILLNFNQKRGYYQLRGEEEETPNKLVEYYSLKVEKVEDSGERKGKDTWYNVHLENGMIYRRTSNIPLDWEGKTKEFIVTTDLEADGSPKKDKEGNIKRSFRAPKDDDWTLIKKKTEADIDKIKMTVGAYIYDTLLQKPDQKIRGKLVRTIERKYYKNELYQILKTQSEFHEELRDKQLYIACLNELYPNNEPRRNSISTRDFCHLFIEDIIFYQRPLKSKKSLIDNCPYEENRYIDKESGEIKHASIKCIAKSHPLYQEFRLWQFIVNLRIYRKETDVDVTQELLPTEADYVTLFEWLNEKKEIDQKAFFKYPPFGFKKTTSNYRWNYVEDKPYPCNETHAQIIARLGKAHIPKAFLSKEKEETLWHILYSIEDKQEIEKALHSFANKNNLSEEFIEQFKNFPPFKKEYGSYSAKAIKKLLPLMRMGKYWSIENIDNGTRIRINKIIDGEYDENIRERVRQKAINLTDITHFRALPLWLACYLVYDRHSEVKDIVKWKTPKDIDLYLKSFKQHSLRNPIVEQVITETLRTVRDIWQQVGHIDEIHIELGREMKNPADKRARMSQQMIKNENTNLRIKALLTEFLNPEFGIECTSIFPQPAGFIAYL

SEQ ID NO: 5072 - protein, 1547 aa, synthetic construct
  REGION 1..1547: note = Synthetic
MEEGKMKNILGLDLGTNSIGWAWIQSKVPQQTDDCPSSSEYLMPDCATIRMAGSRVLPMDGKMLSGFESGLAVSKTKERTTYRMARRVNERFQLRRERLNRVLRILGFLPAHYAACLDRYGKIDEEKNVTIPWEPTADGKRKFLFYASFLEMKERFHEHHPNLEKIPLDWTLYYLRTKALQQAITKEELAWVLHSFNQKRGYNQSRDEVKDEDASQKEEYVKVKVVSVVDSGEKKKGKTSYIVTTESNLQFTTENAAAPSWLDKEREFIVTTKLNPTGLPKMNQEGRIDCTVRIPKEEDWELKKKRTEALIADSHMTVGEYIFHSLLDNPDAKIKGAKVGTIDRHFYKEELIAILKKQAAFHPELKDEERYAECVSALYASNEMHRNILSAWDMPRLIVNDIIFYQRPLKSKKSDIAECPFESRYFMDKEKKLQKQGIKCIPTSHPHFQEYRIWQFLSNLRVLRREVWENGRYMTDVDVSAHYLTDKVKVELYEWLAGKANVKQKELLSKLRMSEKEFRWNYVEDNIYPCGETRSLLSTRLKKAKLPLSLLDSPSSDGSHTFEFELWHILYSVSDLAELRKALRRFARKHDFTAEQQEAFVETFVKCPPFKKDYGAYSDKALVKLLSLMRIGKYWNADRIDANTRRRIACLLDGEACDSISLRTREKVAERGLQQSIEQFQGLPQSLACYVVYDRHAEASEVVRWESPADLQQFTRQFKQYSLRNPIVEQVVLETLRVVHDLWEEIQKDGGTIDEIHLEMGRDLKNTAEQRARIMRRNRENEMTNFRIKLLLQELHDCQPDIEGIRPYSPSQQELLRLYEETVWESEIGKSGGKEASKDIPDDIKKIRDLLSKPSDKPIPQSTIQRYRLWLDQKYLSPYTGRPIPLARLFTADYEIEHIIPRSIFFDDSYANKVICESAVNKLKNNRLGMQFIREMDGRVETVKLGEGRETSILSVDGYVDLVNDLFRNNPRKRNNLLAEEITEDFCHRQLNDTRYIARYIKGILSNIVRQRAADGTLEQEATSKNLIVCTGQITDRVKQDWGLNDVWNHIITPRFERLNRMTGSNDYGEWCSKEGKRYFQTRVPLHLQIGFNKKRIDHRHHAMDAIAIACVNRNVVNYLNNAAAHATDRMDLRMRICRPSGNGQTKKEIRSPWKNFAHDAECALQAITVSFKQNVRIITKATNTYEGYDASGKKVRRCQTSLDHYSIRKPLHKDTVYGEVVLPVVNQVPLKKALLRVNRIVNGKLRTKIQEMQSSGLTDKQIVDFFMKTCADSPEWNSINFKKIEVRAYSNEEGQTRMAAIRTAIDESFSEKVIGSITDVSIQRILLNHLRECNGDSEEAFSPEGIETMNRKIVRLNGGKPHLPIYKVRLGEAMGKKFAVGQRGNKGKKFVITAKNTNLFFAVYANDEGKRSFETIDLHCALEMQKQGKDVAPSINEKGDKLLFVLSPNDLVYVPSESELQHDIDSEDLKLDHVFKVVSFSENRCCFVPHSISSPIAAGFEFNSLNKIEVVPRLGLFEQGKETVSIKNICLPIKMDRLGHLHLVKI

SEQ ID NO: 5073 - protein, 631 aa, synthetic construct
  REGION 1..631: note = Synthetic
VALFDWLNSRKEIDQKAFLRYPAFGLKKEINNYRWNYVEDKFYPCNETRHAILSRLEKAGIGIDFLSDEKETALWHILYSVSDKQEIEKALATFAVKNGLNESFVEVFKKFPPFKSEYGAYSAKAIKKLLPLMRCGKYWDMSLIDGTTKERIERIIAGECDESIGAKVREKAMNLSDISCFKRLPLWLACYVVYNRHSEDKEITKWETPADIDAYLAAFKQHSLRNPIVEQVITETLRVVRDIWKQVGKIDEIHIELGREMKNPADKRKRMTTQILENENANLRIKALLAEFVNPEYGVENVRPYSPSQQEILRIYEDAVLKGEEQIPEDIDVILKKFNTSKLPTKSEFLRYKLWLEQKYRSPYTGELIPLAKLFTAAYEIEHVIPQSRYFDDSFSNKVICESAVNKLKDNQLGYEFIKNHHGQKVEVGFGKTVEIFSVDSYERFVKEQYAKSGIKMKKLLMDDIPEQFIERQLNDSRYISKVVKGLLSNIVREKNDSGEYEPEAVSKNILVCTGNVTDRLKKDWGMNDVWNSIVSPRFERLNALTETQCFGHWENKDGKKVFQTAVPLEYQKGFSKKRIDHRHHAMDAIVIACATRNHVNYLNNESASRNAKISRYDLQRLLCDKSEGGW

SEQ ID NO: 5074 - protein, 859 aa, synthetic construct
  REGION 1..859: note = Synthetic
MRKILGLDLGTNSIGWAVVNTVEDENGNFIFNSISRANSRIIPMDQATIGDFNKGNSKSQTAERTRLRGVRRILERSHLRRERLNRVLSITGCLPYHYAKYLDKYGKLIKGTEPKIAWQTNESGKPEFIFKDSFQEMLEDFAANNPEVLQNGKKIPYDWTLYYLRKKALTQPVSKYELAWILMSFNQKRGYYQLRGEEEENPSKLEEYYSLKVVEVIETEEKKGKDSWFEIVLENGWIYRRTFSETPDWTGKIKDFIVTTALDSEGKPKLDKEGNIKRSFRIPNDDDWTLLKKKTEYDIDNSGKTVGAFIYDSLLRTPSAKIKGKLVRTVERKYYRKELEAILDTQIRLNPELQSEELYVKCIQALYPNNEAYRNSIADRGFKYLFVNDIIFYQRPLKSKKSLISDCPLEERIYLGSDGKKTAHIKCAPKSNPYFQEFRLWQFLSNLRIYERERNIDGSLKENIDVTAAFIPDLNALADLFDWLNDRESIDQKAILSYPGFHMDKASQKKYRWNYVEEKSYPANETRGSMLKSLKKTGVQADFLTPEKQYELWHILYSVEDKIEIRKALEKFAERNGLPEEFSDVFSKQLPYKKDYASYSEKALKRLLTLMRAGKYWSDEALDSQTKERIEKILSGEYDEKIAERVRQKAVELQSVSDFQGLPVWLACYVIYNRHSESKDIEKWSSPDDIDRYLKNFKQHSLRNPIVESVITETLRTVRDIWKAEGQIDEIHIELGREMKNPADKRKRITEQVLKNENTNLRIRAMLTEFMNPEFDIDNVRPNSPSQQEILRIYENSVLENTEIPDDIDAILKKFDSSDTAKRPTSKEVLKYKIWLEQKYRSPYTGQIIPLGKLFTSEY

SEQ ID NO: 5075 - protein, 500 aa, synthetic construct
  REGION 1..500: note = Synthetic
LFQEFRLWHFLSNIRVYQKEKEVNGTLHLDVDVTAEFLKTEDDYVAYPLFDWLNSRKEVDQKAFLRYPKFGLKKEINNYRWNYVEDKLYPCNETRYAILSRLEKLGVSLDFLSDEKETALWHILYSVSDKLEIEKALRTFAVKNGLNESFVEVFKKFPPFKPEYGSYSAKAIKKLLPLMRCGRYWDASLIDDATKDRIERIMTGEYDGNIAAKVREKAINLSDISCFKKLPLWLACYVVYNRHSENKEIAKWETPADIDAYLASFKQHSLRNPIVEQVIIETLRVVRDIWKQVGKIDEIHIELGREMKNPADKRKRMTAQIQENENANLRIKALLAEFMNPEYGVENVRPYSPSQQEILRIYEDTVLKGEEQIPEDIDVILKKFNNSKLPTKSEFLRYKLWLEQKYRSPYTGELIPLGKLFTAAYEIEHIIPQSRYFDDSFSNKVICESAVNKLKDNQLGYEFIKNHHGQKVEVGFGKTVEILSVDSYECFVKEQYLNRA

SEQ ID NO: 5076 - protein, 746 aa, synthetic construct
  REGION 1..746: note = Synthetic
MQTRKILGLDLGTNSIGWAVVNDNEESKSIASAGSRIIPMDAAQMGDFESGNSVSQTANRTAARGARRLYERRALRRERLNRVLSILGFLPPHYAKELNRYGQLNKGAEPKLAWSTENGKSVFLFQPSFVEMTREFAIAQPQLVANGKKIAYDWTIYYLRKKALTQPVTKHELAWILLQFNQKRGYNQARGEEDETKANEKKELKTLKVVEVRDTGEVSKGRMWYEVVLENGDIYKRQSAYPLDWVGKVKDFIVTTKLNEDGSEATDKDGKVKRSFSAPQEDDWGLRKIKTEHDIAQSGKTVGEFIYDALLHNPEQKILGQLVRVVDRKFYKEELRRILEIQKQFIPELQDADLYQQCIESLYPQNEAYRNSIANKDFTYLLLQDIIFYQRPVRSKKSLINECPYEFHIYKDKNGELRRRYLKCISKSHPLYEEFRLWQFVENLHIYKTAENGVSKSDCTAEYIPNKAELVKWLLTQKEITEHPLLSYLAGKKAKDISWNYVSDKKYPMAPVTATISSVLEEAGGKVSAEALVHIWHILYSVSDKEQLSQALSHYAEAHHLSSLFVEKLGKQKPFAAEYGAYSEKAIRKLLSLMRCGNYWKEESINDKTKERIEHLLTGEVDDNISDRVREKLKEMNHISDFQGLPLWLAEYVVYDVRKNDTKWETPEDIDNYLQSFRLHSLNNPIVEQVVMESLRTVRDIWKQEGHIDEIHIEMGRELKQNAEQRKNTLARQADNENANLRAKSL

SEQ ID NO: 5077 - protein, 540 aa, synthetic construct
  REGION 1..540: note = Synthetic
LKYFLLAKNPQIKDKAAKSELKKWLTTYRWNYVYDATDNSSKKYPMNETGYELQRYLQKVEGLPANFLTFDITYQLWHLLYSVKDKVEFEKALKKFANKNQLDETSFVESFKNFKPYPNEYGSFSEKAIKKLLPLMRFGNHWDFSCIDVSTQKRIDDLINGVANDEIRTIIREKAEKFQLNNEISFQGLPLWLAQYVVYNRHAEATNIEKWTSVSDLEAYLEDFKQHSLRNPIVEQVVTETLRVVKDIWQQYGGGQANFFDEIHIELGRELKNTSKERERLSKQNQENENTNLRIKKLLAELKEDASIQNVRPYSLVQHDLLKIYEEGVFSSTDEIDEDIQKIRKKAEPNKTELQRYKLWLEQKYRSPYTGEVISLTKLFTEEYEIEHIIPQSRYYDDSLSNEVICESAVNKLKTNQLGLEFIQNHHGEKVRIAGNKEVTIFTEEQYKEFVKKHYAGNSAKQQKLFLNEIPEKMVARQMNDTRYISKYISEILSKIVRSDEKDEGVNSKNVIPCTGKITTALKQDWGLNDVWNELILPRF

SEQ ID NO: 5078 - protein, 557 aa, synthetic construct
  REGION 1..557: note = Synthetic
MPDWKSQKKDIIAIIDLDKNGNDKYDENGELSRRFKIPTEQEWEEQWELIKTKTQKDLDTSHKTVGAYIYDTLLQTPSQKIRGKLIRTIERKYYKDELNQILKKQEEFHPELRDSNLLEACIEELYPNNEAHRNAIAKYSIAQLLIEDILFYQRPLKSKKSLISNCPYEEYTYINKETGEICTSPLKCIAKSHPLFKSFVYGNLYQTCEFIKGRNHKRKFTTDIDVTSQFLKTEDAYANLFDWLNQKKEIRQDTFLKNPAFGLKKNTANYRWNYVEDKTYPCNETHYKILSYWEKAGIEQSALTSEIEEKLWHILYSISDKNELRKALQHFADKNYLSDKFADTFQQIPPFEKDYGSYSAKAIKKLLPLMRIGRYWKAENFDSTTLDRIEKILTGEFEENIKNRTREKTIHLDNLYSFQGLPTWLACYIVYNRHSEIKDVTKWQQPSDIDAFLNAFKQHSLHNPIVEQIIMETLRTVRDIWKQTGHIDEIHVELGREMKNPAEKRRKLTQQIQENENTNLRIKHFLLNLPIQNWELRTYARTLQASKIYCVYMKKKL

SEQ ID NO: 5079 - protein, 855 aa, synthetic construct
  REGION 1..855: note = Synthetic
MRYILGLDLGTNSVGWAVVEAIIDEDGKEKLVKINSLGSRIIPMDAATLGDFNAGKTVSKTKNRTERRLMRRILQRKVLRRERLLRVLSLMNFLPKHYAQCLDRYGKIISDPEPKLAWVKEDGCYRFLFQESFSEMLSDFYGKNPELRASGKRIPYDWTIYYLRKKALTQKITKEELAWILLHFNQKRGYYQLRVEEDQQSKSKREDYYELKVISVEDTGEKKGKRSLYKITFENGWEFDYSSVLSPDWVGKTKSFIVTTELEKDGKEKTDDSGKIKRSFRAPKDDDWELLKKKAESGIEESHKTVGTYIYDALLQNPQQKIRAKLISTIDRKYYKDELNRILEKQKEFHTELNDRELYEACVDALYPNNLAHRDLLYKQCDFTDLLVEDILFYQRPLKSKKSLIDECPYESHVYKKAGKIERVPLKCIARSHPLYQEFRLWQFISNLRIYQRQKEVNGKLEVDADVTSQFLKSESDYVVLYEWLNSQKEIKQNALLKHLRLKSAEYRWNYVEDKEYPCNATHALLIERLGKAGVKSSFLNGETEESLWHLLYSISDLTELKKALQAFAGKHNLDVEPFVGAFLRVPPFEKRYGAYSAKAIKKLLPLMRMGKYWREEAIDSSTRVKITKIITGEYDAQISERVREKVGHLEDVADFCGFPLWKACYLVYGRHSEPNTAEQWKEPSDIDRYLKSFKQHSLRNPIVEQVIMEALRTVRDIWKQVGRIDEIHVELGREMKNPADRRAAMTKRILENENTNLRIKSLLYEFMNNPEWKMFILILRCSKKSFVFMRKAPWQRMRKEYRSIFCESLMRKMPRNVRQSRMWLGINYGWSSIIILPILGKGFLWQSCLRQLMR

SEQ ID NO: 5080 - protein, 562 aa, synthetic construct
  REGION 552..553: note = misc_feature - Xaa can be any naturally occurring amino acid
  REGION 1..562: note = Synthetic
MNERFILRRERLHRVLNLMGFLPEHYAASLDRYGKFIDADDHKIAWRTNSDGRQEFVYRQAFNEMYEEFKSKNPEFLKNGGKIPYDWTIYYLRKKALYSPITKEELSWILLNANQKRGYNQLMGMDEQQEQEDRSKSVEYLSSTIVEVTDSGDKKGKATWWNCKLDNGMVYKRPSEVKPDWEGKTKEFIITTDLDKDGKPKLNKYGEIQRSFRMPGENDWTLIKTRTEDQVNKSGEFVGEYIFNALLKEPTQKIRGKLVRTIDREFYRAELKAILGKQVGFIKELTDRDLYRQCIEELYPSNDGYRNSIASRDFIYLLADDIILYQRPLKTKKSLIDNCPYESHIYTDKETGEVKTAPVKCIAKSQPLYQEFRLWQFVQNLRIYDNFSGEDETSFVIPTEAKRVEVFKYLNDISSTNQESFFKEFLGVKKPKGKDSKLPYVWNYVEGKDYPCNETRGPILSRLKKSGIPSSFLTRDIENDLWLILYSSESRKELEEALRKFAGKHDLAETFVENFKKFPAFEKDYGAYSAKAIKKLLPLMRMGEFWSETAIXXMMSRPILKT

SEQ ID NO: 5081 - protein, 626 aa, synthetic construct
  REGION 1..626: note = Synthetic
MKKILGLDLGTNSIGWALIEKESKTGNGKILGLGSRIIPMTQDVLDKFSGGSPTETQTAVRTGFRGTRRLRERYLLRRERLHRMLNVLGFLPKHYAARIDFEKHFGQFIENSEPKLPWCETDERTVEFIFQQSFDEMLADFRETQPELLHKNRKGKPAKIPYDWTIYYLRKKALSEKIEKEELAWLILNFNQKRGYYQLRGEEEEENPNKSVEFHSLKIIDVIADEKPNNKGDIWYSLHLENGWIYRRSSKTPLFDWKDKVRDFIVTTDLDDNGNVKTDKEGDEKRSFRAPGEDDWTLLKKKTEADIEKSHKTVGAYIYDTLLQNPSQKIRGKLVRTIERKYYRYELRRILEKQREFHPELQDENLYNDCVRELYRQNEVHQTVLSKRDFTHLFVDDIIFYQRPLRGQKSSIGNCALEYIIYKKEGTEIKEYLKAIPKSNPYYQEFRTWQWLSNLSIYRKDNDVNVTAEFLNGREAYATLFEFLNERKEIEQKHLIKHLLECKGLRGKSLNLEIEKYRWNFVEDKKYPCNETHYDITRRLENVENLPHQFLTREIEQELWHLIYSVTDKVEFEKALKRFANRHKIDKISFVEAFKKFPPFKSEYGAYSEKTIKKLLPLMRQGKYWT

SEQ ID NO: 5082 - protein, 672 aa, synthetic construct
  REGION 1..672: note = Synthetic
MKNIVGLDLGTNSIGWAVVNGSVNDDGSEQLVKIQASGSRIIPMDAAMIGDFNKGNSISQTAERTRLRGIRRLSERYLLRRERLHRILDILGFLPFHFAQDLDRHGKIVKGKEPKLAWRKNEAGQFEFIFQDSFKEMLEDFKLNHPNLITDDKKVPYDWTIYYLRKKGLTSKISKEELAWILLNFNQKRGYYQLRGEEEEENNNKLVEFYALKVVAVEDSGEKKGKDIWYNVHLENGWVYRRTSNMSLDWVGKTKEFIVTTDLEKDGTPKKDKEGNVKRSFRAPKEDDWSLVKKKTEADIDQTHKTVGAYIYDTLLGNPSQKIRGRLVRTIERKYYKEELKLILEKQKEFHLELQDRALYAACIEELYPINEAHRNNVGNRDFTYLFLEDILFYQRPLKSKKSLIDNCPYEENQGLDKETGEIKSFPVKCIAKSHPLFQEFRLWQFIINLRIYRKDLAQDVDVTNELLKTEEDYVALFDWLNGKKEIDQKAFLKYPVFGLKKEIENYRWNYVQDKPYPCNETRSLMLARLEKCDISIEFLTKENEEALWHILYSVEDKNEIVKALQKFADKHDLNASFVDVFQKFPPFKKEYGSYSAKAIKKLLPLMRMGKYWSENSIDKGTRERIDKIITGEYDEKIENRVREKAIHLADVSDFKGLPLWLVCYNCLWSSL

SEQ ID NO: 5083 - protein, 825 aa, synthetic construct
  REGION 1..825: note = Synthetic
MKKTLGLDLGTNSIGWAVINSNIDSEGKEKLVGISSCGSRIIPMDAATLGDFGKGNTKSPVAERTRLRGIRRLLERSLLRRERLHRVLSVMGFLPEHYASQLDRYGKFLPETEPKLAWYKDDSGRYQFLFQKSFHEMLEDFRLHHPELVAGEKKIPYDWTIYYLRKKALSQEITKEELAWILLNFNQKRGYYQLRGEEEQEENNKSVEYHALKVVSVEDSGERKGKDIWYNVTLENGWVYRRASNIPLDWTGKVKEFVVTTELDDAGNPKKDKEGNVKRSFRAPKEDDWGLLKTRTQAQIDESGKTVGTYIYESLLCMPNQKIRGKLVRTIERKYYKDELRQILVKQSEFHAALQDHNLLLSCIEELYPNNEAHRRLLSASSFIYFLIEDILFYQRPLKSQKGLIDNCPYESHIYKDKKDGSLHHVPLKCVSKSHPLFQEFRLWQFLSNLRIYQRERMTDGSLKLDVDVTREFLPSEEDYVKLFDWLNERKEISQKLLLAYKPFGLKKNEQANYRWNYVEDKSYPCNETRAEIKSRLSKAGVPEEFLTEEKEEALWHILYSISDKKELTKALGTFAAKNGLNESFVEVFAKIPPFESNYAAYSLKAIRKLLALMRMGKYWNEQAIDRQTRDRIEKILTGEYDETIRSRVREKAMLLTDISSFRGLPLWLACYIVYDRHSESKELVKWETPADIDHFLSKFKQNSLRNPIVEQVITESLRTVRDIWKQEGKIDEIHVELGREMKNPAKERARITAQVQENENTNLRIKALLAEFMNPEFEIENVHPYSPGQQEILRIYEDGVLSGIAEKDLPDDITAILKKFREMI

SEQ ID NO: 5084 - protein, 663 aa, synthetic construct
  REGION 1..663: note = Synthetic
MKKILGLDLGPNSIGWAKVEVDDEGNYLRNIKLGSRIIPMTQDMLGDFDKGVKVSQTATRTDFRGNRRLIERHLLRRERLHRVLHALKFLPKHYEDAIGWDRNEPATYGKFVNNSEPKLAWERQEDGSMRFLFMESFNEMVADFAQNQPSLVSDGKKIPLDWTIYYLRKKALTQPIKKEELAWILLNFNQKRGYYQLRGEEEEDNLTKRKEYYKLKVVGVEADGAPKGGKTWYNIHLENGWTARCQSKIALDDWVGKVKEYIVTTEYEDDGKTPKCDKEGKVKRSFKSPEKDDWQLIKTRTEKFIDDSNKTVGAFIYDRLLEKPFDKIRGKYIRTIERKYYKNELREILREQAKYHEGLHSLEALKICAEELYKNNQQHREYLLKKDMTFLLLNDLIFYQRPLKSKKSLIADCPYEVYKYDDKLTGKKGQKKIKCIAKSNPYYQEFRLWQFIANLRLFSVTDGKEVTAEYLKTEEDYVRLFSFLNDRKDIKQETFLRSFLKLKKVPIGSEKIYPIRWNYIEDANKSYPCNATRHELLLAFDRADIPRELLDVEGREYRLWHLLYSIEAKEETESALRKLKANKAFGDLNIDDAFVNSFLKIKPFEKEYGAYSEKAIKKLLAVMRRGSLWKEADICEATKQNIAKILQNDIDEKLKKKIAIHFS

SEQ ID NO: 5085 - protein, 737 aa, synthetic construct
  REGION 1..737: note = Synthetic
MKTILGLDLGTNSVGWAVINSVIKEQAERIWIEMAGSRIIPMDAAVLGDFDKGNSISQTSERTRLRGARRLRERQLLRRERLHKVLNILGFLPNHYLEYIDFEKHPGKFLADAEPKLAWVKDEQGKYTFLFQAAFDEMLADFAIHQPSLVSGDKKIPYDWTIYYLRKKALTEMISKEELAWILLNFNQKRGYYQLRGEEEEDNAGKSVEFYALKVLTVEATDEKKGRDVWYNVHLENGWIYRRSSSVPLDWEGQVKEFIVTTDLNPDGTPKLDKYGEVKRSFRAPKEDDWMLIKKRTEADIANTHKTVGAYIYDTLLQKPQQKIIGKLVKTVERKLYRDELSLILQKQCAFHAELQDRALYARCVEALYPSNEVRRKNIANRDFVYLLMDDILFYQRPLKTKKSLIANCPYEENEYVDRETGEIKKAPLKCIAKSHPLFQEFRLWNFLSNIRIYQKEKEINGTLHLDVDVTAEFLKTEDDYVALFDWLNSRKEIEQKTFLKYPKFGLKKEISNYRWNYVEDKQYPCNETRHAILSSLEKANVCIDFLSNEKEVALWHILYSVSDKQEIEKALRTFAAKNGLDESFVEAFKKFPPFKSEYGAYSAKAIKKMLPLMRCGKYWDVSSIDDTTKERIKKIVTGEYDERISVKVRDKVMNLSDISCFRRLPLWLACYIVYNRHSEDKEAVKWESPADIDAYLASFKQHSLRNPIVEQVITETLRVVRDIWKQVGRNPYRVRT

SEQ ID NO: 5086 - protein, 590 aa, synthetic construct
  REGION 1..590: note = Synthetic
MKKVTVGLDLGTNSVGWSVINSIIAEQTEKIWLEMAGSRIIPMDAAILGDFDRGNSTSQTAERTRLRGIRRLRERCLLRRERLHKVLHILGFLPEHYSEQISWDKHPGQLMNLTEPKLAWKRSETGKYEFIFQSAFNEMLADFAQHQPTLVANSKKVPYDWTIYYLRKKALAEKVSKLELAWILLNFNQKRGYYQLRGEEEEEKSNKRVEYYALKVVRVEATDEKKGKDTWYNVHLENGWIYRRSSNVPLDWEGKIKEFIVTTDLNEDGSPKVDKQGEVKRSFRAPKEDDWTLIKKKTEADVADSRKTVGWYIYDILLQKPQQKIRGKLVRTIERKFYKEELKQILEKQSVFHTELHDRDLYKKCLECLYPKNDAHKRNIANRDFVYMFTEDILFYQRPLKSKKSLIDDCPYEKHEYVDKETGEIKHASLKCIAKSHPLFQEFRLWHFLSNIRIYQKERQQGDRLLTDVDVTSEFLNTEEDRVALFEWLNERKEIDQKNFLKYPQFNLKNKTANYRWNYVEDKMYPCNETRYLIKSRLDKAHVFSGDFILSTENEMALWHILYSVSDKVELEKALTTFATKHALDKVAFV

SEQ ID NO: 5087 - protein, 774 aa, synthetic construct
  REGION 1..774: note = Synthetic
MKRSFRAPKEDDWMLIKKRTEADITGTHKTIGSYIYDALLQEPQQKIIGKLVKTVERKFYKEELNFILQKQCAFHAELQDRDLYMRCIEALYPGNEVQRRNIANRDFIYLLIDDVLFYQRPLKTKKSLIANCPYEENEYVNRKTGEIKTAPLKCIAKSHPLFQEFRLWYFLSNIRVYQKEREVNGTLHLDVDVTTEFLKTEDDYVALFDWLNSRKEIDQKAFLRYPAFGLKKEINNYRWNYVEDKFYPCNETRHAILSRLEKAGIGIDFLSDEKETALWHILYSVSDKQEIEKALATFAVKNGLNESFVEVFKKFPPFKSEYGAYSAKAIKKLLPLMRCGKYWDMSLIDGTTKERIERIIAGECDESIGAKVREKAMNLSDISCFKRLPLWLACYVVYNRHSEDKEITKWETPADIDAYLAAFKQHSLRNPIVEQVITETLRVVRDIWKQVGKIDEIRIELGREMKNPADKRKRMTTQILENENANLRIKALLAEFVNPEYGVENVRPYSPSQQEILRIYEDAVLKGEEQIPEDIDVILKKFNTSKLPTKSEFLRYKLWLEQKYRSPYTGELIPLAKLFTAAYEIEHVIPQSRYFDDSFSNKVICESAVNKLKDNQLGYEFIKNHHGQKVEVGFGKTVEIFSVDSYERFVKEQYAKSGIKMKKLLMDDIPEQFIERQLNDSRYISKVVKGLLSNIVREKNDSGEYEPEAVSKNILVCTGSVTDRLKKDWGMNDVWNSIVSPRFERLNALRIKTEKKFFKQQCPLNIRKDSVRSV

SEQ ID NO: 5088 - protein, 764 aa, synthetic construct
  REGION 1..764: note = Synthetic
MKNIVGLDLGTNSIGWAVVNGSVNDDGSEQLVKIQASGSRIIPMDAAMIGDFNKGNSISQTAERTRLRGVRRLSERYLLRRERLHRILDILGFLPFHFAQDLDRHGKIVKGKEPKLAWRKNEAGQFEFIFQDSFKEMLEDFKLNHPNLITDDKKVPYDWTIYYLRKKGLTSKISKEELAWILLNFNQKRGYYQLRGEEEKKNDNVMIINSKVIDVVKAEKDKKYEKYWYNVLLENGLLYRAAFYNDISFWKGHTKEFVLKTIKLKSGGTKQELSFLPSFDEIEKMEKKQKDKMYFKIKLKTEADIDQAHKTVGTYIYDTLLGNPSQKIRGRLVRTIERKYYKEELKLILDKQKEFHPELQDRALYAACVEELYTINEAHRNNIGNRDFTYLFLEDILFYQRPLKSKKSLIDNCPYEENQGLDKETGEIKSFPVKCIAKSHPLFQEFRLWQFIINLRIYRKDLAQDVDVTNELLKTEEDYVALFDWLNGKKEIDQKAFLKYPVFGLKKEIENYRWNYVQDKPYPCNETRLLMLARLEKCDISIEFLTKENEEALWHILYSVEDKNEIVKALQKFADKHDLNASFVDVFRKFPPFKKEYGSYSAKAIKKLLPLMRMGKYWSEDSIDKGTRKRMDKIITGEYDEKIENRVREKVIHLADVSDFRGLPLWLVCYIVYGRHSEAKEITQWKSPADIDSYLKSFKQHSLRNPIVEQIIIETLRVVRDIWKQVGNIDEIHVELGREMKNPADKRKKMTIPTCVSNICSRNF

SEQ ID NO: 5089 - protein, 688 aa, synthetic construct
  REGION 1..688: note = Synthetic
MFFLGKNKILTTMKKILGLDLGTNSIGWALINVSQNDDGEESFENIAISGSRIIPMDQASIGDFNRGNTISQTKERTQHRGTRRLYERGHLRRERMNRVLSILNFLPEHYKICLDEYGKIKPDLEPKIAWKLNSCQHYEFLFMKSYNEMLQDFKKCHQTLLESGKNIPYDWTIYYLRKKALSLPVSKYELAWILLNFNQKRGYYQLRGEDVSENTQKAEEYYSLKVVDLIETGEKKGKDLWYNVVLENGFIYRRTFPEKPDWIGKVKDFIVTTDLEKDGKPKVDKEGNIKRSFRMPKEDDWGLLKKKTEADIDKTNKTIGEYIYDALLAEFECKVRGKLVGVVERKYYKAELARILEAQKKFIPELNDIGLYERCITALYPNNTAYRNSIASRDFTYLFVNDILFYQRPLKSKKYLINDCPMESRHYIDKGTGECVTIPLKCIAKSNPLFQEFRLWQFITNLRIYERERKIDDSIKENIDVTSQFLPNYTSYSKLYDWLNNKQSINQKTFLCYPEFGLPQSARDTYRWNYVEEKDYPCNETRSLMLKYLSKAGVPSEFLTSNTERELWHILYSVEDKIEIAKALSSFAKRHFLGDAFVEVFRRIPSFKKDYGAYSEKAIKKLLPLMRMGQYWKEDSIDSNTHERINMILTGEYDERIRVIKDYASATVLVACIFALIVCLFVLIRRIV

SEQ ID NO: 5090 - protein, 1095 aa, synthetic construct
  REGION 1..1095: note = Synthetic
MKWRLGLDMGTGSIGWAAVRLANKTPTELMDMGVRVFPDGREPAGDGRTGDPLNERRRTARQMRRQRDRRIRRKKTMLRYLIASGYLPAEKASRKTIERLDPYSLRNEAVSRLLRKEELARILMQLTGRRGFKSNRKEQVASQNKETAGMLAGIARLSATLGGKTLGQWMYKELKEKGVLRFRPETIKSKINYSFYPSREMYEKEFEAIRRIQESGHSKLDWDKLYRIIYFQRPLKRPARGTCLFYTDEERGYRALPSAHRFRILQEINNLKYFDEDNRLVDIAEHFKETLYNLLEKQKSLKFDQIRKEFSHIIGEPFTFLFNLEDIKRKELKGNTTSCDFRNEKYFGQQWDFLNWQTQDELVERLIIEDDETKIIELLEKYNLSADQKNNILKWTYPIGTTMLSARFMRECSDIMLNLFIPYHDAVAKMGMHHSDFEKKPIRSSLPYYGEILTSLTTKASGNQQDTEEIRYGRISNPTVHIALNQLRKLVNALIRRYGKPSEIIVEVGRNLKTNAKKKLEDFQAQALNQEKNEQVKEELKKLGFIQPSSKLIKKYRLWEELVPEGTGFARRCPYCGKPISASQLLSEEVEIEHILPYSRTLLDSKDNLTVAHKACNQIKKEHTPYEAFGHSPLGFDWETIKELSEKWPSNKRAKFSPQAMDLFDEKNSGFIQRQLTDNAYIAKATKNYLSIICDRDAIWTTSGRMTAKFRGEWGINTLLNANHDTWFKNRSDHRHHALDAIVIALCDRSIVAETSRINRMLGYGAITVPPCPLRREDIEKKLQSVIVSIKPDRGPEGKLYDETAMGAIRVLTRISPNELTEKDIPNINALKVREYLLRLMQEKKSELGDEAFIEVKKYLQQRYKFFDVLRTKWATTTALQNLSDRDIISIVDSHLREDVLRHVKEKSNGRKLTIVLQEYADKHQIRSVRYFPKGQVPVPISSNHNKAYLPYDFYRVDIWLLPGKTKKYEGVFISRTEYFQQKRINQKAPIRKPHPAAKLMMSLHKNDVVEILSPQINELARIAGYATTKNLIDIRPIAAADSIADWTRNTKPELTTSFWPRDCDGQNFKSINMLFTTYTIKQVNITVEGRLSTR

SEQ ID NO: 5091 - protein, 1084 aa, synthetic construct
  REGION 1..1084: note = Synthetic
MWRLALDLGTNSIGWTALQLEFEGKDKPKPTEILDMGVRIFTDGREAKTGTPMNEARRNARQMRRQRDRKIRRKKAMLNFLINNKLMPHDKEKRLIVARLDPYQLRVAALERKLKPYELGRIMMQFSVRRGFKSGRKGQTEKTAEQEGMLGGIQTLEADLQGLTLGQWLFRQKEKGNSVRFKPVMEKSKILYSFYPSREMYETEFIAIMDKQKKYYKELNWERVYKIIFLQRPLKPSERGSCQFYTEEKRGYGAFVSAHRFRILQDINNLKYYNDENIEEEISSELKQKLFDALNTQKSLAFSKIRKTLGKDNTGSFNLEDSKRENLKGNETSFVLRKPEYFGSIWDDLTVQKQDEIIEQLMIEDDEKVIYDFLATFSLTTEQIKNISGYNFPAGTTMLSSKFMIDCSEVMLKEWIGYSDAVKKMGLSKKEARQIQRSLPYYGKILTGQVSGAKGEDYEGNDEEKYGRIANPTVHIALNQLRKLVNALVRRFGKPTEIIMEVNRELKSSRTKKEEEMKKQAKNQKDNERIRNEIKELGYLQVGSEDIKKYKLWEELAPEGIARRCPYCGKTISAKQLMSGAVEIDHILPYSRTLLNSRDNLIVAHRECNQAKRNRSPFEAFGNNTGGFDWNQIMDITAKLPYRKRRKFFPDAMTSFNEEEGGFLDRQLTDTAYLSKAGEKYLSVVCKSNAIWVSPGKLTALLRGFWGFNTLLNRGQETWYKNRSDHRHHALDSLVIGLCDRNIIAEAARINNNMSYREIHAPPCPIDRKVIEEHLKSIVVSYKPDHGIEGKLYAETAMAKHSYLEQINPTELGENEINRIVPKSIKEDIALLVEKEGFRKAKSLIQKKYKFLRVFRDKWVSRTPLESIKDISRIADLVIRDRIQALLNSKSGKVGQKLEDVLAQFSKKNGIYSVRYFPKDQVPVSIKDNANKAYMPDDFYRVDIWRLPEQKGKTKYEGVFVSRPVAMQGHEYNEETGFLQKPHPAAKLIMSLCKNDVVQLSNKTTQEFCRIAGYATTRNKIDIRPIYASDTIAAWKKNTNTNLTSAFWPSDIEGQNFKSINVLFNEFDVKKIKITIDGKLNCRS

SEQ ID NO: 5092 - protein, 1112 aa, synthetic construct
  REGION 1..1112: note = Synthetic
VSSFSLGLRRLQFKICVKEAHMYRLALDLGTNSIGWTALELKTDSKAKSPALTGKILDIGVRIYTDGREAQKGTPLNEARRNARQMRRQRDRKIRRKKAMLKFLVNNKLMPFDREEQQVIARLDPYALRAAALERKLKPFELGRILMQFSIRRGFKSGRKGQQSENTSEREGMLGGIQYLESELQGLTLGQWLLEQRVAGKPVRFKARLEKSKATYPFFPSREMYEHEFAGIRNKQEKYFKEINWDRLHWLIFFQRPLKRPERGRCQFYTEEDRGYRAFVSAHRFRILQEINNLRYYNEKNIEEKIPVELKLKLFEALNSQKSLTFNKIRKLLGKNYTGSFNLEDSKRSELKGNETSVDFRKPEFFGQLWDELEIRKQDEIIEELMIEDDEKVISDMLKILGLSNEQIKKISGHHFPVGTTMLSSRFMIECSDIMLKEWLSPYKAIEKMGLHHSKGEKREIGRSLPYYGKILVGQVSGAKGENYEGKKGEHFYSIEEKRYGRIANPTVHIAMNQLRKLVNALIRRYGNPDQIVIEVNRELKQSKARKDEILREQAKNQKANERIRNELTELGLLKISSEDIKKYKLWEELASEGIARRCPYCGKTISAKQLITGTVEIDHILPYSRTLLNSRDNLTVAHRECNQKKKDYSPFEAFGNNPKGFDWDKIIELTAKLPFNKRRKFYPDAMKHFRDEEGGFIDRQITDTAYLSKAGKDYLSAICDSKAIWVSTGRLTAMLRGFWGFNTLLNRGHDTWFKNRSDHRHHALDALVIGLCDRRIIAEAARINSGRLYGEINAPPCPIKRQDIEERLKSIIVSYKVDRGKEGKLYAETALAKHSYLEQIGPADLEEKEINRIVPKTIQEDITLLVKKESFRKAKVLIKSKYKYLRVFRDKWVTRAPLTSLSERDLTNISDPVIRTEILEFVESHPPKSGQKLQDVLAQFSEEKKIYSIRFFHKDQVPVHIEDNFNKAYMPSDYYKVDIWRIPQQNGKYKYEGVFISRPEAMRQLSRRHEHPAAKLIVSLCKNDIIHLSKKTDQEFCRIAGFSTTQNKIDIRPLYASDTIAAWKKDTHINLCSSFWPSEIEGQYFKSINALFNEFEIKLVKITVDGRLIYR

SEQ ID NO: 5093 - protein, 1166 aa, synthetic construct
  REGION 1..1166: note = Synthetic
VTGRQTSLGYTADILPSLATKGNGGSLKMWPGNSPFRLCESISLSGCTLKPGHFVMRYRLGLDLGVSSLGWAVIQLSKGNTPKPVKLVATGVRIFEAGVEGDVEQGKDSSRGAERRNARQPRRQHWRKQHRKRNLFVWLQQIGLLPKTVPYPPESMDGKRGALSDVRDQEIKALDAQLGKKHLPQEFEHGDRDALIAYQKLPYILRAKGADGETLDPFELGRALYHLVQRRGFASNRKGKRDADEEGKVAGGIKATNEARGDRTLAQYVRDSFTLRQGRFGFENDAGHFGVENEQDKSGQVVKRYTAREMYRDEFRAIRAAQAPLHPRIPESDWDRIQRILFFQRPLKSHSRLIGRCSLEPDRRRCTIAIPLFQEFRVLQAVNHLQAVIPGQGKRCLADEERQIVLGALQNQGEMALSKVRTLLKLPKGTTFTQQGFGEEEDQKLIGHRTNAKLAPIFGGEQWEGLSDDERERVALEVLHYRKPQALQRRAKAKWNLSDEQAKRLADASLEEGYGSLSRQALEKLLPLMRNGAPYATARLAAYPASLQAGTAHDKLPPVHHWNRDIRNPAVIRALTELRKVVNALIDNYGKPEQVFIELARELKNSRDRRKQLWKDNEDNRKRRERAADEIVAQLKNIPRPSRADIEKWMLAVECDWTCPYTGQRIDAQSLLGPHPKFDVEHIFPRRYLDDSFGNKTLCFVDFNRHQKKDRLPIDCLSPDEYEKTLQRVRAFKGPHAERKLERFEMPAVPEGFVTRHLNDTRYNSRLAAQYLGTLFGGRNDQEQTQRIVTPTGGLTWMLRRGWHLDRVLSENDEKNREDHRHHAIDALIVALSSQDRIQKLASLAEEGARPGGRFNAFLDGLEQPWDSFLDEARQCIGSLYVSHRPTRTLAGPLHAETNYSKPFQVGDGKKAKPEFRIRKSLDRLTEKEIVGEQIVDARVRLAVQQKYQELCAAAVNKSDKVPAKFWADKNGKPENFPMLRKENGSGPGSPIFKVRLRTDSKPRTVGQGATQRQIASGKDSNYASMVYTVLNEEGQELYWAHEVITRLDAHLTLNANRKTPGEKVLIPKTTEQLQFAWKLKPGQTVKFLFSLTKNDSLLLTGPDGKDALYRVQKLSDNELQLCEHTQLTIANPDRTTWNRLQSIDSLRKRSTRKVRVSPVGEITSH

SEQ ID NO: 5094 - protein, 1072 aa, synthetic construct
  REGION 1..1072: note = Synthetic
VGSSFRYVLGLDLGVSSAGWAILELDSKNGSQTAVAIRDAGVRIFDAGVEGDVEQGKDSSRATVRRQARQPRRQHWRRQFRKKKLFKELQQHGLLPESSSAEAAERKKTLDAVDAELIRKHVLDSNTSDVDKHLAQQRLPYLLRAKALDGPLNPHELGRALYSLAQRRGYKSNRKADIDDDTDGEVAQSIEAVSAAAVGQTLGQFFAREVNPFDNRVNGEGKPDAASGRFRRRYTARDMFTDEFDRIRVAQSPHHQLSDADWERVRQIIFFQRPLKSQKRLIGKCSLEPSKRRCAEALPIFQEFRILQQVNHLRVRDSNGLERPLDERERELLIDALQTQGSMSMKSRAKTLLGIPKPSVFTMEEWDDKLIGHRTNQQMLNAFGDRWFEFSDEERHAIVSDVLFYRHRNRLKQRARNAWGLDPEHAEILAGLHLEEGYANLSALAIKKLLPAMRDGLAFSEAREQVYGDSFKAGEAFDRLPPVVQWNKDIRNPAVMRALTEMRKVVNALIDRYGKPDLIRIELARDLKNSRDGRKRLWANSRDNQKRREKAKEGMLAELGIGYPSRIDIQRWMLGVECNRQCPYCGTNFSGSEIVGKSGNVNIEHIYPRRYLDNSFTNKTLACRRCNDRKGDKLPTETFTNEELALIIERVKAFKGPHRVRKLQRMQATEVPEDFVSRDLNDTRYFSRLATEYVGILYGGHVDALGRRRVYTPTGGLTALIRRGWGLNAVLSDANEKNRNDHRHHAVDAIIVALSTQDRVHDLSRSASQADSHQQRDTAFLKHFEVPWPGFVDEVRRTIENILVSHRPTRTMGGRMHAESIYSIPHYVGGKKEFRIRKELKKLTEKEINGDQIADPGVREAVQQRWAKIKAENAKAIPAQVWSDPRTQQNNFPRLRSRATGKFDGTPIFKVRMRVRVKPRSIGKGVRERNVASGKDTNFACLIYGVMGKDGNEKKWEHEVIDRQTAYQRLANSPRRHGERILVPDEQGGRRRFQFAIRKNDCLELDDENGDRAIYRVVNISADEIQLSPLNLPRVEKEDRNKWNRVRSTTDLKSRNARPVEITPAGQVSEID

SEQ ID NO: 5095 - protein, 1060 aa, synthetic construct
  REGION 1..1060: note = Synthetic
MVNAIPYRLGLDLGASSLGWAVIQLDQPGGQPNGILAAGVRIFEAGVEGDIEQGKDASRAVVRREARQPRRQQWRRQRRKQKLFILLQQLGLLPPSETNDSAARKSLLDQLDAQLTEKYVPAGDHDKRQKLPYQLRDMASTGPVEAFELGRALYHLAQRRGYLSNRKGQSKDEDAGQVLSAISTMDEKLQQSKLKLGAYFNRKVNPHEERIRRRWLGRKQYRDEFAAIRTAQAGAHSQLTKDVWDKIDDAIFFQRPLKSQSHLIGRCELEFDKRKKGLKRSPLALPISQEFRILQKVNDLRVKTPTRNNEPLNEKERQTLFAVLNEAGEISWSKVKTLLKLPKAAKFSLEEWDDKLIGNRTNSKMTPVFGPRWLEMPLEERTAIAQEVLHYRKPEALQKRAMKAWGLDEAAAYQLAFKTHLEPDYASHSRKAMEKLIEGEPGVEGLKAGASYSTVRKALYPERFTPGKMLAALPPVNQWKADIRNPAVIRALTELRKVVNALMKKYGKPEHIHIELARDIRNSRQKRKDIFKQNQENQKRRLKAVEGIVKEGGLSNPKRRDIEKWLLAEECNRECPYCGKTINMRKLMGDDAEFNVEHIYPRRYLDDSFLNKTIACRKCNDTKGDQTPATAFHGDYYEQILQRVERFQGTAREVKLLRFKTEIPPADFTDRQLNDTRYNSRLAAEYLQLLYGGRFDSSGEQRILSPTGQLTGKVRAVWQLNDLLGEEDGQKERQDHRHHAIDAVVIALMTQKQIQRLSQIAGDSEKHHARHFFESIQWPWTNFKNDVAYAVEAINVSHRPTHAIAGPLHAETIYSKNFGTEKKPEHRVRKHISKLTAKEISGDQIVDPHVRTAVQKTWEAKGKPLPAKLWGTEAGNEENFPRLIGQKDSNGGSIIRKVRLKTDAKPRGVGKGVRERNYASGKDSNYASLIYAIVDKDGNEIKWEHEILDRLSAHRLLSANHGKPGEKVLLPNGSEKRKFKFALRKNDMLLAQGPDGQDVLYRVQKFSQDEIQLCEHSLSTVTNETRTPWNRIRSAETLRKFGTHRVVVTLTGEMGAHSEK

SEQ ID NO: 5096 - protein, 1046 aa, synthetic construct
  REGION 1..1046: note = Synthetic
MNYILGLDLGSASLGWAVLECTEVDGSLQPTRIERTGVRIFEAGVEGDIEQGRDASRAAKRREARQPRRQNWRTQQRKRKLFRLLQQHGLLPASEKDDAISRKAVFDQLDKELTEKHITEGDHTAHQHLPYLLRMLASGAKVKPFELGRAIYSLAQRRGFLSNRKADTDEKEDGVVKASISELGGQIAGRTIAQTFVEDISPDHEDPGRQRIRQRYTAREMFHDEFNRIRKQQQPHFDLADNDWDTVYKTIFFQRPLKSQRHRIGRCEIDGGQRCLDALDVFQQFRIWHAVQNLRLADAYSLGRDGRLTLEEQQKIVDALQTQATMTWGKVVTLLGLKRGTKFTIQEWNTKGLTGHRTNSAMMHVFGDEWLDRPLEERDAITKEVVYFRKPSAMRKRGQEAWGLSEEQAALLPSTRLEEAHARHSAATLAIFVERMSRGEDYSTIRKDITGKDDSEPLDQLPPLSKAGLDITNPAVIRGLTELRKVVNELVRQYGKPIGIRIELSRSLKNSRDKRIKLHKDNEDRRKRREKAIEGILKQIPGRYSGNDIEKWLLAEECGWHCPYTGRPISPSTLLGSQPQFDIEHIFPRRYLDNSFSNKTLCYHEFNRNVKKNQTAFDACSGLDSWDEILQRVNNFDGPVAALKRKRFLTAAKEIPDGFTSKHLNDNRYNAVVAKKYVAMLYGGLSDADGSQRVFAVTGGHTALLRREWGLNSILSGTEEKTRDDHRHHAVDAVVIALTDPARIQALVNAAELAEKKASRRFYEAVQDPWPKFSSKVADSINEIVVSHRPTRTLPGALHAESIYSKPHIDKDGNTNHRIRKHITKLSATELKKDKIVDPAIRDLVKAKLKELGESNPAKAFAEEKNHPFLTAKDGRKIPIHKVRVFADKKPRAIAKNERQRYVASGKDSNFASMIYAVVDKDGHEIKWEHKVITRLEAHERKTRNRTVNGEKVLLPDPTDFNDDKKRVFKFALCKNDTVMLEGPDGDDVICRIQKISQAEIQLCPLATPSVQGKARSKWNQIQSIDNLRKWNLRTVLISPTGIEHR

SEQ ID NO: 5097 - protein, 1060 aa, synthetic construct
  REGION 1..1060: note = Synthetic
MAGYSDYVLGLDLGASSLGWAMVELDPARKYKPVRIRDAGVRIFEAGVEGDIEQGKDSSRATQRREARLPRRQHWRRQHRKRKLFRVLQKHALLPQSESDSAADRKATLDALDAELAASHLPQGDHLAHQKLPYLLRAKAAEQRVEPYELGRALYHLAQRRGYLSNRKGADDEDDREGKVAGGISEIDQAKGDKTLGQFFAEDVDVFAHETKSDDDGRDPKTGRIRRRYTSRKMYQDEFSAIRNAQQDHHPGVDTDAWNEIERAIFFQRPLKSQKHLIGCCSLEPERRRCAEALPVYQEFRVLQQVNHLTLRLPGGTERPLNDDERTTLIDLLRRQGEMKFTKARKELNLPKGAEFTIEEWEERLVGHRTNKQMLSVFGERWFEFTPEQQDRITLDVLHYLKPEALVQRAMDEWGLNRQDARRLSKTRLEEGYASLSRRALEKLLAKMRDGTPYATARRELYPEQFAAEIALDALPPLYIWNRDLRNPAVQRALTEVRKVVNSLVAKYGKPARIHIELARELKASRDERKRRWKNATEQRKRREKAAAEILKEVGIERPSRRDIEKWLLREECGGICPYSGKSINGRALLGSHPEFDIEHIYPRKYLDDSFRNKTLCHVSVNRDRKRNLLPSQAFSGAEYEKILQRVKAFSGPFAAEKLKRFEAEDVPEDFVSRDLNDTRYNSRLAADYVAVLYGGRVDSDNITRVYAPTGGLTWMLRNGWQLNGILSTENEKTRDDNRHHAVDALIVALTDAARIKALQEAAEDAAKQESRAFVRAMKLPWNNLLDEARKVIHGINVSHRPTRTISGPLHAESIYSKPHVTADGKTEHRIRKELHKLNEKEINGEQIVDPSVRRAVQQKYAALKAENPRAKPAQFWSNKDDVEKFPALPSKSGSSTPIFKVRLKVDAKPRPVGKGVRQRNIASGKDSNFASMVYAVLDKNGNEKKWVHEIITRLEAHERLSANKNRAGEKVLIPDEQDGKRRFKFALVKNDMLLLEGPDRQHELYRVLSFSDSEIQLCEHNRARLEKRDRTKWTRITSTDALRKRNARKVDVTVVGDIG

SEQ ID NO: 5098 - protein, 1097 aa, synthetic construct
  REGION 1..1097: note = Synthetic
MRSLLNLHGRVCQLYSREARKIAMGYVLGLDIGTASVGWAVLSSEGGSASGVKHMGVRIFPEALHPKTRTPLNQERRAARLRRRLLRRRRDRLQKLADLLADAGLLPTAKVATDKDSDWARSMNTKNKKDPDPYELRARAAKGEKLTPHELGRALYHLAQRRQFKMRDSAEPDEKDKDSADKDVEKKNKTVKEKQAEAEDKQANAESIATSENLKTQNITFGQYLHNQVPEKDRRRTTRALRRNVEYEFETIWQQQGKHHASVLTDELKQQIHGAIFFQRPVFWRKSTLGECPFFSKEPVCRRGSWLSQQKRMLEKVNNLRLVGGNQRELDKGERRKLADHLQTRTHMSWLQVRKLLDLETTDKFNLEEGGEKSLLGHKLENKLAKCLGDDWANHPHKQAIRDGVPHAIWEADYGEKGQRVVIRNEKERAAVREKLRQEFVDKYGITAEQAEALSKLKFEQKWEPYSEKALKAFLPKLEAGERFGDLMAGADWEKWRRETFEGYEQPTGEVWDRLPSPANKEEQERLKKIRNPAVVRAQNELRKVVNNLIAVHGKPERIRVEMTRDVGKSKDARIEIQKAISEQTKKRAAARADLVAHGFAEPSRDDIEKWLLWDECAHRCPYTGAHIGFDALFRRHEFEVEHIWPRSRSLDDSYANKTLCETAENKKKGNRMPYEYLKDTPQWEEVKARLRKLQDEKRMRRGKVKRFQAKEMPENFANRQLTDTGYAAREIKEWLKRLWPDLGSTAPVNVEVVSGQMTARLRGLWGLNGLLSEGEQKARDNHKHHALDALVVACIDKSLEQKLSRHYKLKEEGGAEKFPPPWRGIREDAAKALANIVVSHKVRKKVSGALHKDTLYGDTKHAEGKYHFYVRRKPIADMTPKEVKDIRDGVVQAEVTQWKADAKSVAAANQGKPKDERQEPPSFPRVGKTDASREIRKARYTIKKQGKFMRPVSARGKTLGYVEQGANHHVAIFRKPDGTPDGKIVYDVVSLFEAAQRLRNGKKIVEDTHSEHKDAEFVMSLSLGDALQFPPESERPGIKIVKSIKENGQIGLRDHDDAIQEKKEGSLWQPTVSSIIKAGVKKIAIDPIGRIRKAGG

SEQ ID NO: 5099 - protein, 1124 aa, synthetic construct
  REGION 1..1124: note = Synthetic
LLYYIQFLYHTKNCYGCYNKVVYRKALTPCLQGVIFFYTHNRRLRRMHWPYGIGLDIGVASIGWATVALDEKAQPCGFIRLGSRVFKSAEHPQTGESLAAPRREARSMRRRLRRKALRKQDFYQLLEKNHLPGKEELSQLFAAGSLEDIYALRTRALDEAVTPQEFARILLHLMQRRGFKSNRRADKSKEDGALLQAVTQNRLRMQENGYRTVGEMLYKDQLFAACKRNKGENYLSTVSREEIANEAQLLFAAQREKGQAWATPELEAEYLSILLRQRSFDQGPGGNSPYRGGWIEKIGPCTLLPEEKRAFKNTYSFERFTLLQKINHIRVQESGQTRALSDKERQKVIDLAYRVETVPYARIRKELKWPQEIRFTDVRYDVDAAPETAEKKYKLPVMKGYHALRKALGTQQPELPLWDDIITILASHRDEDVRKKLLEEKGLTAEQIEAVLGLDFSGVGHISLKACQMLEPWLMQGLVYDKACEQAGLNFHGHGNTEKTSKLPASAPELEDMTSPVVRRAVSQTIKLINAIIREMGQSPVWIHIELARELSRTLEERRKDQKSMEDNAKQNERLMQEIRDTFHKLNPTGQDLIKYRLWKEQDGICAYSQQSIAAERLFEPGYAEVDHIVPYSISFDDSRSNKVLVMAAENRQKGNRLPLQDLQGERREKFIVWTKSQVRNYRKQKNLLRETLSDEEQKGFKQRNLQDTQYMARFLLNYIRDHLAFADHPAAGKQRVMALAGAVTSHLRKRWGLTKVRADGDLHHALDAAVIACATQGMVQQISGYYHRIEGEYQQSPDGTYSVHTRTGERFPAPWPHFRDELIQRLSQEPQQNLMQWNPVFYSNFDVKSIRPVFVSRMPQHKVTGAAHKETIKSPKALQDGFLIVKHPLTDLKLNKKTGEIEGYYQPSSDKLLYEALRARLLEFDGDGKKAFTEPFYKPKADGTPGPLVRKVKLCEKASLCVPVHGGNGAADNDSMVRVDVFFVPGDGYYMVPIYVSDTKKKELPNRAVVAHKEFAAWKVMEEKNFLFSLYADDLIEVARKKVMPFSIVNSGSTLPHSYETTHEMVYYGGLDISSGNIKVITHDNSYSLRGLGIKTLNTLQKYEVDILGNVREVKKEKRQSFR

SEQ ID NO: 5100 - protein, 1078 aa, synthetic construct
  REGION 1..1078: note = Synthetic
MCKKMKHPYGIGLDIGIASVGWAVVALNENAEPYGLIRCGSRIFDKAEQPKTGDSLAAPRREARSARRRLRRRSLRKADLYELMEKNGLPGKAEIEQAVQAGHLPDVYALRVQALDGPVTALDFARILLHLMQRRGFRSNRKADDAQKDGKLLQAIDANTRRMEANRYRTVGEMMYRDPVFAEHKRNKAENYLSTVKRDQIIDEARLVFAAQRQYGATWASPEMEAEYLCILTRQRSFAEGPGKGSPYSGSNRVGTCTLEGKSEQRAAKAAFSFEYFTLLQKINHIRIAENGTSRTLTPAERQVLLSVCSQTDKLDFARVRKVLALPEEARFNMVRYRGEQTAEACEKKEKITALPCYHKMRKALNTLRKDHIRNISREQLDAAGAALTNPENEDKLREALKQAEFEPLEIEALLTLPSFAGYGHISVKACRKLIPYLEQGMNYNDACQAAGYDFQGRQNGEKAQFLPASTEEMEDITSPVVRRAVAQTIKVVNAIIREQGESPVSIHLELAREMNKNFQQRSELDKAMRDNSAENERLMKELNELFPGRTVTGQDLVKYRLWKEQDGRCAYSIQPLELDKVITVSGYAEVDHIIPYSISFDDRRTNKVLVLASENRQKGNRLPLQYLQGKRRDDFIVYTKANVKNFRKRQNLLKERLSEEDGKGYIQRNLQDTQYIAAFMLNYIRNHLAFADCSGAGKRRVVAVNGAVTAFLRKRWGLSKVRADGDLHHAVDAAVIACTTQGMIKRVSDFCKRAETTAVRNEHFPEPWPHFRDELTQRLSACPQEDLMKINPVYYATVDISSIQPVFVSRMPRHKVTGAAHEETIRSQVNEKYTAVRKSITELSLDKDGKIKDYFKPSSDTLLYEALKKRLTEFGGNAKKAFAEPFYKPRADGTPGAQVRKVKVIAKMSNTIPVRSGGGVAKGGDMIRIDVYYVPGDGYYWVPIYVADTVKETLPNKAVVRDKTMEEWKEMKEDDFLFSLYSNDLILVERDKPICFSLMHEDSTLPKKYETKKELVYYKGGDISNGGIRIETHEGAYFLKSLTFGIVQKVQKYQVDVLGNYTPVKKEKRQTFPAQRR

SEQ ID NO: 5101 - protein, 1078 aa, synthetic construct
  REGION 1..1078: note = Synthetic
MCKKMKHPYGIGLDIGIASVGWAVVALNENAEPYGLIRCGSRIFDKAEEPQTGDSLAAPRRKARSARRRLRRRSLRKADLYELMEKNGLPGKAEIEQAVQAGHLPDVYALRVQALDGPVTALDFARILLHLMQRRGFRSNRKADDAQKDGKLLQAIDANTRRMEANRYRTVGEMMYRDPVFAEHKRNKAENYLSTVKRDQIIDEARLVFAAQRQYGATWASPEMEAEYLCILTRQRSFAEGPGKGSPYSGSNRVGTCTLEGKSEQRAAKAAFSFEYFTLLQKINHIRIAENGTSRTLTPAERQVLLSVCCQTDKLDFARIRKALALPEEARFNMVRYRGEQTAEACEKKEKITALPCYHKMRKALNTLRKDHIRNISREQLDAAGAALTNPENEDKLREALKQAEFEPLEIEALLTLPSFAGYGHISVKACRKLIPYLEQGMNYNDACQAAGYDFQGRQNGEKAQFLPASTEEMEDITSPVVRRAVAQTIKVVNAIIREQGESPVSIHLELAREMNKNFQQRSELDKAMRDNSAENERLMKELNELFPGRTVTGQDLVKYRLWKEQDGRCAYSIQPLELDKVITVSGYAEVDHIVPYSISFDDRRTNKVLVLKSENRQKGNRLPLQYLQGKRRDDFIVYTKANVKNFRKRQNLLKERLSEEDGKGYIQRNLQDTQYIAAFMLNYIRNHLAFADCSGAGKRRVVAVNGAVTAFLRKRWGLSKVRADGDLHHAVDAAVIACTTQGMIKRVSDFCKRAETTAVRNEHFPEPWPHFRDELRQRLSACPQEDLMKINPVYYATVDISSIQPVFVSRMPCHKVTGAAHEETIRSQVDEQYTAVRKSITELSLDKDGKIKDYFNPSSDTLLYEALKKRLTEFGGNAKKAFAEPFYKPRADGTPGAQVRKVKVVAKMNNTIPVRSGGGVAKGGDMIRIDVYYVPGDGYYWVPIYVADTVKETLPNKAVVRDKTMEEWKEMKEDDFLFSLYSNDLILVERDKPICFSLMHEDSTLPKKYETKKELVYYKGGDISNGGIRIETHEGAYFLKSLTFGIVQKVQKYQVDVLGNYTPVKKEKRQTFPAQRR

SEQ ID NO: 5102 - protein, 1078 aa, synthetic construct
  REGION 1..1078: note = Synthetic
MCKKMKHPYGIGLDIGIASVGWAVVALNENAEPYGLVRCGSRIFDKAEQPKTGDSLAAPRREARSARRRLRRRSLRKADLYELMEKNGLPGKAEIEQAVQAGHLPDVYALRVQALDGPVTALDFARILLHLMQRRGFRSNRKADDAQKDGKLLQAIDANTRRMEANRYRTVGEMMYRDPVFAEHKRNKAENYLSTVKRDQIIDEARLVFAAQRQYGATWASPEMEAEYLCILTRQRSFAEGPGKGSPYSGSNRVGTCTLEGKSEQRAAKAAFSFEYFTLLQKINHIRIAENGTSRTLTPAERQVLLSVCSQTDKLDFARIRKALALPEEARFNMVRYRGEQTAEACEKKEKITALPCYHKMRKALNTLRKDHIRNISREQLDAAGTALTNPENEDKLREALEQAEFEPLEIEALLTLPSFAGYGHISVKACRKLIPYLEQGMNYNDACQAAGYDFQGRQNGEKAQFLPASTEEMEDITSPVVRRAVAQTIKVVNAIIREQGESPVSIHLELAREMNKNFQQRSELDKAMRDNSAENEKLMQELHAKFSGRKISGQDLVKYRLWKEQNEICAYSLEKLDLTRVITEPGYAEVDHIVPYSISFDDRRTNKVLVLASENRQKGNRLPLQYLQGKRRDDFIVYTKANVKNFRKRQNLLKERLSEEDGKGFIQRNLQDTQYIAAFMLNYIRNHLAFADCSGAGKRRVVAVNGAVTAFLRKRWGLSKVRADGDLHHAVDAAVIACTTQGMIKRVSDFCKRAETTAVRNEHFPEPWPHFRDELTQRLSACPQENLMQINPVYYATVDISSIQPVFVSRMPRHKVTGAAHEETIRSQVNEQYTAVRKSITELSLDKDGKIKDYFNPSSDTLLYEALKKRLTEFGGNAKKAFAEPFYKPRADGTPGAQVRKVKVVAKMNNTIPVRSGGGVAKGGNMIRIDVYYVPGDGYYWVPIYVADTVRPELPNKAVLRGKSMEDWKEMKEENFLFSLYANDLILVEREEPINFSLVNNDSTLPNKFSVKKVLVYYKSGNISNAAIKVETHDGAYVFEGMTFGTVRKIQKYQVDILGNYVPVKKEKRQTFPAQRR

SEQ ID NO: 5103 - protein, 1077 aa, synthetic construct
  REGION 1..1077: note = Synthetic
MKHPYGIGLDIGIASVGWAVVALNENAEPYGLIRCGSRIFDKAEQPKTGESLAAPRREARSTRRRLRRRSLRKADLYELMAQNGLPGRAKIEEAVQAGHLPDIYALRVQALDGPVTATDFARILLHLMQRRGFRSNRKADDAQKDGKLLQAIDANTRRMEENHYRTVGEMMYRDPVFAEHKRNKSENYLSTVRRDQIVEEAVQLFAAQRQYGAAWASPEMEAEYLTILTRQRSFDEGPGGNSPYGGNIVEKMVGTCTLEGQAEPRAAKATWSFEYFTLLQKINHIRIIESGAARILTAEERQELLSVCYQTDKLDFARIRKALALSEQARFNMVRYRDGQTTEDCEKKEKIVCLPCYHKMRKVLNTLRKDYIRSVSRDRLDAAATALTMYKNEATLRAKLEEAQFEPLEVDALMTLPSFSGFGHISVKACRKLIPYLEQGLNYNDACKEAGYDFQGNYRGEKSQFLPASTEEMEDITSPVVRRAVAQTIKVVNAIIREQGESPVNIHLELAREMSKNFQQRNDLDKAMKGNNAENERLMKDLHELFPGRNITGQDLVKYRLWKEQDGRCAYSLQPLELEKAITVSGYAEVDHIVPYSISFDDRRANKVLVLASENRQKGNRLPLQYLQGKRRDDFIVYTKASVKNYRKRQNLLKEKLSEEDSKGFMQRNLQDTQYIASFMLNYIRSHLAFADFPAAGKKRVVAVNGAVTAFLRKRWGLGKVRADGDLHHAVDAAVIACTTDGMIQRVSRFYTHIETSDTRGERFPEPWPRFRDELMQRLSACPQENLMQINPVYYQNVDIASIQPVFVSRMPRHKMTGAAHKETIKGRLDDAHTVQRRSITDLKLDKEGEIAGYFNPSSDTLLYNALKEQLTAFGGDGKKAFAEPFFKPRADGTPGAQVRKVKVYDKATSMVAVHEGKGVADNDTMVRIDVYFVPGDGYYWVPIYVADTVKPELPNKAVVAYKNYDEWKEMAEENFLFSLCQNDLIRIESKRTMKFKVQNSDSTLEKETQMNCGLTYFEGGNISTGAITVTTHDNAYIVGSLGFKTLQKVQKYQVDVLGNYTLVKKEKRQNFPAQRR

SEQ ID NO: 5104 - protein, 1074 aa, synthetic construct
  REGION 1..1074: note = Synthetic
MKHPYGIGLDIGIASVGWAVVALNENAEPYGLIRCGSRIFDAAEQPNTGESLAAPRREARSTRRRLRRRSLRKADLYELMAQNGLPGRAEIEEAVQAGHLPDIYALRVQALDGPVTAMDFARILLHLMQRRGFRSNRKADDAQKDGKLLQAIDANTRRMEENHYRTVGEMMYRDPVFAEHKRNKSENYLSTVRRDQIVEEAVQLFAAQRQYGAAWASPKMEAEYLTILTRQRSFAEGPGGDSPYRGMQKVGPCALEGKSERRAPKATFAFEYFTLLQKINHIRIAENGVNRILTAEERQELLSACYRTDKLDFARIRKLLALPGEARFNMVRYRENQTAEECEKKEKITVLPCYHKMRKVLNTLRKDHIRSISREQLDAAATALTNPENEEKLRAALEEAQFEPLEVDALMALPSFSGFGHISVKACRKLIPYLEQGLNYNDACKEAGYDFQGNYRGEKSQFLPASTEEMEDITSPVVRRAVAQTIKVVNAIIREQGESPVNIHLELAREMSKNYKQRNELADAMEKNQAENARLMEKLHDLFRGRTITGQTLVKYRLWKEQKEVCAYSLQMMKLDSVITDSSYAEVDHIVPYSRSFDDRRTNKVLVLTSENRKKGDRLPLEYLQGKRREDFIVYTKANVKNYRKRQNLLKEGLSKEESREFIQRNLQDTQYSASFMLNYIRNHLAFADCSAAGKQRVVAVNGAVTAFLRKRWGLSKVRADGDLHHAVDATVIACTTPSMVKRVTEFCKQEETNHVRNEYFPEPWPRFRDELMQRLSACPQENLMQINPVYYQNVDIASIRPVFVSRMPRHKMTGAAHKETIKGRLDDAHTVQRRSITDLKLDKEGEIAGYFNPSSDTLLYNALKEQLTAFGGDGKKAFAEPFFKPRADGTPGAQVRKVKVYDKATSMVAVHEGKGVADNDTMVRIDVYFMPGDGYYWVPIYVADTVKPELPNKAVIAHKNYAEWKEMDEKDFLFSLCPNDLIRVESKRTMKFKVQNKDSTLEKEMQTNGDMVYFEGGNISGGSITVATHDGAYMVESLGLKTLQKVQKYQVDALGNYTLVKKEKRQYFPAQRR

SEQ ID NO: 5105 - protein, 1074 aa, synthetic construct
  REGION 1..1074: note = Synthetic
MKHPYGIGLDIGIASVGWAVVALNENAEPYGLIRCGSRIFDAAEQPNTGESLAAPRREARSTRRRLRRRSLRKADLYELMAQNGLPGRAKIEEAVQAGHLPDIYALRVQALDGPVTAMDFARILLHLMQRRGFRSNRKADDAQKDGKLLQAIDANTRRMEENHYRTVGEMMYRDPVFAEHKRNKSENYLSTVRRDQIVEEAVQLFAAQRQYGAAWASPEMEAEYLTILTRQRSFAEGPGGDSPYRGMQKVGPCALEGKSERRAPKATFAFEYFTLLQKINHIRIAENGVNRILTAEERQELLSACYRTDKLDFARIRKLLALPVEARFNMVRYRENQTAEECEKKEKITVLPCYHKMRKVLNTLRKDHIRSISREQLDAAATALTNPENEEKLRAALEEAQFEPLEVDALMTLPSFSGFGHISVKACRKLIPYLEQGLNYSDACKEAGYDFQGNYRGEKSQFLPASTEEMEDITSPVVRRAVAQTIKVVNAIIREQGESPVNIHLELAREMSKNYKQRNELADAMEKNQAENARLMEELHDLFRGRTITGQTLVKYRLWKEQKEVCAYSLQMMKLDSVITDSSYAEVDHIVPYSRSFDDRRTNKVLVLTSENRKKGDRLPLEYLQGKRREDFIVYTKANVKNYRKRQNLLKEGLSKEESREFIQRNLQDTQYSASFMLNYIRNHLAFADCSAAGKQRVVAVNGAVTAFLRKRWGLSKVRADGDLHHAVDATVIACTTPSMVKRVTEFCKQEETNHVRNEYFPEPWPRFRDELMQRLSACPQENLMQINPVYYQNVDIASIRPVFVSRMPRHKATGKVHEDTIRSYVSKGITAVRTSITDLKLDEKGEIEGYFNKESDLLLYNALKRRLEEFGGNAKKAFAEPFYKPRADGTPGAQVRKVKIVDKTSNVICVRDGGGVSKSNNMVRIDVYYVPGEGYYWVPIYVADIVKSTLPNKAVLRNKGMDDWKEMNEKDFQFSLYNNDLVFIERDSPISFSLTNKKSTLPSKFSTEKTFAYYQKGDISNAAIKVETPDGAYVFKSLTLNTVRKIEKYQVDVLGNYTLVKKEKRQNFPAQRR

SEQ ID NO: 5106 - protein, 775 aa, synthetic construct
  REGION 1..775: note = Synthetic
MCKKMKHPYGIGLDIGIASVGWAVVALNENAEPYGLIRCGSRIFDKAEEPQKGDSLAAPRRKARSARRRLRRRSLRKADLYELMEKNGLPGKAEIEQAVQAGHLPDVYALRVQALDGPVTALDFARILLHLMQRRGFRSNRKADDAQKDGKLLQAIDANTRRMEANRYRTVGEMMYRDPVFAEHKRNKAENYLSTVKRDQIIDEARLVFAAQRQYGATWASPEMEAEYLCILTRQRSFAEGPGKGSPYSGSNRVGTCTLEGKSEQRAAKAAFSFEYFTLLQKINHIRIAENGTSRTLTPAERQVLLSVCCQTDKLDFARVRKALALPEEARFNMVRYRGEQTAEACEKKEKITALPCYHKMRKALNTLRKDHIRNISREQLDAAGAALTNPENEDKLREALKQAEFEPLEIEALLTLPSFAGYGHISVKACRKLIPYLEQGMNYNDACQAAGYDFQGSQNGEKAQFLPASTEEMEDITSPVVRRAVAQTIKVVNAIIREQGESPVSIHLELAREMNKNFQQRSELDKAMRDNSAENERLMKELNELFPGHTVTGQDLVKYRLWKEQDGRCAYSIQPLELDKVITVSGYAEVDHIVPYSISFDDRRTNKVLVLASENRQKGNRLPLQYLQGKRRDDFIVYTKANVKNFRKRQNLLKERLSEEDGKGYIQRNLQDTQYIAAFMLNYIRNHLAFADCSGAGKRRVVAVNGAVTAFLRKRWGLGKVRADGDLHHAADAAVIACTTQGMIKRVSDFCKRAETTAVRNEHFPEPWPHFRDG

SEQ ID NO: 5107 - protein, 1078 aa, synthetic construct
  REGION 1..1078: note = Synthetic
MCKKMKHPYGIGLDIGIASVGWAVVALNENAEPYGLIRCGSRIFDKAEQPKTGDSLAAPRREARSARRRLRRRSLRKADLYELMEKNGLPGKAEIEQAVQAGHLPDVYALRVQALDGPVTALDFARILLHLMQRRGFRSNRKADDAQKDGKLLQAIDANTRRMEANRYRTVGEMMYRDPVFAEHKRNKAENYLSTVKRDQIIDEARLVFAAQRQYGATWASPEMEAEYLCILTRQRSFAEGPGKGSPYSGSNRVGTCTLGGKSEQRAAKAAFSFEYFTLLQKINHIRIAENGTSRTLTPAERQVLLSVCCQTDKLDFARVRKALALPEEARFNMVRYRGEQTAEACEKKEKITALPCYHKMRKALNTLRKDHIRNISREQLDAAGAALTNPENEDKLRKELKQAEFEPLEIEALLTLPSFAGYGHISVKACRKLIPYLEQGMNYNDACQAAGYDFQGRQNGEKAQFLPASTEEMEDITSPVVRRAVAQTIKVVNAIIREQGESPVSIHLELAREMNKNFQQRSELDKAMRDNSAENERLMKELNELFPGRTVTGQDLVKYRLWKEQDGHCAYSIQPLELDKVITVSGYAEVDHIVPYSISFDDRRTNKVLVLASENRQKGNRLPLQYLQGKRRDDFIVYTKANVKNFRKRQNLLKERLSEEDGKGYIQRNLQDTQYIAAFMLNYIRNHLAFADCSGAGKRRVVAVNGAVTAFLRKRWGLSKVRADGDLHHAADAAVIACTTQGMIKRVSDFCKRAETTAVRNEHFPEPWPHFRDELTQRLSACPQEDLMKINPAYYATVDISSIQPVFVSRMPRHKVTGAAHKETIKSRLDDTHVVQRRNITELKLDKDGEIAGYFNRSSDTLLYNALKARLLAFGGDGKKAFAEPFYKPRADGTPGARVQKVKICDKVTSTVPVHDGKGVADNDTMVRIDVYYVPGDGYYWVPIYVADTVKLELPNKAVVQGKSYAEWKEMDEENFLFSLCQHDLVRIESKRLMKFKVQNRDSTLEKEMPVNKILAYFEGGNIATGAVTLTTHDDAYIADGLGFKTLQKVQKYQVDVFGNYTPVKKEKRQTFPAQRR

SEQ ID NO: 5108 - protein, 859 aa, synthetic construct
  REGION 1..859: note = Synthetic
MGFAGDGGRVPLYSRQRSFAEGPGKGSPYSGSNRVGTCTLEGKSEQRAAKAAFSFEYFTLLQKINHIRIAENGTSRTLTPAERQVLLSVCCQTDKLDFARVRKALALPEEARFNMVRYRGEQTAEACEKKEKITALPCYHKMRKALNTLRKDHIRNISREQLDAAGAALTNPENEDKLREALKQAEFEPLEIEALLTLPSFAGYGHISVKACRKLIPYLEQGMNYNDACQAAGYDFQGSQNGEKAQFLPASTEEMEDITSPVVRRAVAQTIKVVNAIIREQGESPVSIHLELAREMNKNFQQRSELDKAMRDNSAENERLMKELNELFPGRTVTGQDLVKYRLWKEQDGRCAYSIQPLELDKVITVSGYAEVDHIIPYSISFDDRRTNKVLVLASENRQKGNRLPLQYLQGKRRDDFIVYTKANVKNFRKRQNLLKERLSEEDGKGFIQRNLQDTQYIAAFMLNYIRNHLAFANCSGAGKRRVVAVNGAVTAFLRKRWGLGKVRADGDLHHAADAAVIACTTQGMIKRVSDFCKRAETTAVRNEHFPEPWPRFRDELTQRLSACPQENLMQINPVYYATVDISSIQPVFVSRMPRHKVTGAAHKETIKSRLDDTHVVQRRNITELKLDKDGEIAGYFNRSSDTLLYNALKARLLAFGGDGKKAFEEPFYKPRADGTPGARVQKVKICDKVTSTVPVHGGKGVADNDTMVRMDVYFVPGDGYYWVPIYVADTVKLELPNKAVVQGKSYAEWKEMDEENFLFSLCQNDLIRIESKRTMKFKVQNSDSTLEKEVQMNCGLTYFEGGNISTGAITVTTHDNAYIVGSLGFKTLQKVQKYQVDVLGNYTLVKKEKRQTFPAQRR

SEQ ID NO: 5109 - protein, 841 aa, synthetic construct
  REGION 1..841: note = Synthetic
LRKVRAKAARIAAATGSAPARWGGKSEQRAAKAAFSFEYFTLLQKINHIRIAENGTSRTLTPAERQVLLSVCCQTDKLDFARIRKALALPEEARFNMVRYRGEQTAEACEKKEKITALPCYHKMRKALNTLRKDHIRNISREQLDAAGAALTNPENEDKLREALKQAEFEPLEIEALLTLPSFAGYGHISVKACRKLIPYLEQGMNYNDACQAAGYDFQGRQNGEKAQFLPASTEEMEDITSPVVRRAVAQTIKVVNAIIREQGESPVSIHLELAREMNKNFQQRSELDKAMRDNSAENERLMKELNELFPGRTVTGQDLVKYRLWKEQDGRCAYSIQPLELDKVITVSGYAEVDHIVPYSISFDDRRTNKVLVLASENRQKGNRLPLQYLQGKRRDDFIVYTKANVKNFRKRQNLLKERLSEEDGKGYIQRNLQDTQYIAAFMLNYIRNHLAFADCSGAGKRRVAAVNGAVTAFLRKRWGLSKVRADGDLHHAVDAAVIACTTQGMIKRVSDFCKRAETTAVRNEHFPEPWPRFRDELTQRLSACPQENLMQINPVYYATVDISSIQPVFVSRMPRHKVTGAAHKETIKSRLDDIHVVQRRNITELKLDKDGEIAGYFNRSSDTLLYNALKARLLAFGGDGKKAFAEPFYKPRADGTPGARVQKVKICDKVTSTVPVHGGKGVADNDTMVRIDVYYVPGDGYYWIPVYVADTVKPELPSKAVVAYKSSAEWKEMKDEDFLFSLCQHDLVRIESKRLMKFKVQHRDSTLEKEMPVNKILAYFEGGDIAMGAVTLTTHDDAYIATGLGFKTLQKVQKYQVDVLGNYTPVKKEKRQTFPAQRR

SEQ ID NO: 5110 - protein, 771 aa, synthetic construct
  REGION 1..771: note = Synthetic
VCCQTDKLDFARIRKALALPEEARFNMVRYRGEQTAEACEKKEKITALPCYHKMRKALNTLRKDHIRNISHEQLDAAGAALTNPENEDKLREALKQAEFEPLEIEALLTLPSFAGYGHISVKACRKLIPYLEQGMNYNDACQAAGYDFQGRQNGEKAQFLPASTEKMEDITSPVVRRAVAQTIKVVNAIIREQGESPVSIHLELAREMNKNFQQRSELDKAMRDNSAENERLMKELNELFPGRTVTGQDLVKYRLWKEQDGRCAYSIQPLELDKVITVSGYAEVDHIVPYSISFDDRRTNKVLVLASENRQKGNRLPLQYLQGKRRDDFIVYTKANVKNFRKRQNLLKERLSEEDGKGYIQRNLQDTQYIAAFMLNYIRNHLAFADCSGAGKRRVVAVNGAVTAFLRKRWGLSKVRADGDLHHAADAAVIACTTQGMIKRVSDFCKRAETTAVRNEHFPEPWPHFRDELTQRLSACPQEDLMKINPVYYAGVDISSIQPVFVSRMPRHKVTGAAHKETIKSRLDDTHVVQRRNITELKLDKDGEIAGYFNRSSDTLLYNALKARLLAFGGDGKEAFAEPFYKPRADGTPGARVQKVKICDKVTSTVPVHGGKGVADNDTMVRIDVYYVPGDGYYWIPVYVADTVKPELPSKAVVAYKSSAEWKEMKDEDFLFSLCQHDLVRIESKRLMKFKVQHRDSTLEKEMPVNKILAYFEGGDIATGAVTLTTHDDAYIATGLGFKTLQKVQKYQVDVLGNYTPVKKEKRQTFPAQRR

SEQ ID NO: 5111 - protein, 682 aa, synthetic construct
  REGION 1..682: note = Synthetic
LREALKQAEFEPLEIEALLTLPSFAGYGHISVKACRKLIPYLEQGMNYNDACQAAGYDFQGRQNGEKAQFLPASTEEMEDITSPVVRRAVAQTIKVVNAIIREQGESPVSIHLELAREMNKNFQQRSELDKAMRDNSAENERLMKELNELFPGRTVTGQDLVKYRLWKEQDGRCAYSIQPLELDKVITVSGYAEVDHIVPYSISFDDRRTNKVLVLASENRQKGNRLPLQYLQGKRRDDFIVYTKANVKNFRKRQNLLKERLSEEDGKGYIQRNLQDTQYIAAFMLNYIRNHLAFADCSGAGKRRVVAVNGAVTAFLRKRWGLSKVRADGDLHHAADAAVIACTTQGMIKRVSDFCKRAETTAVRNEHFPEPWPHFRDELTQRLSACPQENLMQINPVYYATVDISSIQPVFVSRMPRHKVTGAAHKETIKSRLDDTHVVQRRNITELKLDKDGEIAGYFNRSSDTLLYNALKARLLAFGGDGKKAFAEPFYKPRADGTPGARVQKVKICDKVTSTVPVHGGKGVADNDTMVRMDVYFVPGDGYYWVPIYVADTVKLELPNKAVVQGKSYAEWKEMDEENFLFSLCQHDLVRIESKRLMKFKVQNRDSTLEKEMPVNKILAYFEGGNISTGAITVTTHDDAYIADGLGFKTLQKVQKYQVDVLGNYTPVKKEKRQTFPAQRR

SEQ ID NO: 5112 - protein, 1263 aa, synthetic construct
  REGION 1..1263: note = Synthetic
MRYDSRKVKGCAKKMKHPYGIGLDIGIASVGWAVVALNENAEPYGLIRCGSRIFDKAEQPKTGDSLAAPRREARSARRRLRRRSLRKADLYELMEKNGLPGKAEIEQAVQAGHLPDVYALRVQALDGPVTALDFARILLHLMQRRGFRSNRKADDAQKDGKLLQAIDANTRRMEANRYRTVGEMMYRDPVFAEHKRNKAENYLSTVKRDQIIDEARLVFAAQRQYGATWASPEMEAEYLCILTRQRSFAEGPGKGSPYSGTNRVGTCTLEGKSEQRAAKAAFSFEYFTLLQKINHIRIAENGTSRTLTPAERQVLLSACYQTDKLDFARIRKALALPEEARFNMVRYRGEQTAEACEKKEKITALPCYHKMRKALNTLRKDHIRNISREQLDAAGAALTNPENEDKLREALQQAEFEPLEIEALLTLPSFAGYGHISVKACRKLIPYLEQGMNYNDACQAAGYDFQGRQNGEKAQFLPASTEEMEDITSPVVRRAVAQTIKVVNAIIREQGESPVSIHLELAREMNKNFQQRSELDKAMRDNSAENERLMKELNELFPGRTVTGQDLVKYRLWKEQDGRCAYSIQPLELDKVITVSGYAEVDHIVPYSISFDDRRTNKVLVLASENRQKGNRLPLQYLQGKRRDDFIVYTKANVKNFRKRQNLLKERLSEEDGKGYIQRNLQDTQYIAVFMLNYIRNHLAFADCSGAGKRRVVAVNGAVTAFLRKRWGLSKVRADGDLHHAADAAVIACTTQGMIKRVSDFCKRAETTAVRNEHFPEPWPRFRDELTQRLSACPQENLMQINPVYYATVDISSIQPVFVSRMPRHKVTGAAHKETIKSRLDDTHVVQRRNITELKLDKDGEIAGYFNRSSDTLLYNALKARLLAFGGDGKKAFAESFYKPRADGTPGARVQKVKICDKVTSTVPVHGGKGVADNDTMVRMDVYFVPGDGYYWVPIYVADTVKLELPNKAVVQGKSYAEYQAEKTGTSWKGKLKIAVDTLIPQVASFEELLQRLQAAGYEIKPGKYVSCRAPGQERFTRLKTLGADYTEEAIRERIAGRRTKAAKAPKEQRGVSLLIDIENSIKAQESRGYEQWAKIHNLKLAAKTMNFLTEHKIEQYADLVSRIEEVNAENEKTADALKSVEKRLADMAVLMKHVTTYQKTKPVYEAYRRAKDKDAYRAKQESSLILHEAAVKTLKAAGVTKLPNLAAMQEEYGKLQAQKEALYADYGKLKKQVKEYDVIKQNIDNILRQGKEPERKKGKERE

SEQ ID NO: 5113 - protein, 678 aa, synthetic construct
  REGION 1..678: note = Synthetic
LKQAEFEPLEIEALLTLPSFAGYGHISVKACRKLIPYLEQGMNYNDACQAAGYDFQGRQNGEKAQFLPASTEEMEDITSPVVRRAVAQTIKVVNAIIREQGESPVSIHLELAREMNKNFQQRSELDKAMRDNSAENERLMKELNELFPGRTVTGQDLVKYRLWKEQDGRCAYSIQPLELDKVITVSGYAEVDHIIPYSISFDDRRTNKVLVLASENRQKGNRLPLQYLQGKRRDDFIVYTKANVKNFRKRQNLLKERLSEEDGKGYIQRNLQDTQYIAAFMLNYIRNHLAFADCSGAGKRRVVAVNGAVTAFLRKRWGLSKVRADGDLHHAADAAVIACTTQGMIKRVSDFCKRAETTAVRNEHFPEPWPHFRDELTQRLSACPQEDLMKINPVYYATVDISSIQPVFVSRMPRHKVTGAAHEEMIRSQVNEKYTAVRKSITELSLDKDGKIKDYFNPSSDTLLYEALKKRLTEFGGNAKKAFAEPFYKPRADGTPGAQVRKVKVVAKMSNTIPVRSGGGVAKGGDMIRIDVYYVPGDGYYWVPIYVADTVKETLPNKAVVRDKTMEEWKEMKEDDFLFSLYSNDLILVERDKPICFSLMHEDSTLPKKYETKKELVYYKGGDISNGGIRIETHEGAYFLKSLTFGIVQKVQKYQVDVLGNYTPVKKEKRQTFPAQRR

SEQ ID NO: 5114 - protein, 943 aa, synthetic construct
  REGION 1..943: note = Synthetic
MDGRRSKMKTRPLSVKRLFLWICIGLLLSMTAITLILFSLTLEVAVLIVGAALIGCALVWLFVLTQAFGKRLSLFTSELCKTLDNMMDGDEEPKPADNSETLFARINHRLTRLYQIMQENRRKVEEERQELQTLVSDISHQVKTPVSNLKMVTDTLLTRPVTEAERIDFIKGVRSQTDKLDFARIRKALALPEEARFNMVRYRGEQTAEACEKKEKITALPCYHKMRKALNTLRKDHIRNISREQLDAAGAALTNPENEDKLRKALEQAEFEPLEIEALLTLPSFAGYGHISVKACRKLIPYLEQGMNYNDACQAAGYDFQGRQNGEKAQFLPASTEEMEDITSPVVRRAVAQTIKVVNAIIREQGESPVSIHLELAREMNKNFQQRSELDKAMRDNSAENERLMKELNELFPGRTVTGQDLVKYRLWKEQDGRCAYSIQPLELDKVITVSGYAEVDHIVPYSISFDDRRTNKVLVLESENRQKGNRLPLQYLQGKRRDDFIVYTKTNVKNFRKRQNLLKERLSEEDGKGYIQRNLQDTQYIAAFMLNYIRNHLAFADCSGAGKRRVVAVNGAVTAFLRKRWGLGKVRADGDLHHAVDAAVIACTTQGMIKRVSDFCKRAETTAVRNEHFPEPWPRFRDELTQRLSACPQENLMQINPVYYATVDISSIQPVFVSRMPRHKVTGAAHEETIRSQVNEKYTAVRKSITELSLDKDGKIKDYFNPSSDTLLYEALKKRLTEFGGNAKKAFAEPFYKPRADGTPGAQVRKVKVVAKMNNTIPVRSGGGVAKGGNMIRIDVYYVPGDGYYWVPIYVADTVRPELPNKAVLRGKSMEDWKEMKEENFLFSLYDNDLILVEREEPINFSLVNSDSTLPNKFSVKKVLVYYKSGNISNAAIKVETHDGAYVFEGMTFGTVRKIQKYQVDVLGNYTPVKKEKRQTFPAQRR

SEQ ID NO: 5115 - protein, 850 aa, synthetic construct
  REGION 1..850: note = Synthetic
LTRQRSFAEGPGGNSPYGGNIVEKMVGTCTLEGQAEPRAAKATWSFEYFTLLQKINHIRIIESGAARILTVEERQELLSVCYQTDKLDFARIRKALALSEQARFNMVRYRDGQTTEDCEKKEKIVCLPCYHKMRKVLNTLRKDYIRSVSRDRLDAAATALTMYKNEATLRAKLEEAQFEPLEVDALMTLPSFSGFGHISVKACRKLIPYLEQGLNYNDACKEAGYDFQGNYRGEKSQFLPASTEEMEDITSPVVRRAVAQTIKVVNAIIREQGESPVNIHLELAREMSKNFQQRNDLDKAMKDNNAENERLMKDLHELFPGRNITGQDLVKYRLWKEQDGRCAYSLQPLELEKAITVSGYAEVDHIVPYSISFDDRRANKVLVLASENRQKGNRLPLQYPQGKRRDDFIVYAKASVKNYRKRQNLLKEKLSEEDSKGFMQRNLQDTQYIASFMLNYIRSHLAFADFSAAGKKRVVAVNGAVTAFLRKRWGLGKVRADGDLHHAVDAAVIACTTDGMIQRVSRFYTHIETSDTRGERFPEPWPRFRDELMQRLSACPQENLMQINPVYYQNVDIASIRPVFVSRMPRHKMTGAAHKETIKGRLDDAHTVQRRSITDLKLDKEGEIAGYFNPSSDTLLYNALKEQLTAFGGDGKKAFTEPFFKPRADGTPGAQVRKVKVYDKATSMVAVHEGKGVADNDTMVRIDVYFVPGDGYYWVPIYVADTVKPELPNKAVVQGKSYAEWKEMDEENFLFSLCQNDLIRIESKRTMKFKVQNSDSTLEKETQMNCGLTYFEGGNISTGAITVTTHDNAYIVGSLGFKTLQKVQKYQVDVLGNYTLVKKEKRQNFPAQRR

SEQ ID NO: 5116 - protein, 1113 aa, synthetic construct
  REGION 1..1113: note = Synthetic
LNAPARLHCATGLFFYSRRQTMNNVNYVVGFDVGLYSVGCCALEVDESGRPVRILSALSHIHDSGLDPDKQKSSTTRLATSGLARRTRRLYRRRSKRMKTLESFLKQQKWVTRPFEDYDDPYYPWRVRASLATEMEKDPSVLGEKLSVAIRHIAGHRGWRNPYVSVKSLYTVTPDSPAFLEIKKNIQNATGKPLNADVTVGQAICAIELGKIKVRGENNKILTARLFQSDLANEIWKISQVQGLPETLTKQIIDHVFHQRTPKGSFYERIGSDPLAPSHKRALKATDAFQRYRIVTVLSNLRIQESDYRPLTPDELQKSFSFLIQAKTAKRPTWNDLANLLGIPRNKLRGTAVVTEDGEVSRNQPPIHETEAILSSTTIKPLKAFWKEATREEKDELIQALSNSGTPDVNSRAGNVVSEFISGLSDDEIAKLDTLHLPFGRAAYSEATLEKLTDEILSTGETLPAARSKCFTVPSDWVPPKPAIGEPVGNPAVDRVLKIVNRYLHAAEKKWGQPQSVNIEHVRKGFVSVKVTKEIDKENKKRAEKNQATRIEMAEKLGLDGAIRDSAVRRFQVLQRQNCQCLYCGAPIDFKTLEMDHIVPRAGIGSTNKRENLVAVCPSCNRSKNNLPFATWAKNNPNPQITVKAAVERTDFWQCDPDMNKKSFKKFTKHVQDRLKRTDADEEIDARSIESVAWMANELRARIAQYFNDKNSDKKTKVRVFRGSITSEARKASGIERRIEYINGPGKSRLDRRHHAVDALVVALMSSFVAEILTIRRNLKDAQRATESEETWRDFKGVDASHIKQFNNWSNNMKVLVRLLQQALDQDEIPVTKNLRLRFGNGRVHEDTGQALIKLPLGSEISSQMVKRSSTEAQWIALTRHPDFDAKDGLKENSEREIRIHGQILSSDDDVAFFPKDAAMMLVPQGAVELGNAIHHARVYKYAKGKKESFGILRVYTVDLLKHQHEDLFKAKIKPQSVSMRYGDPAVVRAIQAGEAQYLGWLVTDDELYIPNIEALATGQLKTLLDEYGPIRHWTVDGFPSPQKLRLRPRLLSKEGLSEESHSDIRKLLDSPGWRVSSNVVFGKGEVRVIRRTQLGWPRTQSASHLPITWEVK

SEQ ID NO: 5117 - protein, 1111 aa, synthetic construct
  REGION 1..1111: note = Synthetic
MKYKLGLDLGSTSLGWAIVELNEKDTPIRLVDMGVRIFPDGRDAQSHTPINAVRRQARQMRRRVDRIHIRKKRVLQLIHKYGMDFDIRTDKNLENPYELRVRALTQKLFSSELGRVLFHLSLRRGFKSTRKETRGEDGGKLKRATTALRTAMGDETLAQFQMQTGKYRFANQFDGTTIKDGALYPTRDMYLGEFREICKAQNLPDNIRQEFERAIFRQSPLKPVDVGKCVFEPEEPRAYKFEPDFQKWRALQQLNQLAILDKGIAIPLTGEQRSKLFNVMFNTFDGVSFEKNGRAKITFAKIKQILGLSRTSKFNLESEKRKDLDSDATGGAFYKIGEIEFWNARNDAEKSDILNRINDDKTDDSDLINYLVQEYGISAERAEQIIDIPLEEGVSNVSLKAIRKMLPFLEQGDLYHTAAQKVWGKHSDKDIPELVSLPYYGDLTALRSSLVLDKNGVYRTMNATVHIAMNQIRAVVNDLIHQYGKPYAINIEMGRDTRAGAQERSEIDAQQAKNKRENDRIRKELASIDITNPSREDFQKFKLWEALAKKPQDRMCVYTGRPITSLTELFKSGNFEIEHILPFSLTLDDSLANKTISAIDANKFKGNRIPYDAFNDPASPWSYDDVLRRAQNLPDSTKWRFNENAMERYLKDNPDCIARALNDTRHMTKMAVTYLQHICNNKSKVVGVNGQMTAMFRDMWHLNWWKDRADADKYRGSHIHHAIDAFVITCISPNMYYHIARNAGAAEHYFGKSQKEKRDIWFADMATPFDGFDYYDFKMKCENTIISYRKSIKDPRENGTVGCLHEETAYNLESFENDKTIKATMSRRVELPKTDEKREKFKKDFKNINKTTLQMFLSDTGVTNDDADIVPKFLDWCTARGIKKLRMLKSDVDISTYIPVFRTKKERNEYLRAYENWYVADGISAGIKNKHAKQEQLNKERELLDNFKSAAKRAYKWYVGGNNFCADIFEIRSDDKHYPKDAGKWKVDIVSNYMAETNPGVSLWHKKYPTARRIMSLRINDMVMAEFSKDDPQLPSGIRDTVAHQCAVENKDTVNMVFRVKKLNSSGTIYLRPHFIAKEDADTKSWIASTTSLKEHNARKISVSPTGKILK

SEQ ID NO: 5118 - protein, 1109 aa, synthetic construct
  REGION 1..1109: note = Synthetic
VKYKLGLDLGSTSLGWAVVELNDMDNITRLVDMGVRIFPDGRDAQSHTPINVVRREHRQMRRRGDRVALRKKRTLQLIHKYGMDFDIHSNVSLENPYALRARAVVEKLQPHELGRVLFHLALRRGFKSNRKETRGEAGGKLKNATASLQVAMGDKTLGQFQFESHRYRFAEQFDGNKIKDGAFYPTRDMYLAEFNRICTAQGLSDEMRKEFEHAIFHQRPLLPPVIGTCMFEPGQLRAYKFEPVFQRFRVLQQINQLRIIDNGVVTELSGEQRQKLQDILLRTFDGVKRDKSGRVKITFAAVRKMLGLARGVRFNLETEKRKEMDVDTTAFAFSECGLSDFWYACPDDKKSQILARINDDTLGDDDLVDYLVENCGLNPDVAAQLIQRPFEDGVANLSVCAMQKMLPFLAQGDLYHVAADKAGYNHADRGVVQMAQLPYYGDVAALKPSLAPDKNGVYRTMNATVHIALNQLRAVVNDLIARFGSVPYAINIEMGRDVRAGALERAEIDSQQAANKRENDRIASELVVMGVRVSRENIQKYKLWENLGKNPLDRRCVYTGEIISKEKLFSPEFEIEHILPFSRTLDDSMANKTISAVAANRFKGNRSPDEAFTDSKSPWHYDDVVARAQNLPGATKWRFNRGAMNAFLRDQDCIARALNDTRFMTRISVTYLQHVCADKYRVTGMPGRMTAMLRDAWHLDWWKDKADAEKYRGNHIHHAIDAFVVACTGAGILQRLSRNAIETDKLFGKPQKEKRRQWFVDMNVPFDGFDYYDFKMRCENTIISYRQSQKSPKDSKGTIGCLHEDTAYNLEFFERGTSAVMSRRDALPTTDKDRKAFTKDFNNVNPKTLQMFLKDTGTTNDEPNIANKFLDWCTLRDIRKVRMYKRGVDVTTYVPVFRTKRQRDTYRAAYLNWYVASGIAGGIADKKMRLAQQEKEKALLQEFQNAAKLAYKWYVGGNNFCADVFKMRDDDKRYPKLRGRWQVEILSNYNAQLDAGSPLWRRKYATAGRVMRLRINDMVMATFSKADPKLPKGLVETVMHQCAIENTDTVNVIFRVKKISSNGTIYLRPHFIAKEEGDTKSWAASATSLQEHNAHKVYVSPSGKLQCSE

SEQ ID NO: 5119 - protein, 1108 aa, synthetic construct
  REGION 1..1108: note = Synthetic
MKYKLGLDLGSTSLGWAAVKLNDAGAVEQLLDFGVRIFPDGRDAKTHAPINVVRRAARTMRRRGDRVKLRKKRVLQLIRKYGLDFDIRSNPILENPYELRVRALEHRLSPSELGRVLFHLALRRGFKSNRKETKGENGGKLKAATDALASAVGDGTLAQFQVQTKKFRFSNQFDGNVIKDGALYPTRDMYLDEFHRICDAQGLDKEMRAAFENAIFFQRPLIPPVVGTCIFAAGQPRAHKFEPVFQRWRALQQLNQLAILDNGQNVALTDQQRQCLVDILLYNFNGVKRDRGGRVKITFAEIKKQLGLSRTVKFNLESEQRKELNVDSTGFSFAEIGELDFWRSLTDEQQSDVLNKINDDQTEDAELIEYLVAHYGLSASRARAIIDIPLEDDVANVSVVAMKKMLPFLEGGQLYHLAVHSAGYHYGEQDVPLMDKLPYYGDLDVLKPSLMPARDGAYRTMNATVHIAMNQIRVVVNDLIERYGRPCAINIELGRDVRAGAKERAELDKQQSANKRKNDAIRAELAEIGILNPSREDFQKYKLWENLAPQPQNRRCVYTGEPITSLAALFKSGRFEIEHILPFAQTLDDSLANKTISAVAANRFKGNRSPAEAFDDPASPWAYADVWARAQNLPDGSRWRFDRDAMEKFTRHGDCIARALNDTRFMSVMAVNYLKHICSDKNKVRGLPGRLTAIFRDMWHLDWWKNHDDADTYRASHIHHAIDAFVIACMGAGNLQKLAENATHLEDFHGKTLKEKHRQLFADMYLPFPEFDYYDFRMRCEACVISYRPSVKEPAASDTVGCLHEDTAYKLEKFETGTRATMSRRIALPTTADARAKFKKDFDSLNPKTLEMFLAETGVANDANDIADQFLNWCQMRGIKKVRMFKTRVDTTTYVPVFRNRGDKNAFNRAWTEWYAAAGIARGMTEPKAKKAQQEKERRLLALYQNAAARAYKWFVSGNNFCADIFEIRSDDRRYPALAGQWQSEIISNYCATLNNGTPMWRCKYATARRVMRLRINDMVMAEFSRDNVPLLKGLEDAVRHQLAVQDTDTVNIIFRVKKISSNGAIFLRPHYIAKEDADTKTWKANATSLQKYKARKIRVSPTGKVLE

SEQ ID NO: 5120 - protein, 1093 aa, synthetic construct
  REGION 1..1093: note = Synthetic
MKYKIGLDLGSTSLGWAVVELNEADQITSLVDMGVRIFPDGRDAKSHKPINVIRREHRQMRRRGDRVLLRKKRVLQLIHKYGLDFDISADIKLEDPYVLRARAVSDKLSSAELGRVLFHLALRRGFKSNRKETRGDSGGKLKKATLALHDAIGDKTLGEFQVDSKRYRFADQFDGNKIKDGALYPTRDMYLDEFNRICSVQNMSDDMRQQFEYAIFHQRPLVPPEIGTCMFELDQPRAYKFEPVFQRFRVLQQINQLRIINNGEIKELTAEQREKLQDALLATFCGVKRDKSGRPKITFAEVKKLLGLSRNTKFNLESEKRKDMDVDATAFAFAECELADFWRACTDNVKSQVLAHLNDDELSDSDLVDYLAHEYGISQDKAEKLIQQPFEDGVANLSVCAMQKMLPFLEQGHLYHIAAKEAGYDHADRGIVHLDTLPYYGDVMALRPSLVQDKMGRYRTMNATVHIALNQLRAVVNDLIARFDGEPYAINIEMGRDVSAGADERAEIEKQQAANKRENDRIATELVAMGVRVCRENIQKYKLWENLGKSPLDRRCVYTGEIISKEKLFSPEFEIEHILPFSRTLDDSMANKTISAAVANRFKGNRSPDEAFSDPKSPWKYEDVVARAQNLPDATKWRFNRGAMDVFLQGKECIARAMNDTRFMTRMAVTYLQHVCADKNRVNGMPGRLTASLRDEWHLNWWKNKAEESKYRGNHIHHAIDAFVIACTDENILRKLADAKSDMHTPFPGFDYFDFKMRCENTIISYRQSQKNPKDAHSTVGCLHEDTAYNLECFEDGGCGVNAVMSHREELPTTDKDKKAFAKDFKNVNPKTLQMFLNDAGVANEEPDIAIKFLDWCAMRNIRKVRMYKTGVDVTTYVPVFRTKKQRDVYRAAYLNWYVNTGVASGIVDKKLRAVQQEKEKHLLQEFQDAAKQAYKWYVGGNNFCAEIFEIRDDDTRYPKLRGRWQVEILSNYNAQLNAGAPLWRHKYATAKRIMSLRINDMVMAEFSKDDPKLPKGLVETVAHQCAIEKTDKVNVVFRVKKLNSSGTVYLRPHFIAKEDADTKSWIASATSLQEHKARKVCVSPSGKILGLK

SEQ ID NO: 5121 - protein, 1538 aa, synthetic construct
  REGION 1..1538: note = Synthetic
MKRILGLDLGTNSIGWSIIEIQKERDIHTILGAGSRIIPMSKAIIKDFEKGVTKSQTAEKTDSRGTRILYERSNLRRERLHRILNVLNYLPESYSKYVDFEYKKGQFLKGCEPLLAYSDKLDGNSKRIFLFQDSYNEMEKEFRAVHKNLPQLNKKGKPFKLPYDWTLYYLRKKALTQEISNEELAWILLNFNQKRGYYQQRQEKEIKTNENKTVRFSILKVADFVETEDKVEDKTLFDIIFKDDKGNIYGDSKKKTTNPELWKNKTVNYIITSTKKKDETFSNSYREVKSEEDWEAIKRKTEQDLKEEDKFVGKYIYEAILKNPQQKIRGELIRTIDRNFYFDELAQILKTQKKYRQEDWNNNELFKKAVLELYPNNIDHQKLLLNQKNGFTYLFLKDIIYYHRPLKSQKSLISKCTFEKRFYIDKETNEKKTVNINGIPKSHPLFQEFRIWQLANNIRIQKRQQKIDEKIKLNIDVTDSFIKTNEEFKDFFEFLINKKDINQPQLISYFIKDKKEKEKYRWNYTDDDKIKLECNQTRQKLKSKFSKDDLNKYSDELEINLWHINYSVTDATEYDKAIIRFCRKNKLSEETQKNLQKLPMLKKEYASYSEKAIRKLLSLMRCGNLWSQETIHQNTLNRIDKLLTGEFDKTISNRVREKSITLDEISNFQGLPLWLASYIVYGKHSEVDVTQWKTTKDLDDYIKSFKQHSLRNPIVEQVLLESLRVTLEIWKYYGDKLNIQFDLFLNENTKKEEKVYARLFDKIHIEIGRDLKNPKKVREKISKRNTKQKDTNQRIRELLYEFKNFDDVKEVIPTSKTQFDKLKIFEQTILAQYSEKELKDEVLDGKFTVEKFINKSQPTTNEILKYRLWLEQKYKSPYTHKTIMLSELFTDKYEIEHVIPQSKYLDNSFNNKVICETEVNSLKDNTLAYNFIQEYQNADVPLSNGKKVTIVNQSDYEDFIKENYDGLKQENLLREEVPKKMVERQKNDMRYISKVALKTFSNIVREDGEQESTVKNVLSVPGKVTSILKAKWGLNAIWSSLVEHRFKRLNRLICGEENENNGLFGKYIKDGGYFKPEVPLELRDDFQIKRIDHRHHALDALVVACVTRNHINYISNNNAKSNIKRYDLGKILRNTKEIEKTHPITKKRTTHVVLANYKKPWDSFTVDIKNSLEKIVISYKQNLRAINKATNYNLRYKDENGNFFHDKNGKKIKKRVEQTKGKKNWAIRKPLHEDTYFGIMESGKYKGDLVKREYLNSSFTTKKIKDVVDDTVKIILTNHLNQEKFKYQKDEKGKNLKPNEVAFSPQGVEDLNKNIVELNNGISHHPIKKVRVRFAKGKQFSIRKWTDDNDNLIKETKFVKSAAGTNLYFCICEKNGIRKYYVPTFEEILVTQKLEQDLKFEEKKNVPQRHPDFPDFNLKYYLQPNDLVYLPKENEEVNFENLSKNQLERIYVFKDGSGTTANFAPMLSADVIYNMNDNKKRKSFASEYGLNIDNLIKNEYGLNSPQLKNQNSIEGVQIKSICWKLKVDKLGNIIKVIK

SEQ ID NO: 5122 - protein, 1537 aa, synthetic construct
  REGION 1..1537: note = Synthetic
MKRILGLDLGTNSIGWALLNYEFQNNNSYIIDSGSRIIPMSKRVLSDFEKGVTKSQTAERTDDRGTRRLYERSNVRRERLHRVLNILDYFPNHYSNLVDFESKKGQFKKQEEPLIAYSNERDENGKHIFLFMDSYLEMENEFRKVHPSLPKLNKKGKPFRLPYDWTLYYLRKKGLTQELTNAELAWILLNFNQKRGYYQARNEQEISIDENKTVEYKVLVASDFKETEEKVDNKVLYNIIFKDEEGLVYDDSKKKTTKPELWKNKETEFIVTSTLKKDGSLSRTYREVKTEQDWEAIKRKTEQDLSDQFVGKYIYEAILRKPTQKVRGELIRTIDREFYFDELEAILRTQLKYRTNEWLDDEIYKKAVDELYPNNQEHAENLLKQKDKFIHLFLRDILFYHRPLKSKKSLISKCNFEKRFYKDSETGEKQTVAINGMPKLHPLFQEFRIWQLTHNLKIQMRETESNGKILLNVDVTNQFLKARKDFVAFFEFLYNKETITQKQLVAYFIKSKKDQASYRWNYSDDDKLKLDCNQTRPKLLSKLSKADKPKLTAELELKLWHIIYSVTDKKEYYTAIEKLSKKHQFEEETFKRLERSPMLKKEYASYSEKAIKKLLALMRTGQNWKEDKIDKKTLDRIDKLITGEFDESLKNRVREKAIHLTEISDFQGLPLWLASYVVYGRHAEVDVTQWKNSKDLRDYIKGFKQHSLRNPIVEQVLLESLRVTLDIWQVYAEKFNIPFETYKDEKTKKEYKNYERLFDEIHIEIGRDLKNPKKVRERISDSINKNKNTNQRVRNLLYELKNYEDVKEVRPKSRTHFEKLKIYEQTVLSLFTDKELAKETLEGKLTVDKFIKKDVPTSTEVLKYKLWLEQKYVSPYTQKIIPLSDLFTSKYEIEHIIPQGKFLDNSFNNKVICETNVNKLKDNRTAYVFIQEFQETEVPLGEGKSVFIPSQSSYEKFVKDNYDSKKLSNLLLEEIPQKLSEREKTDMRYISKVALKIFSNIVREDGEQESTVKNVLPVAGGVTAKLRASWGLNAVWSELVEDRFKRLNRLICGEENEENGLFGSIKKDGGFFKPEVPLELKPNFQLKRIDHRHHALDAIVIACATRSHVNYINNQHAKENAKRYDLGRKLRETKEIEKTDVLTGEKTKHTVLADYKKPWDNFTASAKASLQVIVISFKQNLRAINKASNYNWQYKNEKGEYLYGKNGKKKKQWIEQTNGKRNWAIRKPLHEDTYFGLIENGEHKEHLVKREPLNTSFNEKKIKDVVDPVTKQILLKHLKQEKFLNQKDENGKALKPEEVAFSQAGIADMNDNILELNNGTFHHPIKKVRLKFNKGKQFSIRKWTDEEDNLIRETKFVKSASGTNLYFCIYEKDGERKYYVPRFEEIIETQKLEQNLRLSEKKNVPERHPDFPDFKLKFYLQPNDLVYVPIEENEDVNFSNLSMRQLHNLYQFKDGSGTTANFIPMYSSDTIYNLKDNSKRKNFAKEYGLNYVDLIKNEYGLGSPQLKSQNTVDGIQVKSVCWKLIVSRLGEVIKIER

SEQ ID NO: 5123 - protein, 1175 aa, synthetic construct
  REGION 1..1175: note = Synthetic
LYAHNIAHQENLLKQKDTFIHLFLKDILFYHRPLKSQTGLVSRCSFEKRVYVDSLTGDKHEVKIKGMPKSHPLFQEFRIWQLAHNLRIQKREAEENGKLKINLDVTNQFIRNKSDLAKFFNFLYNKKDINQKQLVAYFIRDKKEQSLYRWNFTDDNKIKLDCNQTRPALLSKLSKEDKRKFDEQFELKLWHIIYSVTDKSEYDTAIGRFGESNSLSEETTEKLKRAPMLKKEYATYSEKAVKKLLGLMRCGCHWSEVSIHPSSIQIIDKLLTGEFDERIENQVREKAIKLDKIEHFQGLPLWLASYIVYGKHSEVDATQWKSSKDLAEYINTFKQHSLRNPIVEQVLLESLRVTLDIWEYYAEKFGLQFEEYIDEKTGKKVKSYDRLFSKIHIEIGRELKNPKKVREKMTNSNNKNKDTNQRIRKLLFELKNVKEVENVIPNSRTHFDKLKIFEQTVLSNYSEKELKAEKLDSKLTVEKFIKKNQPTFSEILKYKLWLEQKYISPYTGKIIPLTQLFTSKYEIEHVIPQSKFLDNSFNNKIICETEVNTLKDNRTAYTFIQEFQEAEVPLSGGGSVSILKKETYEKLVKENYDGRKKENLLRETMPQKMSERQMNDMRYISKAALKIYSNIVREEGERESTVKNVLPVAGKVTAKLRREWGLNQVWSGLVEERFKRLNRLICGEENENNGLFGTWVDDGGYFRTEVPLEIREDFDIKRIDHRHHALDALIIASLTSNHVNYINNEHTKSDLKRYDLGLTLRDTKQIEKTHPLTEKKTKHTVLGNYKKPWETFTQDAKSALQEIVISFKQNLRAINKAQNYNWRYKDNAGKVVYTKNGVPKKQWIEQVSSKTDKTSNNKTNWAIRKPLHEETVYGILENGEYKGDLVKREPLNISFDEKKIETVIDPVVRSILLRHIKQDKFKGQIDEKGNIFKPEEVAFSAKGIKDLNENILTLNNGVFHHPIKKARLRFPKGKKFSIKKWEDKEGNLLRETKFVKSATGTNLYFCIYEKEGKRKYYVPPFEEILEIQKLEQDLPLEQKKNVPEQHPDFHDFKLKFYLQPNDLVYIPVKNDEDMGFENLGRQQLENIYLFKDGSGTTANFIPMFSADVIYNISNKENREKFADAYNLDKGELIKNEYGLGSPQLKNQNSVDGIQVKSVCWKLQTDRLGNITKVLK

SEQ ID NO: 5124 - protein, 1090 aa, synthetic construct
  REGION 1..1090: note = Synthetic
MGGFFPYRLALDGGIASFGWAIYALDRNGEPCDLIDGNVLLFPTAIGASNRREKRSARKTNDRKQLRLKKICEFFASDFQGYNREKAPADVLNTSPFRLRANALDRQVSLAELQRICLHMAKHRGSSAIRMSEDEEIAKEGAAISSAFARTQVQMLERSARTYGELLWRIEKANNRKSGQDTTKIRISKQGNKAGDAYSHYPLRFLIEQEFDKIMLAQSAFHDELTQEKINALKEILFFERETITPKPGYCLYIENERRIPKLSRLFQLKRIYEEVNNLRIDTAEGIRILTFIERDLLIDQLMAGVTLGKKNTKEFLKLKGKDKLYLGKKDTLVIKPYPFDCLLGQDAVLGDRWAEMSEQQQDELLDILATVWDDTRAHIALKKLLNCNDVLARAILAVPLPSGYGAIGASATREIIDVLEANICSATEAAMLAGLKERAIFEGDLLPRLPYYGEILGNHVSFSDNAGSSLPYQEKVFGRIPNMVVHRALIQLRGLVNSIIKKYGPPTQIHLELGRELSMSEQERDDIQKTNENNRKVNDVIRNKLVKNEEKPNRSNLIRYKLWERQKGTCIYSGDNIRITDLFGASTHVDHVLPWSVTCDDGLANKVVCTATANLFKGNNTPHDAFSGAEGYDWAAILRRVDRMIPAMKWRFTADALEKFEDENAGSFSARAMNDNRYIAKLMRFYLSSICRQQDIVVSNGRITSNLNRAWGLDKFFVDHSEIIQEQIGKGKGRSKRADHRHHFVDAVAIGGVTRGMIQKIQTEAGRVEREGAENEFFRRVFAPLEPPVRDLEKRVLALLQQMRPVYKNNHKKQGQLHLETRNGIIDGPDRHGYYINRVRKKITDLPNLEKLNALRIEQTIPDLDEVVKSRERLKAIKTGIENCWEAARAKLLSENQQAIVENNKPKEITDTVVFKVARDLYLSAGGANEYVIYKREKLIVPAHAIVGNRPRFGYVSGNNQRIDFYRNRGTGKLGWQCISHYEAINEDRKDALFIPESKKDVNELIFSLFKDDLVEMDCPIGEGTRDLYKVAKFTKGKMMVVPVLDARMSTDGRQDLGGRGLGFYCDAKARKIKQDKTGKIIWKSSRLQ

SEQ ID NO: 5125 - protein, 1137 aa, synthetic construct
  REGION 1..1137: note = Synthetic
VLFVDSIGDETVETKDAIKYRLGLDVGTNSLGWAVIELDEDDAPCAILAAGSRIFSDGREPKSKSTLAADRRQARQMRRRRDRFLQRQTYLMDQMRKMGLFPPRDSQEAREMQKIDPVELRGRLLTESAQTVLADIRSRRNRLGQPLLAPGISEGLKPQYLIGRALFHLNQRRGFKSNRKDRSDEVTSGKVHGSIRELLKQMGLPQDRIDAIKSLKERADLTYGSFLWNRRRKGGTTRARMGEDGKLYEIYPQRELYEDEFEKLWSACSQEFPEILDPSNREKIHEVIFTQRPLKAQERGRCVYCPDEDRTYRALPSFQRYRILQEVNNLSWSTSKGTNEFLRDHIDIRDRIIGDLEEKKSLAFEKMKNYLKEAEIVDENIVFNFESERRKGFDGNMTSFEMRKDKCVGPLWDEWDLDRQDAFINAIFEQVPDKKRSGEYREQTDEEVLERLVSDFGLDPEKAENCLNARLDDGTASISPKAARLLFEKMKNECLHQPDAVEALSAERDDFENPYTRAGRGKVIGHLPYYGKAFEDGRHIIPGKRNPEDEGNDLQYYGGITNPTVHIALNQIRIVINELIRRFGLPHSIAIELGRDLPQGARYRSGFERLQSDNQNKNREIDEKLKELGQYPNRDNRLRLQIWRDQNECCPYTGEMISVSDLFTDRVQVDHVIPFSRTLDDSRANKVVCFQRANAFKGNRTPWEAFSESPQNYHWESIVERARSTTYQTKRYNSRKKRWEDMTLSQGRKFQKDSMDRYEREGGFLDRHINDTRYIGRVAREYLENICDFRKIDVVTGSLTALLRKYWGLNSILNNRDNDDQPKKKNRDDHRHHAIDAIVVGMTSRSMLQRVSTATNLGGKVESDKLLIRNIDPWEKFRTDVRNVVGDINVSHRPTHKGSGKTGARVTTDGQLHNDTAYGIVGELDDDRVVLRRNISQITDPKKIESIRDNYLRSVFHQAYIDGKANGVASKAKELGIRSIRCIENLSVIPVRDASGKAYKGYKGDSNWGLEVYEYPAGHEKEGKWEGIVITRFDANSSGFQPGVTRRPHPAARLVMRLRVNDCIEIEKNHTTQTLRIQKISKDRIYMAPLCEANVDARDRSSEDIFKFLPAGLGTLKKIKTRKIHVSPTGLINYEKR

SEQ ID NO: 5126 - protein, 1028 aa, synthetic construct
  REGION 1..1028: note = Synthetic
MKLRFGLDLGTNSIGWAVLELDNNGDPKGIIRTGVRIFKDGRDPKTKVSLAESRRVARGQRRRRDRYLQRKRYVMALLVRYGLLPEDIDAQTQLVDLDPYKLRAKALYVLLHPHHLGRLLFHLNQRRGFKSNRKAEKKQKDAGVVKDGVRRLAEKLKEAKAITLGEYLHRLHSSGQPVRVRRTADKDQAYAFYPDRASAEAEFDTIVARQRQLGLQLTDDQVATLRNAIYYQRPLKPVEPGNCTLEPNEKRAPKGHRITHLFRIWSEINHLTYSVPGKAAATLTLNQAQKAVEFLQSKKEISFEELRDLLELDPDSRFNMESDVRKKLLGDSIADQMSKPGVFGKKWALLDDAAKDEAIDRIRDEEDNEVLCRWAQERFGLSDEAAKNFAAVRVEDGFGRLSVKAMTRMIPFLQEGFTYDKAAGLAGYVHSGIGHDGNRDKLPYYGEVLTRYVVGGTGDLDAPDEKKWGKLGNPTVHIGLNQLRLIMNLLIEAHGRPHEIVVELARDLKMPPDAKLRLAKTQRDNQAQNDKAKELIAQGGGKISRDALLRYRLWSRMSGLDHVCLYTGEKIPGSKIFSDEFEVDHIVPYSASLDDSFANLALVTRRANRFKGDRTPFEAFAGSPAGFDWDAMLSRANTLSSTMAKRFGPDAREKYKAGEDFLNRQLNDTAYLSRVAREYLTVICKSVWVLPGRMTATLRHMWGLNTILSDRGKKERTDHRHHAIDAITIACTDRSLVQKMQRAAGLRGEAELGRSGTLGQFDPPWIGFRDEVKEKVRRIVVSHRVDHGKGGALHNDTAMAVRGDKPHAKGQWEVTYRKAIGGLSLGQIDQVVDSTLKNRLLLEVVPGPEKELTKRLTDFSERTGIRRVKIVDRQGNIAQITNHQGQRYKAYKKDGNYALWVVQLPDGKWRGLCESMFDANQPRKIPLWKQQWPAGKLIMCLHEDDTILMRREDGTDGLFRVVGTSGDMVTLASIHEGGDLRGRDRNPSEPFKYFSPRVAGLKARNAVPVHVDPIGRVRSPRPFTALTP

SEQ ID NO: 5127 - protein, 1134 aa, synthetic construct
  REGION 1..1134: note = Synthetic
MKNCKNFSFDVGMTSLGVAVNENGEIIHGDVLLMHLDAGSVKAQAGRRRMFRTREAHKAREAVLESLWRSIGKEPLQRKRFTKITGPSGKTTFQKTKADKRLEREFPAKGDSTVYASSLLRIMLLEGEPLEDWQIYKALHAGIQRRGYDQNVPWKTREEAREKEQGRKPGSEKKKKEENPENQIDQFNQDLQEMAPDARYHLPCYYDAWKMGLWDAQTKKIIHIRQQSNSTHKARKYNASRASVTNETKKLLSQAAEQIPELNEHLTEDKLDQLLYGGQQNALDKRYPSATKIDGLLGQKYPRFENRIVSECALIPRLNVCKSEKSLAIEVGFLLRLVDWRYETEDEHGSKSEHSLTGQQIINKFQECDSAWKKKSQAYKPEEYAKCFKLTPSKVAKMAEKLGGSVKTGHEDIPASRHAGRSRFSQPALHLMKSLILSEKTPKGFYEELSQIVATQEKENPGAEFGYQIFPDIPYKYFLDDFRFLEKMGNSRDTIHVPDMSLAERYLNEYGDVESAIQKVINSCNWPELRHRLNVFRRELENLIKKYGTPDAVHLEFIREDFLSPKRKNEYSKRAKTGNEDRQKAIKTLKELKIPITEKNILRYRLYTEQNKRCLYTDDSIDISALESYDIDHIFPKEDGGPDAYYNKVLTSADVNRKQKGKRLPCECDFINWAAFKTRLKNLHLGNNKKKLLLASPRKEAEELVEKYTGLSGTAYIARLARDIVCLRFGWQPGAEGEQQRIFVISGGLTSKVAKKYKLYQALGDGSKHYQKDRSDHRHHALDAMVISYLRQWARDKNKTDFFKFPAGVNADYFAKKLACVNPHYVTKMRPALAEQPKPNRSAGKNKMNKKEYKNLSKDPEERGQWYTNKSETGKGTSQHGYLFYKDDKGKVCHKTIHSFRSPYEVKKEVEKKASKIIGLFYQGKSIDLPSQDQITATQLGRDARLKFGEYMIIKILKKEVIIGDPKQPQEQSKDTNSTGRYRIPFADLEKIKVCNELKREKPFDLDGFSVDKDKTLTGTYRVDNGQPSLRNFIIIDTKTSEEKLVNFASLVKYLAEKNWLNDLEVKDIVTINKNHISYINKVKADNLPNQNLPDGRYQIKRFESGGNEVCLVSQNGTVYRMNSKVLEYAKRTD

SEQ ID NO: 5128 - protein, 1118 aa, synthetic construct
  REGION 1..1118: note = Synthetic
MSMTKYRLGLDLGTASIGAVAFSLDSNDQPSEIIWHAVRTFDEPTEKSQTGRTPKKAARRDARQKRKQFDRKASRLRRIAHLAPLLKLDARKISPDNGQNLPRLRAEAIEHEISLEDLFRIFLKLGKRRGYKGQFKVKASDGEVKAGVEQITQLMAINGLQTVGQYLYHRLQRGLPTKLKVQEILSTKKRKELIDINPEHYNLYITRDMLEHEFDLIWETQAKFHPVLNEKNLGKPVKTNFFEAIFFQRPLKSPAAMVGNCSLINNLPRTARAQPSFQTFRIEKQISDLRWGMRKTSQPLSVEQKSCLRILLNDPVNLTKEGKFSFKKFYMALDDLEISYPAKNLNMDRQSKGGREELQGNRTLKNFDQLGLLNEWQTLSSNHQVSTLNFLSDLGSPEQLDDDQWHTQIKGAAKGKKAKMRQFADEVINFINLLREHEKFNRLTSMGFDAGRAAYSIKALNQLNEWFIAPYWQEAPQGTDLPRIDEEAAIEQCFSKLEQITKSTQRLNVTPETGNDVVDVALRQIKKLVNQCIDEHGEPEQIVVELTRDMGKSVQQRNEIEKRNGLNKKARDTAKKEIEKLNKVPTNNLIRRYLLWQEQVSRCPYCTNKIEVDQALHGGETHYEHILPRSLTQVGLKTSEIVLSHKTCNELKGNQTPRQAFEKNSQRWGAVEQLALHFKQRKLYRKSQLLLIDNYEDDTTIDDFSDRQFQETSWISKAVAQWMRNICHDVFVSRGQLTARLRHIWHLDTVIPDVRIEEGYPVLDTEGKSISIEDYRIGKSQWEGRDLSAGTKRIKRSLEKRCDHRHHLIDAITISMVSRKLYQNMAKQYKVEQFKLEEFYRQDSHYRLEQEKPEPKWSIEPPVKTLRDQAIRVIRDCNISHKPDRYSSGGFYKDTAYSITTDENDNKTYLALRMDLLKLIDEKSLEKTLKNLQNIISPSIRKIVSEAIKSDFDNVQETLQRIEHPLYSTKEKPVYIRKVKCNRNYSIETAELITFGKNKEHKKYLQDAGNAYLEITLNEEKTKVTDSRLVTMPQAARGLSSLAENTIRFYKGDTLLNKSNERLYVVKQIKSASGGILFLIPIVETRPVSELDKKENSGVLLRASVKKLSNFIHVSDHV

SEQ ID NO: 5129 - protein, 1070 aa, synthetic construct
  REGION 1..1070: note = Synthetic
MAKDFEYILGLDLGETSIGWSVVRLNEGVPEHLERLGVRICSDGRDAQSHEPLSVARRIARGLRRRRDRYIHRRIRLTDVLVKYGLMPEDIKERKKLQALNPYRLRSEALDRKLEPYELGRVLFHINQRRGFKSNMKTDRKDSESGAMKQAILKTRAKMEASGARTLGEFLYFLNKDKTSTQEYVPVRMRSHSEKNKTVYEMYPDRAMYEDEVHKIFEQQELSPEAQTEIFNTIFFQRPLKPVELGFCEFEDGERRAYTASVVFQKFRALQQINQIYVQDDYERRPLTKEEKDILKHFLLEDFSALDKNGLLTWAKVRTLLKLQKKKFNLESERRKGLNADVTSWKLSNAACFGREWFSFSDAKKEEIVALITGAEKEEELIAELKTKYGLSDERAKNTANVSLPDGVASLSAKAMKKLIPFLEEGMLYDDAVKQAGYVFSSSFKGVLPEKYETFIEPESGECFDELPYYGQVLRRYVLGGVPSEENKLFPEKYYGKINNPTVHIVLNQLRKLINSLVAKYGHPRKIVVEMARDLKLSKKQKDAIAKEQALNERENKRIGAELERLDIRNNYDNRMKYKLWEDLSTDPTKRSCPFCGKQISQQDIFSPEFEIEHLIPFSRSFMDGRSNKVLSCRRCNREKGNKTPFEAFGNDSTRWNAIMGRVESLPENKRWKFASDAMSRFERDGDLLARMMTDTQYMARIARRYLCCAANPNQVYGIPGQLTAKLREHWGLNSILSDQKEKDRSDHRHHAIDAFVVACTDRGTLQKYSTERRDYAKPEMPSEKAPHIPFADFRLSDIKRVFDEIIVSHKPDRGNARAAILKGGTVAKLHEETYYGMGGEGSKKGTWKLIQRIPVSEIKKASDLDCLIDQKGTANPLRVLLVGASESEQEQIIASYFARRGTHKVRTYRERNKDVILPFKDKDGKLYRYAVYGSNAYAEIYCPDRGKNAGKWQVEIIPNYCAHQKGFIPKWRHTDAHAKLIMRLYRNDMVAYEKEGKTVIARVKKMGGNGVIVFRNHLIAKEEGDRLSWQAVVSGMQSANLRKIYVDVLGRVIDPKRPMTQNETDGQDN

SEQ ID NO: 5130 - protein, 712 aa, synthetic construct
  REGION 1..712: note = Synthetic
LAEKLKEKFALTDEKAAAVADTSLPDGVASLSRKAMAKIIPHLERGLLYNEAVEKAGYTFSRRFKGVLPEEYTTFINPETGECYDELPYYGQILERYVLGGVKSEENKLFPEKYYGKINNPTVHIILNQLRKLVNALVKEYGHPKRIVVEMARDLKMSEKQKREVAKEQAANQKDNERIGAELERLGVKNNYANRMKYKLWEDLSADVTKRCCPFCGKQISAEGVFSPEFEIEHLLPFSRTFMDARSNKVLSCRRCNREKGNQTPFEAFGADESRWNGIMGRAEFLPADKRKRFSPDAMERFKDEEQLLARMMTDTQYMARIARMYLCCAANPVQVYGIPGQLTAKLRDHWGLNSILSDQHEKDRSDHRHHAIDAFVVACTGRGTLQKYATERKDYFKPEMPDEKAPHLPFPSFRLEDVKRLFDTMVVSHKPDQGDPRGAIRNGKTVAKLHEETYYGMGGEGKKGCYLLIQRVPVSEIKTAADLDCLIDQKGTANPIRVLLELYPEKPASEVIADYFAERGTKKVRTYRERSKDVILPFKDKNGKPYRYAVYGSNAYAEIYCPDRGKNKGKWQVEVIPNYCAHQKDFVPNWRHTDAHAKLIMRLYRNDMVAYEKDGKTVIARVKKMSVTGQFSFRSHLIAKEEGDKLSWNPTASGMQAANLRKIRVDVTGRVFDPQKGKVKAGGSENQTNGSLPSDVEIKPFSEGAESSNDV

SEQ ID NO: 5131 - protein, 594 aa, synthetic construct
  REGION 1..594: note = Synthetic
VLPKAVIGGTQNPADKDKKEKYYGKINNPTVHIALNQVRNLVNALVERFGHPESIVVELARELKLGKKAKDELNRIQTENTKENDAIAKKLEEECHVKNSYDNRMKYKLWTDLSDNASQRCCPFCREEKPISKERLFSDEFEIEHLLPFARSYSDARTNKVISCRACNREKGNRSPWEAFHADEKRWNAILGRVERFSLKHDENKSRAKKFREDAFQEVDKVLDRMLKDTQYMARVARQYLCFAAHPSKVYGIPGQLTAKLRHHWGLEALFPEDQKDRTDHRHHALDAFIVACTGRGTLQKYATERNDYAREMPQEKAPHLPYPDFRLRELQDAFDRMVISHKPDHGNPQKAIKEGKTVAKLHEETNYGFAGEGEKKGTWKLIQRLPVSEFKTEADLDVIIDQAGTADKIRALLDGKDKSEHEAIIQKYFSDRNTRKVRTYRERNKKVVFPFKNKNGKVYRYAVFGSNAYAEVYCPDRGKNAGKWQLEVVPNYCAHQKGFVPNWRHTDAHAKLIMRLHIDDMVAYEENGKTVIARVQKMDAQNGVFFQENKVAKDEKKSGVGAAKMQMLNMRKITVTIDGRVIDPKRPKGQTGG

SEQ ID NO: 5132 - protein, 1100 aa, synthetic construct
  REGION 1..1100: note = Synthetic
LAQYYAIYFIKPNLSYFFTVKFLSRMLEHLFQRYEKIKNARYVLGLDLGVASIGWAIVDTSQQRIVKLGVVKFREGSASDNQDRRQKRGARRNRTRFLNRREKLRNLCQKYLTNGEPVLTTGSKNIWELRVKGLFEKLDNQEFAHILLHFNRHRGFKSNRKTDKGADTSAMKKTIAETRQKLEEKKQTLSQYYLDLIKDGQKIRANFTENDLCPDRAMYQEELDKIWEKQKEFEPYNQILTDELYQKIIEETIFYQRDFHQKKDKRNVGKCPFFPQNLRAPIYSMEYQEFRVRQIINNLRLTDDRNGVVDEFLPEKVKNYIYDRMTFQTKSKIKASEIISLIRKNKDCYRGSLLNYDKKEAFYGNRIGYELTQIFGETQAKKLIVEYDQKGENSALHKLIHTLRSCPFSENDKAEEWLRNYALNLKNEEGKSWITPEEAEKFALLNPDSGYGNLSTKALRLILPYLRQGFIYSEACEKAGLNHTDPNDEKDRKLIEKLEPIPAQERLNATVKKALNQMISLVNTIKKDKELPEIDAVVLETVRELKMPEEKRNGLKRRNDAKARRREEYAQILRQEGVRESGRNIRKYELWLELGLQDSEALNAIDIKNFSDFTRKVSAKAHEKYQLWKEANRRCPYTGEIIRLSDLFNTQLVDIEHIYPRSKTLDDSFMNKTIALRTANAQKENRLPLEYLKATGGNIEAFRTRVQHFQKGKRERFLATEIPEGFIARNYTDTAQITKVALDKLQEIFPDVIATNGSVTAVLRNAWKLQKSRDTLVHHAMDAVVISWTSRNIIQALSTISGQGGNIYNPQNERKQGWRKLPFSGFTEYVERELDKITVYHYNRKRLVQDKLDLKDKNPKKKPVVRGALHKETLYGKATVIHTDKKGKTKEVEVSTKRIKVKDDKGKPLPKSTLAKILSSDVRESVHQWLESPDSEYPKHPKTGHPIRKVRIDARLNPDKLLEICSHNLEKGQNAHFVANDQIYIAGIYQNAKGKRKLAYFSLYESLQNHKNKYPLLPETHPENPSFHLWLPVKAGDMFRFEEQEINGIYRVLSFSENSIVFAHHTKPIAEKDFKRSVDKFEYVTPVKVDILGNVTPKIT

SEQ ID NO: 5133 - protein, 1113 aa, synthetic construct
  REGION 1..1113: note = Synthetic
MKYRLGLDLGTNSIGWAVYSLDEDNEPEKLEDLGARIFSDGRNPKSKEPLAVERRSARGQRRIIYRRKLRRRETFRLLQKQGLLPLKKDEAQSLKLMNPYELRIKALDEKLEPFELGRVLFNLSVRRGFKSNRKDGSQEETKENSKSEKLTQADKCSNLSDAIKKSGYRTLGEFLWKNKESNGGTRFAPNRMDYYPVRQLYIEEFSFIRQKQEPFYPDVDWNSIYNKIFFQRPLKVQEHGKCQYMPEKERTFKAMPCAQKIRILQDVFNLTFIAEGKSKKLLPEWQDEIIKLLDSKEKVTFKDIRKKLDFDENITFNLESETRDFLQGNSTAVKLRSKNRFGEIWDSLSLKEQDDIVECLITAQEDSDVQKMLEKYDLTSEQKNFITKLVLPSGTTSFCREFSENVVNKIEENSKIFADSAERTERCQIHNVIKEVGYNYASQTVEKCEELPYYGKVLSGSTMGAKANPKNDEERFGKISNPTVHIALNQTRVVVNALIKEYGKPTQVVIEVSRELKASREAKNKMQQKIAANQRQNEILNKKIKDANSSILFPNRTDRLKYKLWEELDPENALNRRCVYCGKLISGADIFNDNTVQIEHILPFGRTLWDSEHNKTIAHTKCNAFKGENTPYEAFFKNPKGYNWNEILERASHLKDPQKRRLFSENAMETFEKESGFISRQLTDNAYLSKMALKYLKCVVEKDSNVWAVSGGMTKLLRDKWEIDSILKRKIGENEIFHFELKDEQIGTYKKNRYDHRHHALDASIIALIDRSMVQQISRLNQIGKKNRIEVPQMPVIRTDLIEKTKNIVVSFKPDHGAQGKLSKETLLGKIKMAEQVVISKIREEDIAFIKNEKVRSEFEKKLAELKDIKKVQKELKELYPVVWVFKEYYVCKENILGLKEKDFDSIIDKKIQKELREFTEAHKSEKIEDVMQKFSEQTKIKKVRCINRVQTPIEIKNKDGTMRYLCPEDYFAAVVWQIPPKNKDSKPAYKATFIRRDQVDLDGNPKIMTKPHPAAKKICVLHKNDYLEFEDKGNWYKCRIAGYAATSNKFDIRPIYAVSSCADWIIATNEAVLEPCWKPVPTQNWISVNVLFGEKSARPITVNPIGRVFRKK

SEQ ID NO: 5134 - protein, 1103 aa, synthetic construct
  REGION 1..1103: note = Synthetic
MKYRLGLDLGTNSIGWAIYSLDNDRKPLELKDMGVRIFSDGRDPKTKEPLAVARRIARGQRKIIYRRKLRRKATFRLLQEQGLFPKTKEETQKLKLLNPYELRVKALDEKLEPFELARVLFNLSVRRGFKSNRKDASAAEATSSAGSDNLSQAEKCAELSKAISESGCRTLGEFLWKNQNKNKGIRFVPGRMSYYPLRKMYEDEFNVIRAAQEKHFKNIDWNSIYNAIFFQRPLKPQERGRCQYMIEKERTFKSMPSAQKVRILQEIRNLKYQNEDGKTIPISEEQEDILLSLLDSKEKVAFDAFRKALKLNSACTFNLEKNRDFLLGNSTAVKMRGKNRFGDLWDTFSLEEQDAIVEKLITADEDGEIFEMLKKYNLSDEQNESIVKLQLPSGTTMLCKEVSEQIVHKMESLGCDYSTAIQTLGYKYADQSVEKYDTLPYYGKVLVGSTMGATPSADESNPEKKYGKISNPTVHVALNQTRVVVNALIKQYGKPAQIAVELSRDLKASREARNAIQKKQNENKKRNEITNKNIRDANPNIPYPNRTDRLKYRLWEELGAEGLPRKCLYCGKIISGTELFSNNKIIEIEHILPYSRTLLDAESNLTVAHVSCNAFKKERSPYEAFGSNPKGYNWQEILERANQLKSPAKRSRFAVDAMESFEKDSGFIARQLTDNAYLSKMALKYLKSVCDDIWSVNGGMTKLLRDKWEIDSILKRKIGDEEVAHFELKDDMIGEYKKNRYDHRHHALDASVIALIDRSLVKEISTLNARSLKNRIEVPQMSVPRLELQEKVKNIVVSFKPDHGAEGKLSKETLLGKIKREELIDISKMEVTDIPLIKNGKVRKDFENALAEKLDIKLVRKELKDVYPQVKIYKEFFVARAAISSLKENNIEDIVDAKIRAKLQEFVSTQKGQKFESLLEDFSDQTGIKKVRCLNRVQTPIVINGDVPRYLAPEDYFAAIIWQLPPKKDGGKTTYEAQYIRRTEVGKDNKPKTEVIEAWKREHHPAAKNLGVLHKNDYLEFSDGGNWYKCRVAGYAATNNKLDIRPIYSVTNCADWIISTNDYQLEPCWKLQKTQNWVSVNVLFGEKQARFITVNPIGRVFRK

SEQ ID NO: 5135 - protein, 1103 aa, synthetic construct
  REGION 1..1103: note = Synthetic
MNYRLGLDLGTNSIGWAVYSLDNEKEPQNLIDMGVRIFSDGRDPKTKEPLAVARRTARGQRKSIYRRKLRRRAAFRLLQSQGLLPKDKDEARKLKLLNPYLLRIKALDEKLEPYELGRALFNLAVRRGFKSNRKDSENEETAESKSTGKKLSQKEMCTELSKAISESGCRTLGEFLWKKQEEHNGIRFVPGRMSYYPLRQMYVDEFNAIRAKQEIFYKTVDWQTISDALFFQRPLKPQQRGKCQYMPDKERTFKAMPCAQKIRMLQEVRNMYYQNALGQKIPIGEDEEKIILELLDTKDKATFDAFRKALKLDASCTFNLESENRTFLNGNTTAVKLRSKNRFGSLWDELPLEEQDFIVETLITADEDKQVLDMLAKYQLSDEQKDAIVKVVLPSGTTMLCKEVSEQIVNKMIKTGCSYTEVVQSLGYKYADQSVEKCDLLPYYGKVLVGSTMGGDASKAESLPEQKYGKISNPTVHVALNQTRVVVNALIKQYGKPAQIVIELSRDLKVSREAKDAMMRKQNENKKRNEILNKNIADAYKIEYPNRNDRLKFRLWEELGSDTMSRKCLYCGKNISGSELFSKNIEIEHILPYSRTLLDAESNLTVAHASCNAFKKERSPYEAFGTNPSGYNWQEILNRANQLKNPAKRSRFAIDAMETFEKESSFIARQLTDNAYLSKTARKYLHAVCDDIWSVNGGMTKLLRDKWEIDSILKRKIGNQEIAHFGLKEEQIGQYKKNRYDHRHHALDASVIALIDRSMVQQISTLNAKSQKNRIEVPPMAVARLELEEKVKNIVVSFKPDHGAEGKLSKETLLGKIKREELVDIAKIEESDIPLIKSDKVRADFESSMAELKDIKAVRKALKDVYPQVKVYREFFVSRTAVTSLKENNINDIVDAKILSLIRNFIDLHKGEKIEDVLQKFTETKHNGKYIKKVRCMNRVQTPIVINDKIPRYLAPEDYFAAVIWQLPPKKEGAKPTYEAQYIRRNEVGKDNKPKPDCLKAPHPAAKNLGILHKNDYLEFSDNGNWYKCRVAGFSATQNKLDIRPVYAVTDCNDWIIATNENQLEHCWKPQKGHNFVSVNALFGEKRARFITVNPIGRVFRNH

SEQ ID NO: 5136 - protein, 1102 aa, synthetic construct
  REGION 1..1102: note = Synthetic
MKYRLGLDLGTNSIGWAIYSLDNDKRIVKLEDIGVRIFSDGRDPKNKEPLAVARRVARGQRKIIYRRKLRRKATFRLLQEQGLFPKTKEESQKIKLLNPYELRVKALDEKLEAAELARVLFNLSVRRGFKSNRKDASTDESANSKSAEKLLQNEMCAELTKTISESNCRTLGEFLWKNQKKNHGIRFVPGRMSYYPLRKMYEDEFNAIRSVQEPFYKNIDWNSIYNAIFFQRPLKPQERGRCQYMIEKERTFKSMPSAQKVRILQEIRNLKYQNEDGKTIPISEEQEDILLSLLDSKEKVAFDAFRKALKLNSDCTFNLEKNRDFLLGNANAVKMRSKNRFGDLWDTFSLEEQDAIVEKLITADEDGEIFEMLKKYSLSDEQKESIVKLQLPSGTTMLCKEVSEQIVHKMESLGCDYLTAIKTLGYKYADQSVEKYDTLPYYGKVLVGSTMGATPSADESSPEKKYGKISNPTVHVALNQTRTVVNAIIRQYGKPTQIAVELSRDLKASRDAKAAIQKKQNDNKKRNEILNKKISDEYKITYPNRNDRLKFRLWEELGTDGLPRKCLYCGKIISGAELFSKNKEIEIEHILPFSRTLLDAESNLTVVHVSCNAFKKERSPYEAFGSNPKGYNWQEILERANKLKNPAKRSRFAIDAMELFEKDDDFLARQRTDNAYLSKMALKYLKSVCDDIWSVNGGMTKLLRDQWEIDSILKRKIGEQEIAHFNLKDDMVGEYKKNRYDHRHHALDASVIALIDRSLVKEISTLNARSLKNRIEVPQMAVLRLELQEKVKNIVVSFKPDHGAEGKLSKETLLGKIKREEMIDISKIELEDIPLIKNDKVRGDFEKALADKNDIKLVRKELKDVYPQVKVYKEFFVARAMISNLKENNIKDIVDLKIRSKLQEFVAAHKGQKFESVLEEFSAQENIKKIRCLNHVQTPIEIKGDVPRYLAPEDYFAAVIWQLPPKKDGGKATYEAQYIRRTEVGKDNKPKAEVIEAWKKQHHPATKNLGVLHKNDYLEFCYSGNWYKCRVAGYAATQNKLDIRPIYAVNDSFDWIISTNDYQLEPCWKPQKGHNFISVNVLFGEKQAKFITVNPIGRVFRK

SEQ ID NO: 5137 - protein, 1128 aa, synthetic construct
  REGION 1..1128: note = Synthetic
MNDKNQKYRLGLDLGTNSIGWCIYSLDVNNKPETLIDMGVRIFSDGRDPKTKEPLAVERRTARGLRRILHRRKLRRRQMFRLLQEQGLMPNDASEAAALKSLNPYELRVKALDTKLEPYELGRALFNLSVRRGFKSNRKEAVQEKEKDSQNDAKSQNEKCEHLAKAIKDSGCRTLGEFLWKHKNTETQQTENDARNIGMRFVPGRSNYYPTRRMYVEEFDAIRKAQEPYYSGVNWDALHEKLFYQRPLRAQERGKCRYMPDKERTFKAMPCSQKIRILQEVYNMDYIDEYGKTIPLEEAQTDSLISLLDKREKLSFKAMKKELGIDESCTFNLERGGREYLQGNAAAVKLRNKKRFGELWDSLSLAKQDAIVEKLITADEDAEIISMLAQYNLTDEQKKNIAVTVLPSGTAMLCKEVTEMLVQKMEQNKIPLTVAVQMLGYTYADQSVREEDTLPYYGAILTGSTMGAHPEADESEPELKYGKISNPTVHVALNQTRTVVNALIKAYGKPQQIVVELSRDLKASREAKARIQKTITMNQKRNERDNKNITDITKIPYPNRNDRLKYRLWEELGSGSNSFSRKCLYCGKPISGSEIFTENIEIEHILPFGRTLFDGETNKTVAHTDCNRDKGDRSPFEAFGSSPNGYNWHEICARANSLKNPAKRTLFAENAMEKFEKDNSFIQRQLTDNAYLSRSALRYLRCICKDVWSINGGMTKLLRDKWNIDSILKRKIDDPEIAHFELKNDQIGQYKKNRYDHRHHALDASVIALIDRAMVQEISQLNKIRLKNRIEAPQMPVLRSELIEKVKHITVSFKPDHGRQGKLSKETLLGKIKKIEKVDIDSIQTDDIASIKDDAIRTRFETKRRELGDITKAKAALKTEFPKLDVFKTYYVSRTPIVSLTEKNINSIVDEKIKEKLKTFIKEHADLSFAEQLQKFSETEWIGKPSAAGKPGKKYRIEKVRCINWGQTPITITSSAVPRYLCPEDYLAAVVWQIPSKKKDTEPEYKATFLRRDEFDVNNKPKKLEKPHDAAQYICMLYKDDYLEFTESGATHLCRIAGLPASQNNKIDIRPIYAVSDCKDWIIATNENMLEPCWKPQKEEKRISVNVLFGKHKARSVTVNPIGRVFRK

SEQ ID NO: 5138 - protein, 1150 aa, synthetic construct
  REGION 1..1150: note = Synthetic
MRGRLLSRLARGILPVRWKTRAEYSMIRRKERHMNWRLGLDLGTNSIGWSVLSLNGRNEAEKLEDMGVRIFSDGREPKTGKPLAAARRTARGIRRNLLRRKIRRRTLFRLLQKDGLFPSLRGEAAELKQLDPYALRAKALDERLEPHELGRALFHLGVRRGFKSNRKDAQNEQDDKKKEKSEQNEKIQCFKHELKNGQMRTLGEYLFETKEFRFSSNANLKNFYPDRQMYEDEFAAIKAKQEPFYPALGWDAIHEAIFKQGKLEPQKRGKCQFMDEERTFKATPCSQQFRILQEVFNLTYTDVITNKATELSPAQQDALIAALDNKKEMSFSSIRTLLKINGTFNLETLNRDKLNGNATACEMRKDTHFGKLWDDKMKLAEQDALIETLITTDEDSEAERFLKKYPLTSEQRKAILRFPFPSGTASFCREATEALVATMRETRLQYDKAALVLGYEHSDQSVEQYDLLPYYGKALSGSTMGVKATPGTNPDELQYGKIANPTVHVALNQTRAVVNALIKKYGKPAQIVVETSRDLKASKEKREEITEQQKQRARQNDIDNQSITDGFRISFPNRSDRLKYRLWVELNASNAFERQCLYCGKQINAAELFSDNIEIDHILPFSKTLLDVESNKTVAHWKCNQIKGGRTPYEAFHANPAGYKWEAIRGRIAQLKNPAKRRRFSADALTEFEDKEAFIARQLKDTQYIARINLQYLKTLVDDTNIWATTGRMTGLLRERWDLDSILKRDTDGIKQKIDELSDNGKKIAEAEKAKLLREAKKNRRDHRHHALDAVVIGLVDHALVKKIMTENARGNLDKVKVPLFPLWAEIIEKMRNIVVSFKPDHGAQGKLSKETALGRIRQEALLPIEKLTKDDVPHIKDTRVRGAFEQRLAETKDFKAAVKEMQTDYPRIRVFRPCFVNRIPLANLKNKQNIAGIVDMGIQNKLREFVDAHPNEKFDKALVKFSEQTGIKRIRYKNHDQNPWEIKTRKNKSLPEEQRRYYGTEDYFAAIIWEIPPTKTGAKPEYKAQYVRRTEIDTDSNLKPEALANKPHPAATKICQLHKNDYIEFAENGVWKKARIAGLKGSDGRLDIRPIYATDDARSWIIATAEQMLEKSWKPVEGQNFVSVNVLFGKYAAHKIRVSPIGAVSRKAT

SEQ ID NO: 5139 - protein, 1098 aa, synthetic construct
  REGION 1..1098: note = Synthetic
MKYRLGLDLGTNSIGWAVYSLDSENEPNELVDMGVRIFSDGRDPKTKEPLAVARRTARGQRKLIYRRKLRRKSVFRLLQQQNLFPKTKEESQKLKALNPYMLRVKALDEKLEPYELARVLFNLSVRRGFKSNRKDGSGEEEVTSKSGEKLSQKDMCNELAKAIKESGCRTIGEFLWKNKDKNKGLRFVPGRMTYYPLRQMYIDEFNAIRTVQEAFYKSVDWEAIFDEIFFQRPLKAQERGRCQYMQEKERTFKAMPCAQKLRMLQEVRNMDYQNERGQKIPLSEEDEKIILNLLDTKDKVTFDAIRKALKLTGACTFNLESTSRTSLNGNTTAVKLRNKNRFGELWDTLSLEEQDSIVEKLITADEDKEIYDLLEKYNLTDEQKESIVKVQLPAGTTMLCKEVSEKLVQKMESGSAFTYTAAVESLGYKYADQTVEKYDMLPYYGKVLVGSTMGIDPSKPEDKPELKYGKISNPTVHVALNQTRTVVNALIKQYGKPSQIALELSRDLKASREAKDAMLKKQNENKKRNEILNKNITDAYKIAYPNRNDRLKYRLWEELGAEGLPRKCIYCGKNISGAELFSKSIEIEHILPYSRTLLDAESNLTVAHASCNAFKKERSPYEAFGSNPSGYNWNEILARANQLKNPAKRGRFSVDAMETFEKESGFIARQLTDNSYLSKMALRYLKSVCDNIWSVNGGMTKLLRDKWEIDSILKRKIDEKEIAYFGLKDEQIGEYKKNRYDHRHHALDASVIALIDRSLVKEISTLNARSQKNRIEVPPMAVPRIELQEKVKNIVVSFKPDHGAEGKLSKETLLGKIKREEVVELSKIEEGDIPFIKNEKVRGDFESKFAESKDIKRVRKEFKDIYPQVKIFRECFVSRSPIASLKENNIEDIVDVKIRSRLQDFYALHKGEKFEDLLQKFSEETKIKKVRCLNRVQTPIVINSEVPRYLAPEDYFAAIIWQIPPKKDGAKPTYEAQYIRRNEVGKDNKPKAGVVKTPHPAAKNLGILHKNDYLEFSESGKWYKCRVAGFSATQNKLDIRPVFAVTDCKDWIIATNETLLESCWKQQKGQNFYSVNVLFGEKQARFITVNPIGRVFRK

SEQ ID NO: 5140 - protein, 1102 aa, synthetic construct
  REGION 1..1102: note = Synthetic
MKYRLGLDLGTNSIGWAVYSLDYENEPQKLEDMGVRIFPDGRDPKTKEPLAVSRRIARGQRKLIYRRKLRRKATFRLLQEQGLFPKTKDETQKLKTLNPYELRVKALDEKLEPAELARVLFNLSVRRGFKSNRKDTSNEETAASSNSEKLSQKDMSDMLSNAIKEANCRTLGEFLWKNQEKNHGIRFVPGRMSYYPLRKMYEDEFFAIRAVQEPFFKSIDWEGIYNSIFFQRSLKAQERGRCQYMPEKERTFKALPCAQKLRILQEIRNLNYQNEEGKTLPISEEQEDILLSLLDSKEKVTFDAFRKALKLNSACTFNLEKNRDFLLGNATAVKMRHKNRFGDLWDSLSLEDEDLIIEKLITADEDSEILALLEKYNLTEEQKDSILKLQLQTGTTMLCKEVSEKLVHKMESDSAYTYTAAVESLGYKYADQPVEKFDELPYYGKVLIGSTMGVNPTADESKPEQKYGKISNPTVHVALNQTRVVVNALIKQYGKPAQIAIELSRDLKASREAKDAIQKKQNENKKRNEITNINIRDANPNIQYPNRNDRLKYRLWEELGAEGLPRKCLYCGKTISGAELFSKNIEIEHILPFSRTLLDAESNLTVAHSSCNAFKKERSPYEAFGSNPKGFNWEEILMRANQLKNPAKRRRFAIDAMESFEKDSGFIARQLTDNAYLSKMAMKYLKSVCDDIWSVNGGMTKLLRDKWEIDSILKRKIGDTEIVHFGLKDEQIGEYKKNRYDHRHHALDASVIALIDRSIVKEISTLNARSQKNRIEVPPMAVPRLELQEKVKNIVVSFKPDHGAEGKLSKETLLGKIKREELLEISKIEESDILLIKSDKVRKDFEEKFTETKDIKQVRKALKDVYPQIKVFKEFFVSRTVISSLKESNIEDIVDDKIRNKLQDFVALHKGEKFEELLERFSEQTGIKKVRCINRVQTPIVINGDVPRYLAPEDYFAAIIWQIPPKKEGAKPTFEAQYIRRTEVGKDNRPKAAVIEAWKKEHHSAAKNLGILHKNDYLEFSDNGKWYKCRVAGLQAAANRLDIRPLCAVTDCKDWLISTNENQLERYWKPQKGQNFISVNVLFGEKQARFITVNPIGRVFRK

SEQ ID NO: 5141 - protein, 1062 aa, synthetic construct
  REGION 1..1062: note = Synthetic
MIMKLEKWRLGLDLGTNSIGWSVFSLDKDNSVQDLIDMGVRIFSDGRDPKTKEPLAVARRTARSQRKLIYRRKLRRKQVFKFLQEQGLFPKTKEECMTLKSLNPYELRIKALDEKLEPYELGRALFNLAVRRGFKSNRKDGSREEVSEKKSPDEIKTQADMQTHLEKAIKENGCRTITEFLYKNQGENGGIRFAPGRMTYYPTRKMYEEEFNLIRSKQEKYYPQVDWDDIYKAIFYQRPLKPQQRGYCIYENDKERTFKAMPCSQKLRILQDIGNLAYYEGGSKKRVELNDNQDKVLYELLNSKDKVTFDQMRKALCLADSNSFNLEENRDFLIGNPTAVKMRSKNRFGKLWDEIPLEEQDLIIETIITADEDDAVYEVIKKYDLTQEQRDFIVKNTILQSGTSMLCKEVSEKLVKRLEEIADLKYHEAVESLGYKFADQTVEKYDLLPYYGKVLPGSTMEIDLSAPETNPEKHYGKISNPTVHVALNQTRVVVNALIKEYGKPSQIAIELSRDLKNNVEKKAEIARKQNQRAKENIAINDTISALYHTAFPGKSFYPNRNDRMKYRLWSELGLGNKCIYCGKGISGAELFTKEIEIEHILPFSRTLLDAESNLTVAHSSCNAFKAERSPFEAFGTNPSGYSWQEIIQRANQLKNTSKKNKFSPNAMDSFEKDSSFIARQLSDNQYIAKAALRYLKCLVENPSDVWTTNGSMTKLLRDKWEMDSILCRKFTEKEVALLGLKPEQIGNYKKNRFDHRHHAIDAVVIGLTDRSMVQKLATKNSHKGNRIEIPEFPILRSDLIEKVKNIVVSFKPDHGAEGKLSKETLLGKIKLHGKETFVCRENIVSLSEKNLDDIVDEKIKSKVKDYVAKHKGQKIEAVLSDFSKENGIKKVRCVNRVQTPIEITSGKISRYLSPEDYFAAVIWEIPGEKKTFKAQYIRRNEVEKNSKGLNVVKPAVLENGKPHPAAKQVCLLHKDDYLEFSDKGKMYFCRIAGYAATNNKLDIRPVYAVSYCADWINSTNETMLTGYWKPTPTQNWVSVNVLFDKQKARLVTVSPIGRVFRK

SEQ ID NO: 5142 - protein, 1082 aa, synthetic construct
  REGION 1..1082: note = Synthetic
MGLLNKSYICLCDIILNIQEIVGMNCGKWRLGLDLGTNSIGWSVFSLDDDNNVLELKDMGVRIFSDGRDPKTKEPLAVERRTARSQRKLFYRRKLRRKQTFRLLQTQGLFPKRKEDCLKLKSEDPYLFRIKALDSKLEPYELGRALFNLAVRRGFKSNRKDGSREELSEKKTTDEIKSQSDMQTNLEKAIRESGCRTIAEFLVKNQKENGGLRFVPGRMTYYPTRKMYEDEFFQIKSKQIKYYSNIDWDAIYKSIFYQRPLKAQTRGYCIYETDRERTFKAMPCSQKLRILQDIRNLAYYDSAKQKKELNCDHDKILYELLNSKDKVTFDQMRKALNLSENITFNLEENRDFLIGNPTAVKMRSKNRFGKLWDEIPLEEQDRIIETIITADEDEQVYKVIEKYSLSEEQRNFIVENTVLQAGTSMLCKEVSEKLVKRMEEITDLKFHDAVSSLGYKFSDQSIEKCDLLPYYGKILTGSTMGVNLSEPESNPEKRYGKISNPTVHVALNQTRVVVNSLIKEYGKPFQVAIELSRDLKNSVKEKAEISRKQTQRAKENIKINESISDLYHKAFPGKTFFPNRTDRLKYRLWEELGLGNKCLYCVKGITASELFTKEIEIEHILPFSRTLLDSEHNLTLAHSSCNAFKAERSPYEAFGSNPQGYNWNEIVTRANQLKDASKKNKFSPTAMERFEKDSSFITRQLTDNQYISKAALRYLKCLVDNPADVWATNGSMTKLLRDKWAMDSILCRKFTEKEVAALGLKPEQIGNYKKNRYDHRHHAVDAVVIGLTDRSLVQKLANKNSHKSNRIEIPEFPILRADLIEKVKNIIVSFKPDHGAEGKLSKETLLGKIKLHGNEVFVCRENLVSLSEQNLDDIVDEKIKQKVKDYVSKHNGEKIDSILTAFSQETGIKKVRCKNRVQKPIEITSGEVPRYLAPEDYFAAIIWEIPGEKKSYKAQYIRRNEVEKNSNGKNVVKQDVLESGKPHPAAKQICMLHKDDYLEFSDNGKLYLCRIAGYAATSNKLDIRPIHAVTYCADWIYSTNETMLTGYWKPTPGQNWISVNVLFSQLQAHPVTVSPIGKVFRK

SEQ ID NO: 5143 - protein, 1106 aa, synthetic construct
  REGION 1..1106: note = Synthetic
MNYRLGLDLGTNSIGWAVYSLDSGNEPCELVDMGVRIFSDGRDPKTKEPLAVARRTARGQRKLIYRRKLRRRAMFRLLQSQGLFPASKDEARKLKLLNPYQLRIKALDERLEPPELARVLFNLSVRRGFKSNRKDGTDKDEPAVSKSGEKLSQADMSNELSKTVSASGCRTLGEFLWKNQDKNHGIRFVPGRMPYYPLRQMYVDEFNAIRAVQEPFYKTLDWDAVFKAVFFQRPLKPQERGKCQYMADKERTFKAMPCAQRLRMLQEIRNMDYQNERGQKIPLSEDDEKTLISLLDTKEKVPFDAFRKALKLSPACTFNLESESRTSLNGNVTAVKLRSKNRFGALWDTLPLEEQDAVVEKLITADEDREILDMLAKYPLSDEQKESVVKLQLPTGTTMLCKEVSERLVHKMEELGCNYTTAVQVLGYKYADQNVEKYDLLPYYGKVLVGSTMGGNPSEPEDKPERRYGKISNPTVHVALNQTRTVVNALIKEYGKPAQVAVELSRDLKASREAKDAMVRKQNENKKRNEILNKNIREGYGISYPNRNDRLKFRLWEELGASGLPRRCLYCGKTISGAELFTKNIEIEHILPYSRTLLDAESNLTVAHASCNAFKKERSPYEAFGSSPSGYSWAGILERANQLKNPAKRGRFAIDAMESFDKNSGFIARQLTDNAYLSKMALKYLHCVCDKVWSVNGGMTKLLRDKWEIDSILKRRIDDKEIAHFELKGEQIGEYKKNRYDHRHHALDASVIALIDPSLVKEISTLNARSQKNRIEVPPMAVPRMELQEKVRHIVVSFKPDHGAEGKLSKETLLGKIKREEVVDIAKLEEKDIPLIKHEKVRADFERELAGTKDIKLVRKALKDIYPQVKLYREYFVARGPITSLSEKNIGDIVDAKIRSRLQSFANSHEGGKFEDVIQAFSEETGIKKVRCLNHGQKPIAINGNVPRYYEPEDYFAAIIWTIPSKKAGAKPTYEAQYIRRNEVDRNGKPKVEVIEAWKKTHHPAAKSSSFVLHKEDYLEFSENGVWYKCRIAEFSATNNKLVIMPIYAATKAKEYSNWLVATTDSMLEPCWKMKNGKNLISVNVLFGEKQARFITVNPIGRVFRK

SEQ ID NO: 5144 - protein, 784 aa, synthetic construct
  REGION 1..784: note = Synthetic
LTAVKLRSKNRFGEIWDSLSLKEQDDIVECLITAQEDSDVQKMLEKYDLTSEQKNFITKPDLPSGTTSFCREFSENVVNKIEENAKIFAVSDERTERCQIHSVIQELGYSYANQFVEKCEELPYYGKILSGSTMGAKSNPKNDEERFGKISNPTVHIALNQTRVVVNSLIKEYGKPAQVVIEVSRELKESREAKEKMQQRIAANQKQNEILNKKIKDANSNIQFPNRTDRLKYKLWEELDQENALNRRCIYCGKQISGADIFNDNTVQIEHILPFGRTLWDSEHNKTVAHTKCNAFKGEKSPYEAFFNNPKGYNWNEILKRAAHLKDPQKRRLFSENAMETFEKESSFISRQLTDNAYLSKMALKYLKCVVEKDSNVWAVSGGMTKLLRDKWQIDSILKRKIGDNEIAHFELKDEQIGTYKKNRYDHRHHALDASVIALIDRSMVQQISRLNQFGKKNKIEVPQMPVSRLELIEKTKNIVVSFKPDHGAQGKLSKETLLGKIKRAEQISISKIKEDDIAFIKNEKVHAKFEKMLADLKDIKKVQKELKELYPVVWIFKEYYVCKENILGLKEKDFDSIIDKKIQKELREFAESHKSEKIEDVMQKFSEQTKIKKVRCINRVQTPIEIKNTDGTMRYLCPEDYFAAVVWQIPPKNKEAKPVYKATFVRRDQVDPDGNPKIVAKPHPAAKKVCVLHKNDYLEFVDNGNWYKCRIAGLNAASGRFDIRPVYAVTDCKDWIISTNEAVLESYWKPQKGQNFISISVLFGEKSAHSITVNPIGRVFRKK

SEQ ID NO: 5145 - protein, 617 aa, synthetic construct
  SITE 561: note = misc_feature - Xaa can be any naturally occurring amino acid
  SITE 574: note = misc_feature - Xaa can be any naturally occurring amino acid
  SITE 559: note = misc_feature - Xaa can be any naturally occurring amino acid
  SITE 584: note = misc_feature - Xaa can be any naturally occurring amino acid
  REGION 413..414: note = misc_feature - Xaa can be any naturally occurring amino acid
  REGION 565..567: note = misc_feature - Xaa can be any naturally occurring amino acid
  SITE 582: note = misc_feature - Xaa can be any naturally occurring amino acid
  REGION 452..453: note = misc_feature - Xaa can be any naturally occurring amino acid
  REGION 576..577: note = misc_feature - Xaa can be any naturally occurring amino acid
  SITE 579: note = misc_feature - Xaa can be any naturally occurring amino acid
  REGION 421..422: note = misc_feature - Xaa can be any naturally occurring amino acid
  REGION 424..425: note = misc_feature - Xaa can be any naturally occurring amino acid
  SITE 572: note = misc_feature - Xaa can be any naturally occurring amino acid
  SITE 542: note = misc_feature - Xaa can be any naturally occurring amino acid
  SITE 547: note = misc_feature - Xaa can be any naturally occurring amino acid
  REGION 554..556: note = misc_feature - Xaa can be any naturally occurring amino acid
  REGION 418..419: note = misc_feature - Xaa can be any naturally occurring amino acid
  SITE 588: note = misc_feature - Xaa can be any naturally occurring amino acid
  REGION 590..591: note = misc_feature - Xaa can be any naturally occurring amino acid
  SITE 411: note = misc_feature - Xaa can be any naturally occurring amino acid
  SITE 544: note = misc_feature - Xaa can be any naturally occurring amino acid
  SITE 550: note = misc_feature - Xaa can be any naturally occurring amino acid
  SITE 563: note = misc_feature - Xaa can be any naturally occurring amino acid
  SITE 462: note = misc_feature - Xaa can be any naturally occurring amino acid
  REGION 431..432: note = misc_feature - Xaa can be any naturally occurring amino acid
  SITE 438: note = misc_feature - Xaa can be any naturally occurring amino acid
  REGION 1..617: note = Synthetic
  REGION 428..429: note = misc_feature - Xaa can be any naturally occurring amino acid
MKWRLGLDLGTNSIGWSVYTLNADNVPETLEDMGVRIFSDGRNPKSKEPLALERRMARGQRRIIHRRKQRRRMVFRLLQKEGLFPLTREEAQPLKMMNPYELRIKALDEKLEPFELGRVLFHLSVRRGFKSNRKDGSREEPAENTRSEKLTQKDKCERLRKAVADSGCRTLAEFLWKHQDEHKGIRFVPGRMDYYPLRQLYIDEFNAIREKQQYFYPNVDWEAIEHALFDQRPLRPQERGACQYLPDKKRTFKAMPCAQKVRILQDVYNLAIIKDGKSCELLPEWREELIRLLNEKEKVTFKEMRKKLSLDQCVMFNLEKTREYLKGNATAAKLRKEKCFGTKWDSIPLEEQDAIVETLITADEDSQVKEVLRAYSLSDEQQDAIASIVLPSGTTSLCKEASEQIAAKIEXEXXTYTXXLXXLXXHEXXQXXEQSDLXPYYGKVLVGSTMGXXENPRNDEEXYGKISNPTVHIALNQTRTVVNALIRQYGKPTQIVVELSRDLKASREAKSAMTKKLAQNQKENERLNKNILDAYPSISYPXRXDRXKFXLWEXXXEDXMXRXCXXXGKVIXGXRXXYXKHXNXAYSXVXXDALRCGKQLDARPCGMQRFQKRAFAV

SEQ ID NO: 5146 - protein, 1155 aa, synthetic construct
  REGION 1..1155: note = Synthetic
LSNIFILRFLPNFGFLLSILHFCAIMIFMNDKNQRYRLGLDLGTNSIGWCIYLLDGNNKPETLIDMGVRIFSDGRDPKTKEPLAVERRTARGLRRILHRRKQRRKQMFCLLQEQGLMPNDAVQATALKSLNPYELRVKALDAKLEPYELGRVLFNLSVRRGFKSNRKEAVQEKEKDSQNDTKSQNEKCEQLAKAIKDSGFRTLGEFLWKHKNTETQQTENNAGDIGMRFVPGRSNYYPTRRMYAEEFDTIRKVQEPYYSGVNWDALHEKLFYQRPLRAQERGKCRYMPDKERTFKAMPCSQKIRILQEVYNMDYIDALGKAFPIGNTQTDMLIALLDKKEKLTFKAMKKELGIDESCTFNLERGGREYLQGNTTAVKLRNKNRFGDLWDSLSLAEQDAIVEKLITADEDAEIISMLAQYNLTDEQKKNIAATVLPSGTAMLCKEVTEMLVEKMEQNKIPLTVAVQMLGYRYADQSVHEEDELPYYGAVLTGSTMGAHPEQDESKPELKYGKISNPTVHVALNQTRTVVNTLIKAYGKPQQIVVELSRDLKASREAKARIQQTITANQKRNERDNKNIAEITKIRYPNREDRLKYRLWEELGSDSFSRKCLYCGRPISGSEIFTKDIEIEHILPFGRTLFDGETNKTVAHTDCNRDKGDRSPFEAFGSSPNGYNWHEICARANSLKNPAKRALFAENAMEKFEKDNSFIQRQLTDNAYLSRSALRYLRCICKDVWSINGGMTKLLRDKWNIDSILKRKIDDPEIAHFELKNDQIGQYKKNRYDHRHHALDASVIALIDRAMVQEISQLNKIRLKNRIEAPQMPVLRSELIEKVKHIAVSFKPDHGRQGKLSKETLLGKIKKIEKVDIDSIQTDDDIASIKDDAIRTRFETKHRELGNMTKAKAALKTEFPKLDVFKAYYVSRTPIVSLTEKNIDSIVDEKIKEKLKTFIKEHADLSFAEQLQKFSETEWIGKPSAAGKPGKKYRIEKVRCINWGQTPITITSSAVPRYLCPEDYLAAVVWQIPSKTKNAEPEYKATFLRRDEFDVNNKPKKLEKPHDAAKYICMLYKDDYLEFTESGATHLCRIAGLPASQNNKIDIRPIYAVSDCKDWIIATNENMLEPCWKPQKEEKRISVNVLFGKHKARSVTVNPIGRVFRK

SEQ ID NO: 5147 - protein, 1060 aa, synthetic construct
  REGION 1..1060: note = Synthetic
MNNLNWRLGLDLGTNSIGWSVFFLDKDNEVLELVDLGVRIFSDGRDSQTKEPLAVSRRIARGQRKSIYRRKLRRKQTFRLLQKQGLFPKDKNDCMELKGLNPYELRIKALDEKLTPFELGRVLFNLSVRRGFKSNRKDGTREEISEKKNDSEIKSQSDMQTHLEKAIQESGYRTLGEYLYKNQKENKGIRFVPGRMTYYPTRKMYEQEFNEIRNVQEKFYKDIDWDEIYKSIFTQRSLEPQQKGYCIYMKEKERTYKAMPCSQKLRILQDIRNLAYYDEDRKKISLNDNQDVILYELLNSKEKVTFDQMRKALKLNEKCTFNLEENRDFLNGNATAVKMRSKNRFGQLWDELPLEEQDNIIETIFEAEEDIAVYQVIEKYNLTEEQKDFIVKNTVLPGGTAMLCKEVSEKLVKRMEEISDLEYDKAVSSLGFTFSDQKVEQCDVLPYYGKILAGSTMGVDPTADENNPEKRYGKISNPTVHVALNQTRVIVNNLIKVYGKPSQIAVELSRDLKNSVEKRAEIARKQNERAKQNIILNEKITELYSSVNKGKTLYPNRNDRLKYRLWEELGLGHKCIYCGQGIGGHEIFTKNIEIEHILPYSRTLLDAESNLTVAHASCNSYKAERSPYEAFCSSPDGYNWDEIVFRANQLKNPSKKNKFSANAMEAFNKDSSFIARQLTDNQYIAKAALRYLKCLVENPSDVWATNGAMTKFLRDKWELDSILCRKFTEKEVAFLGLKPEQVGNYKKNRFDHRHHAIDAVVIALTDRSMVQKLATKNSHKGNRIEVPELPLYREDFIEKVKNIIVSFKPEHGSEGKLSKETLLGKIKIHGKEKFVCRENLIGLKEKNLDEIVDEKIKSDVKKYVEKHKSEKIENVLTEYSKNTGIKKVRCINRVQTPIEITSGKIPRYLAPEDYFAAIIWEIPGDKKTYKAQYIRRNEVTKNSNNQIVVKKEVLDSGKPHPAAKQLCIVHKDDYLEFSENGNLLKCRVAGFSATRNNLDIRPIYSVTDCADWIYATSENMLESGWKIQKGQNFVSVNTLFGTKNAKPITVNPIGRVFRKK

SEQ ID NO: 5148 - protein, 1151 aa, synthetic construct
  REGION 1..1151: note = Synthetic
MKKWRLGLDLGTNSQGWSVLGLDENGEINGELIDMGVRIFSDGCEPKTGEPLAAARRTARGIRKNLYRRKLRRHQLFNQLQEDGLFPKEKEEAEKIKVLNPYELRVDALDRKLQPYELGRVLFNLGVRRGFKSNRKDSPDESLEQPDDDTQKGNKNSNDPLKMKQGEKCLHLEAAIKESGYRTLGEFLWQERDKFKLLVAKEKCSTYRQYFEKCDDEKREAANANSVRFVSSCSTYYPLRSLYEDEFNAIRAKQEQFYPTVHWDKIHDIIFFQRPQKPQERGKCQFMTDKDRTFKAMPCSQKYRILQEVYNLKWYDELNKPNDLTKEQQDLIILKLNETKEFSFEKMRRLLKLDTNTRFNLESELRDKLKGNETAVILRYKNNFGELWDTLSLEEQDNIVEILITANEDSEVEQMLQKYTALSDEQRKHIVHKTFSSGTTSLCKEITEKLVSIMQEKHLQFDKALILLGYDHFDDSVKHSDLLEYYGKVLVGSTMGAKPEAPENKPELKYGKIANPTVHIALNQLRVVTNALIKRYGKPSQIVVEVSRDLKASREAKDEIRIANAKRAKENQIINKNIIDMNSKIQYPNRLDRQKFRLWQELGAEGMPRRCIYCGKNISASDLFSNDIQIEHILPYSRTLLNSESNLTLAHTNCNEAKGEKTPFEAFGTTTSGQYAWQEIMKRVSMLKDKKKQGRFAPDAMEKFEKDASFIDRQLTDNAYLSKIARRYLTSITEKNSDVWTVAGGMTKIMRDKWEIDSILKRKIDSKEAAELGLKDDEIGTFKKNRYDHRHHALDAVVIGLTDRSMVQEIATKNARHQKNRIEMPEMPIPHMELCSKVKNIIPSFKPDHGVEGKLSKETLLGRIKQETLLKITDLSADDISNIKVPSVKQQFEKTIAEQQGDLKKTIKILKDTYPEVKVFRFQFVARTSIISLKDRKNITDIVDESIRKELAAFADSHADEKWEQIVQDFSKRTGIKKVRCATFVQTPIIIHQDSKNIHKPTRYLNPVDYFAVIIWQLPTSKEGELPRYVGQFVLRTEVDKNKNPLEDRPHPAAKKICELYKNDYLEFSNENIWIKARIAGYSATANKLDIRPIYSTEDAKTWLVATNENMIESGWKEISGHYFVSINVLFGIMSARKITVDPIGKVHYKK

SEQ ID NO: 5149 - protein, 715 aa, synthetic construct
  REGION 1..715: note = Synthetic
  REGION 343..380: note = misc_feature - Xaa can be any naturally occurring amino acid
  REGION 2..3: note = misc_feature - Xaa can be any naturally occurring amino acid
  REGION 700..706: note = misc_feature - Xaa can be any naturally occurring amino acid
MXXRMTYYPTRKMYEDEFFQMKAEQIKHYPNLDGDAIYKSIFYQRPLKAQSRGYCIYETGKERTFKAMPCSQKLRILQDIRNLAYYDSTKQKKELNDDQDKILYELLNSKDKVTFDQMRKALKISESNSFNLEENRDFLIGNPTAVKMRSKNRFGKLWDELSLEEQDFIVETIITADEDEQVYKVIEKYDLTQEQKDFIVKNTILQSGTSMLCEEVSEKLVHRMEEISDLKIHEAVDSLGYNFADQNVDKYDLLPYYGKVLTGSTMGVNLSEPESKPEKRYGKISNPTVHVALNQTRVVVNALIKEYGKPAQIAIELSRDLKNSVKEKAEISRKQNQRAKENXXXXXXXXXXXXXXXXXXXXXXXXXXXXXXXXXXXXXXCGKGITAAELFTKEIEIEHILPFSRTLLDAESNLTVAHSSCNAFKAEHSPYEAFGSNPKGYNWTEIVARANQLKNTSKKNKFSPTAMDSFEKDSSFITRQLTDNQYIAKAALRYLKCLVENPSDVWATNGSMTKILRDKWEMDSILCRKFTEKEVAALGLKPEQIGNYKKNRYDHRHHAVDAVVIGLTDRSLVQKLATKNSHKTNRIEIPELPVLRADLIDKVKNIVVSFKPDHGAEGKLSKETLLGKIKLHGKEVYVCRENLISLSEKNLDDIVDEKIKHQVKDYVAKHKGEKIDAVLTAFSDETGIKKVRCINRVQTXXXXXXXIQSTVHQTK

SEQ ID NO: 5150 - protein, 794 aa, synthetic construct
  REGION 1..794: note = Synthetic
MSDKNQKYRLGLDLGTNSIGWCIYSLDGSNKPETLIDMGVRIFSDGRDPKTKEPLAVERRTARGLRRILHRRKLRRKQMFRLLQEQGLMPNDVSEAVALKSLNPYELRVKALDAKLEPYELGRVLFNLSVRRGFKSNRKEAVQEKEKDSQNDAKSQNEKCEHLAKAIKDSGCRTLGEFLWKHKNTETPQMENNARDIGMRFRSGRSNYYPTRQMYVEEFDAIRKAQEPYYSGVNWDALHEKLFYQRPLRAQERGKCRYMPDKERTFKAMPCSQKIRILQEVYNMDYIDEYGKTIPLEEAQTDSLISLLDKREKLSFKAMKKELGLDESCTFNLERGGREYLQGNVTAVKLRNKNRFGELWDSLSLAEQDAIVEKLITADEDAEIISMLAQYNLTDEQKKKIVATVLPSGTAMLCKEVTEQLVEKMEQNKMPLTVAVQMLGYTYADQSVHEEDTLPYYGAILTGSTMGAHPETDESEPELQYGKISNPTVHVALNQTRTVVNTLIKAYGKPQQIVVELSRDLKASREAKARIQQTITANQKRNERDNKNITDITKIPYPNREDRLKYRLWEELGSASFSRKCLYCGKPISGSEIFTKDIEIEHILPFGRTLFDGETNKTVAHTNCNRDKGNLSPFEAFGSSPNGYNWHEICARANSLKNPAKRALFAENAMEKFEKDSSFIQRQLTDNAYLSRSALRYLRCICKDVWSVNGSMTKLLRDKWNIDSILKRKIDDPEIAHFELKNDQIGQYKKNRYDHRHHALDASVIALIDRAMVQEISQLNKRAKCKGILPPPRN

SEQ ID NO: 5151 - protein, 1350 aa, synthetic construct
  REGION 1..1350: note = Synthetic
MRTLGLDIGSNSVGSAWIDTDGKIVDMGVSVFPAGVDETEDKRGAPKNQDRRDKRSLRRNIARRAKRKRLLRRLLMRHGLLPDDPQEMEALLARDPWLLRRKGLDEPLTPHEFGRILLHMAQRRGAMGLNIEEPADETEADDESQSEASDGKAAPKGGAGEDEKVKSAIHHTREQMRQEQARTFGELVARVADKRRHVLVDDEGEPRTGPKGEPSAWAEPIRNRADSFEFHADRNMIRDEFAKLWEAQNRMQGELASLLTEDLRLNLDNPEGNRTWRHRGLMFGQRRTYWDTGTLGRCDLEPTDRCVPLADRHASYFRVVESANNIRLRGPQDVDFRPLTAEERDAVIEALRRQKTASPTTVRKALRIDKTALKKQGLPDNAYTLNIERDAERSLNTDWFESQIVRGAIGSDTWATWDESKREGLNRAVLKFDPTIEDDVQRLTEVAGKLGLDSETTARLVKAWRTRPKLENRLNLSRRAVLNLLPYMEQPNADGTWPTQIEARGLFAEDGDASDRKTGTPAPDEQRQRYRIGSRSLRKADRHFMAKHPDGIPPAPTLSNPVVRKAVHEVRRHLVAYVRKYGQKPDRVVIEFAREASKPAKVSDRILSVNRKRDRIRKSIIEEVVKPTFDDTFHTLSNNQLRAAVDRIVLARQQRNVCAYSGEPISDFAAAKGSGLEIDHIIPYSRCGDNSLNNRVVCYRKANRDKGRKTPREWWGEAFDERSAPVRFMRDHKPARDDYFNSREYAAKWRNFSRTDIKDDWRGSQLTDTAYAAREVQAYIQQALWPTEPGHLEGGSRRIFVTRGVYTAQLRRDWQLYQRLLASGPASPDEVRQAAAKNRGDHREHAVDAVAIALTDHSVMQKLAGHAREVELERERAYRAGEEPRHIPRKPIDPPWDTIQSFRHQVLSRLYPQFDEPDGPEGGKALGDPLVVCHRPIARKLVGRLHEDTLFGPVPGNDTLFTGHKPVSQIEPNHLRMPEPETDKQAIERLAERYLDTGIEKDRRRARKRATAIVESPAFSRKHVDPPPGKSGIIRDIGMRRILRKQIEQRLHALGIDADADTFNKSQMNRILKDGPLRMPSGVPIHRVVLLRTMTDPVRIPRKRFDHGQQKWGYEKHPRAMRVYVGGNNHHIEIRADERERWTGTIIPTFEAAQRVRIEHREAVDRSDAPEKGGRFIMSLAEGETVYMKHKDSGVPDYFVVFKLDKPQKIQFKHHWDARRAKGEKDEDGNIIPGSQREAMPVTASQLRDLAPPGFDTPIKVAVDPLGRPRQMEPAPPLQAETGQVNPRILAIARDALAARKAHPDRRPQPDAQPLPGSWTWMRRRLADEGLADLTPQLSVAWRALQAEAV

SEQ ID NO: 5152 - protein, 1539 aa, synthetic construct
  REGION 1..1539: note = Synthetic
LSKVFSYFISDYILKIYNCRNESLRIIRRVIMKKVLGLDLGTNSIGWALVSYDENIAKEKKYTGILDAGVRIFPEGLEPDTIGKGDKEKSKNASRREFRQMRRQTFRKRLRKIKLLECLTRHDMCPLTMEELKQWKKWDPAKKNLGRSFPDTPAVREWLRMNPYELRTKALKEDISRLELGRILYHLIQRRGFYSSRKEKDTGVLYKGNDAMIGINDTREELGGKTLGQLLNEYTKPEGEPYTPITDENGREVKIRGRYTLRKWYVEEFHEIWDRQAKQLGLDKETDVRKKVRYIKGSPDSKRNRHILNYLIQKLGEENVKHDNNVIISYEKMALKEYLGGEIWKDEEGEIRYNSMDSVLFWQRPLRSQKNLLQSCRFESSKKPCVVSHPDFEKYRAWQFINSIKFEGDSSGLHLRSLSQKEAETVFKMMTEKTSLKFDAIKKKLGREYETSNFDKDNKVPTCNTIAQLKKLFPNKMWEENYHEIWHAFHFFDDNDKLFNHLKNKFELIPDDPEKISAITLDDKYSSLSLKAIRNILPFLEKGYILSTAIVLGGVKNVFGNKWDAFKDHHEIIEKEICKLMLRTEKNKAGELIDKIKLFLINGTGIVDFGMHSDDKRLNKLYHPVYEVKQKKETLDKLPEIENLRNPLVQQALNEMRHIVNEIIEKHGKPDTIKVELSRDLRNSKKKREELQHRIRDNEKANEEARKRLIEFGLAQSRDNIRKYRLYKEIEEKSGTVHCPYTDKAISLSALLGDRNLFQIEHIYPRSISLDNSYANITLCESNFNRMKGEKTPWQFYQENPDPALWNASSWEEIVYRAYKYLPYFKAKRFTRKGDLEKEGFVNRQLSDGRYISKKAREVLSAICDDVQVLPGMLTSDLRRLWGLNNVLQPVESIDIGPFDFEENVLKPHWLVKDTKGKNKEIKPIYNQKPAVSAGETTIPGDVKRNWFYSPCLSEKKTAEGYHDGKYWAVLKLGEPLEWVRQRNQKPDQSTETLVLTGEIKNGKFSVRDRFNFTLKDKLPFEDGWYWASLPIEKITFKDVSKKPTTSTHQITYYGGIHDGRFTSYLFQCKTDLPDGNAWVILDLNTEKAEFFPVYNQKPELSEDEVLITGTIGSHRIFTSDVDPDHSMTTDKPAGKYWVRFPIEFMNPELVPQLNRPPVPQKGEKLIEGNIWVDNQGEIRFDPKKNRDDQRHHAIDALAIACTEHSFLQKLSTWYAQTDEMERGRSHSPYEFPVPWDNFFQSVQEKAQGILVSYKKNNPVLTKVIKNVYKNGKKYRSVGFAARGQLHKESVFGKRTAPDGNQRFHIRKPITSLQNNKHVDKIVDKTLRNMIKDYLQQEYHINVRGKYNIPDDAFYKDGQYRLFLPNKNGEPVPVKKVRIGEQIGFAKRLKDPVNQYVNPRNNHHALLYLDKKGIMQENIVTLWEAAERKRKGEPVYQLPEDGNEMITVLEINDMFLIGLPSIWHENDAWKTLSPDKLSPYLYRVQKISTMYYTFRHHLASTLDNPDQELRIQSFKAWHELKPIKVKVTRDNRILEFNDD

SEQ ID NO: 5153 - protein, 1592 aa, synthetic construct
  REGION 1..1592: note = Synthetic
MKRILGLDLGTNSIGWSLVRLDYQTKKDTYLGSGEILGMGSRIIPMNEAALSDFGKGKTVSQTAERTKYRGIRRLRQRHLLRRERLHRILNILGFLPKHYAQEIDFDNRLGQFLDHREPKVAYRKNKNQKYEFLFKSSFDEMIQDFKKSQPSLFYKKDSGEETKIPYDWTIYYLRKKGLSEKLTKEELAWVILNFNQKRGYYQLRGDEIDTEKTKQTRQYFITETITSIVDTEQIYKGLSIFQISLSNGEVGKYYSKKRPSWIGEEKNIIVTVELDKDGKDRLNDHGEVKRKFTIPSEEDWDKKWPLIKAKTEDDLKTSGKTVGCYIYDKLLQKPNQKIRGKLVRTIERDFYKYEFSSILKKQVGLQPELFTDELFEACVKHLYPNNIPHQTDLLKRGFVHLFTEDIIFYQRPLKTKRSLIAECKYENRVYKDKETGEEKKQWLKCIATSHPLYQEFRLWQFVQNLKIYEREKRVNGLLHADEHVTNEFISSIEDKVKLFEQLNDRKNIKQSTFLGFFKKDGKKLTEKTHRWNYVEDKEYPCNETRAGFITVLKKNKEFNWQEFLTQKVEVELWHTLYSINKKNELKSALEKLAKRLNVEDDILKPFLDFPPFKKEYGAFSFKALNKLLPLLRSGNHWSEEQIHEKVKDRIDKILTGEEDDSVDNKIRERLQSFNSIEDFQGLPIWLASYVAYGRHSEVGERIYWKKPSDIERLAQHSLRNPIVEQVINETLQVVKDIWNHYGNGEEKFFDEIHVELGRDIKNTKKERERLTKQITENQNTNLRIRAILKELMDDPKVEGDVKDYSPSQQELLKIYEEGVLTASAKLPDDIEKISRKAEPTKTEIQKYRLWMDQKYRSPYTGEMIPLNKLFTPAYEIEHILPQSRYFDDSLNNKVICEAVVNGNPYKDNQTGYEFISKNEGRIVHELSTTQKTVKIFTKLEYESFVSRYFTGKKKAILLMPDIPESFTNRQLNDSRYISKVVMKLMSNLVREENEEEATSKHVIPVTGKVTAQLRKDWGFNDVWNELIAPRFQRMNELTGTNDFGYWDEKGGNKFFRNNVPDELKKNFDPKRIDHRHHALDALVVALADRRHVNYLNNKHAQERGKERKDYRANLCFRKYDDSGKNYNWTFYKPWESITKELKDKLATTVVSVKQNKRILTKTSNYYESFKDEMGSLRRDKSGLPKKGLTKQLDGKQGSDNKRNISLRKDYHDPMPYGKIELAFDVLNIYDALNKRDYIIDEAIRNQVIRLISYYDGKETLASKESKKHFKQYKKAKADLDKFQSKIDKLNLEEEPDQKEISSLTKRIVEKEEEVLHIKETLIIDKTGNAIDKTHYQIKTEKYGKRQPLAKALSGETYDAVVKSIFKVADYQLQLDLIDHLNSYYSEGNLDFAFSPDGIDRFNRNRKTPIYSVRLAESGSSRFELGEKKGNNHKYVEATTGNNIYFAVYKNRESGERKFETIPLRESFERLKQGEKTPAPRLNKDGYKLLFTLSPGEVVFVPDEEEKENIERVDFSNLTKSQIGRLFTVNDFSGYTIYFTPTSFARAIGPKELDTSYDHKLSKVVLGDQSVPIKDHCWKLEVDRLGNLKRAR

SEQ ID NO: 5154 - protein, 1665 aa, synthetic construct
  REGION 1..1665: note = Synthetic
MTSKQKNLGPLTFGLDIGIASVGWAVLTENRIVDLGVRCFDSGEDDKGKPHNQARRAARVARNRNEMRHWRMQQLLRLYVDVSLLPEANAQLLVAPNRPKSNNKEGGAWHIVDESGPWALRAKGLHHELQPIELARAIYHIVKHRGVHFFRKAEAENALPDADQAMTEKPNAEESDSPSVAASPNEADSDTTDDNSEKTAKKEKEALTALKASNERLEKYRKRWNAPKLTIGALAYRLIQKPDAQFPADENDRKIFSNALRNKGKEYQHAFYRKDLRDEINWLMDFQAQYHSFLNAPLAAESSYLREMNRQQRGSIPIGPQTRGIGETFRQAVLDLLDMQHPPLYEVQIKGMIGVCEFAGQNGIPVNAPRAPKNAFTSERATWLEKLNGIKIRRNGPEKLTPEERQCLIDLPYKPSKVTIKLVRDTLIEKVSFPPNWQQASFNMVSYRMKPTKDGTWLFVVGENGEKKKLKDWTGKAKERKDRLKAVIGKLSHSKISFAELRRELGLTNGEHFAYEVKQPETIPQVEEHHEYLPFDHEQGHILKSGIRYQLAADNKAKELPKPAWVILAELKKASRQATLHDWRQAILRNKKPINLPAQWEFVKVSINEASVAQADEEKTIVPLEYEDAQAAETTTTLLELKGWHTLRKTLAEKCPELWQGWQIAWQQPESEEGRAVAKTIDDIVSVLATAQTDEEVTAGLANLNLGLQPAHISTLQTIINFNKYRNLCREALTQILPHLEKGLIYSAACKTAGFNHSEKQGIERQKYLPPLATVFFQRYRHGKPTKREKRYKGLTNPVVARSFSQARLVFNEIVAKYGSPHFVNVETARDLSRSRKDRDQIKKTQNANKARKEALRTEYQNRLEYLAKQPGNETLDSELAAPQLIKMRLYAEQGAQSAYSQKDLNPDLILSDPFYTEIDHIWPRSKTFDNSFDNQVLVLAGENQNKQDRIPYDFMNGAGDPTRWRQFEAWVRGCHEMSAEKKYRLLAQQMSDTDEFKARNLVDTRYVTRLFSRTLREHIQFAGNPVDEDFQEILPDDSGKERYDRFMRARVRSPQGRLTDFLRGKWGLAKLKNREKSDLHHALDACVIAACSPKIIEQVNRHFANEERTPDRYHFKKNKDGSFTVRAKGEIISPQQAREQGLLLREPWLGFYQEVKCKLGEVFVSRRPKHKRKGEVHGANPQAHRRIPVPLVQLTEKMLNDALVATQPGRRRSNYEAVLQALHAHHGDAKAAFADGFDIRARHDKPVTVNGKQGVPMKTRVIHLPLSACPADLLKAIEEEQTRKVKQAQKAGTKNHGKKAHKADEPIFTETLNSLMRKSIPLAELKRADLTLEALQQADTPEKNTGTDFYTRNKKLLAALDERLAQHDDVGKSAFAKDFFPPNNPAKPMRAIRLPQAQIQQRLQKKELEKTVHKTIDLTKLKKKHLQESEVGSSFYHRNKDLLIALAKKLEDFKDDGKKAFDEPFIPPPGKSGKARPPIRSIRLPQAQGSGLYVRGGLPEVGESLRTEVYWDKEQKRYFFRPVYQANNRQLFGVVPKPEKSDFLFNLYIDDPIEVVLNTGEVIPGNGKPGYFVVYEGDGRMRIRTHDRPGKSMEKKNKTGTSDETPENAIAKEENEASQAGDKTLFRFQTGSKDSHIRELRLFKVGILGGEPVEITAPVKHDLA

SEQ ID NO: 5155 - protein, 1072 aa, synthetic construct
  REGION 1..1072: note = Synthetic
MTKTFNYRLGFDLGYTSLGWACILLDEDNRPCGVHDFGVRIFPSGRDDKSKAPTSTERREKRGARRNRDRYLKRRKALLTYMIQIGLQPKTKNERKQLAEIEPLALRAKGVSEQLTLHELGRALFHLNQRRGFKSNRIAERSGNEDESGLKKGISTLAKQLKENQQTLGQYLFKRLKNEQSTRLKAGNNAEERWTSRQMVENEFWTLLKQQQGYHPDVLTDNVINHLHDIIFYQRHLKPQQAGLCTLIDGEERARLAYPQTQLFRILQEVNNLETIKETSHTPSITQAMRNKLVQYLTEDFSKLRKDGILSWSKIETIIGVKNVKFNLDCLGRKGLQADITTREMLNHVPDWWGSLTVEQQRQAIDEIQSAQTDEDLKQRIGEIDVKTPVEVLEKLNHIHLVDGYGRISVKAIEAILPHLQQGQVYSDACQSAGFNHSDDYDGSVFPDGNLPFYGEVLPKQVIGGTYAPKDKANPENYYGKINNPTVHMALNQFRLVLNELVKEYGCPPREIYLEMARETALSAKELGKLNSEHTKNRKTNEAINKELEKLSIAQTYTNRMKYKLWEDLDIDPTGRCCPLSGKTISLDELFSPQVEVEHIIPFSRSFDDSRNNKMVCYKSANQTKGNQTPYEVFGQTPEWKHILARAKKMAKGAKHARNFNVNKYWRFLPDAMEQMQGDEGSFLARQLNDTKYMSRMARRYAEFVTGKYPGERRVHAIKGKFTSDLRHHWELDELVGDFKDGKFTKDRTNHHHHAIDAIVIGLSDPGAIQKLAKANKNARIMASSKVYIDVPPPYGGFSTRPIKERLKTLVISHKLDHKNPEKARRSGTSIGQLHEDTNYGHVCKNLYATRKPLSVDNFASQKHIGEIASPNIREAVGDIFARYADIKGKLKSAYKKDYFDALESYKSSNNIKKVRIHLHKDNLIPIHDRAGKAYRHVIGGNNFCAEIWVNDKGKKAGKWQCEVIRNFDINQKGFMPRWRTENPTAMKVMRLQINDMVAIDRNGKRVICRVQKMAMSGQIILRYHNDSTTEKKTEISVAGSSLQKQNARKIFVSPTGKIYDPGHAKRPKWNK

SEQ ID NO: 5156 - protein, 1228 aa, synthetic construct
  REGION 1..1228: note = Synthetic
MQAQESYKPYSLGLDIGTNSLGWAVLAVDPDNLDRPTEILGMGSRIFSDGRAIDKAHMGESLGETLQSDRRKKINTMRAHQRDRARRGRLLRMLSDGLGLVRTNGCGRGLRVDWVDPFKATASNRDAWLRRESVFAARAACATHPLDSTNKYDRARLARSLYSLLVNRGTLLTDDGEIEEPEPEAPPKKRKGKAKEVKATIPKGDDPASLRAECTRREEIVAAAFGIGGLGIWLSAQFERRHPFAPIRARRMDSDRRKDHWKNLDDETIARIGSQALPGRSSRKMVEEEFARIRETQSVAFESAGIGAGEWDKLRALIFERAPYNAVRWPCPYVPADERTPRFDPSAQQYLAWEKAWNLRAFDGQANEIDLDVTSGPGSPSLRRRFYATLLTQPRLTWKQASAALGLPESTSFNRVNASGKETHWSGHPFPELGRWISERDRGTRDDGRERVEWPELRDRVLNLFSAPIRGEDRDFATIPSAIAVEIRDLLVAPPRGSIPYGRSMLQGMLPLLETMRPHAARDAALARINEERELDTYALDEYRAGRLPYYGAAFLGMLPRLPSRRKGPYSKGNGPTRVICDVEAKYGRVPNPSVHIALNQTRRVVNEIARKYGRPSRIVIETTRQLHLSDRGRMTLLKRIAENEKRNREAEAAVRRVLGNTSAEGEENRRAVRRYKLWKELTLCGEREARLCPYCGNHEVTMSDAINGHGVDIDHIYPRSLGGGDEMGNCILCCKPCNAEKTNTKTPLDAFGNDAERWERISDATRYLPARKRRMILNPENERSKFLAGQLESTSWASKMLLQWLRPLCLVETNVLASRGELTGTLRKRWDLEDLKKDESGMRIDDNRHHAIDALVTAALSRSLLQKAARGNDLAVKNFDLWDGFKADVERAHKRIVTSHKVERPRILFTADGRRAASVPGAMHYETIYARSGVREQKASALLPPPLTRGRLPLNGPDAAAVLMKAHDLLGRLVESPVAGKSTYDSSQVARLCDTFSLWFGAENPSMAYFRERIDGQSEIWLRCNGRNGPKLNARPPSETGEICTTPWNCEHGTLSGVFRTAFDFLCARNGVAKIAIRPTRGPDESGSEYDSEFYGPPDGRRETIYGLWRSAENLCAVVENIMPLRVRLFQLLRVIADPEELHAFAVTKPEMRIYKNDAIRIDRRVCLIKTMRIDQGRFRIGLEDINTREDVGSEPALQTLLKRHERVELGVTGLLGGFRLKMRLDG

SEQ ID NO: 5157 - protein, 1083 aa, synthetic construct
  REGION 1..1083: note = Synthetic
MKYRLGLDIGITSIGYAVMETDDNGEPVAIEDLGVRIFEKPENPKDGSTLASARRAARGVRRVIRRRAHRRERTESLLISQFGAEILDRIHENTEDVFYLRYKGIEEILSDEELGRVLLYFVKHRGFLSNRKSEKNDKEGGKLLQATSKNSEYFKEKGYRTIGEMLYKDEKYFHFENGKKIYTVRNKESSYDNTFLRDELKAEILAILDKQDENGRLGKEFIEKYLYIFYTNRNFDEGPGEPSKYRGGYAIGKCPFEEGELRAPKAAYTFEYSTALQKLNNLRIKFLGGERGLTEEERKKIIDLIKTKQEIKFGALRKVLAVSGDETFNLLNYSRDKSVEEVEKARFVSMSESYKIRKALSEENKGDIELLDEIALILSMLKSDDRRIAELGKIAVLSEAEKSALLEINVSKFGGTSLKFLKNITPYLEKGCKYNEACEKAGYNHTLQRYSGNRSKLLNTKEVHELVDEIAVPVVRRSVSQTIKVVNAVINKYGSPMAVNIELARELSKTFKERDKIIKDNEKRARDNEGVKALLQSEYHLTMPTGQDMIKYFLYDEQGGKCAYSLEPLDARRLFEPDYVQVDHIIPYSKSFDDSMNNKVLVLTKENQDKRNRLPYEYFGSDGERWKKFEDFVAAQYKGNRKKQERLLKKEFGEEDAKAWKERNLNDTKYITTFVYNLLDADGKSKKKVTAVNGAITSYMRKLYGLVKDRGESDKHHALDAAIIACVTDGSIQNITKYNQDKENYVFDGSNLVDKRTGEIRVKEPYIGFAKELRYRLAEDPRYYTDFFVKFGYGDKKLDGLKEVFVSRMVNKKAKGQIHDATVSSARIYGETGKVITKKALGEIKLKDDKKGEYYVEGCGDYYIENYYRPQDDRLLYEKLLKMLIAAGGDAKQAFKDPVYKPKADGTDGAQVRKVKILSKATSGVQFDNVKGFSKNGSMVRLDVFYKNGKYYSVPVYLKDIYAKKLPDKAVVAGKDYKDWITVDDSFEFLFSLYKNDLIYVEHKKGIELTKTNSDNKDDKKKMQEGHLYYNSFDISRGSATCITQDNGYETRLSLLTLEKLEKRCVDVLGNVSSVKKEVRQGV

SEQ ID NO: 5158 - protein, 1084 aa, synthetic construct
  REGION 1..1084: note = Synthetic
MKRVLGLDLGTNSIGWAVLDVPEHENPEENTGTVVAMGSRIFTQGAEEAGSALETPAKVRRAKRSMRRQIQRRAKRRQRIRHELTAIGLLPDGDLEFDDLMKEDPAALMQSSTEGAVLSLREIGRVIYWFSSQRGFLSLRAGGGDTTDEDDDRATRNRYRNPQTVKETGEIKVRGQENILVDFLYQQAQHHPALLTDEIIFGARGRLTYPVRPIKQGNFLSDGDSWLGEFGIHGLVFFQRSVYWDQKTIGTCSLDPRKGGPRVLRADRNAQKYRVWKNVLDLRVETPQRSLSDGERKVVYDTLMTQGSVSFNSLRKKLKLPDDAAINLALSEREELKGNETDAAMRKTLGDAWEEMDEQTRDNIVSVLLGNALADQVRAVLMGKQFGLTHEQAEAALLVGFPSGRSMFGRHTIKQLLRFMPEGPMASSEALQETLGGVWEALSDTQQDQMISLLLDDAKRSKEKKALSATLASDFGLSSAQIKAVVGVRANESKGIKEERGALIKNERHVIQAAGFRMPEEVRSERPVEIEKLTNPLVRQTLSQLRKVLHAVAHTHGLEGDQPFDVVRIELTRDVRSNYRARKETNQRQRQNEKDNKAAEKMIEDFAPGAKISYDHRRRARLWKEQGEQCLYCGQPISSIEAFTGATELDHILPQSRTLDNSMANLALVHADENQEKGNRTLTEWLGPEDAFEIAMRAKKYIPYPHWKPKMRRIEAIDVADAPVPEALLVQTGYINSVARDFIRQELGMKAEVSSGRITASLLYHTGLKKDGEDHRRHAQDAAIVAICDRRTSLRLAKAYKKKEATGSYSGESEYGGVEPWEGFREQVKACYTDINVSHAVKGKMSGQWHEETYYGKVESPYLEGDDVYAFRRPVSWVTSPKKLAEVADPAVQEALRQNLRDRGLDPEGSSFKFDEKNPPHMPKDKNGDANVINTVRLHVNKPGNKILRPETEPKTGVVMGRNHSAFLYENTETGKWRLHIVTRFDAFLNRGLSLSETRAVHAEEDEEFLFSVTIGAALLLEMDGKDELFFVKSLAPSLQSLDMRPASTTAGNKNIWFRASKLQKFKARKVVVLPNGEVRTARD

SEQ ID NO: 5159 - protein, 1076 aa, synthetic construct
  REGION 1..1076: note = Synthetic
LKCRPGPTWWSCDGRRVGPKRCCATPEGGTNRVAPWSRARELSSCQDKTPSRVQVGPTLPDPAALCTAGLRRLVFRSPSDRSSGMKRVLGLDLGTNSIGWAVVDVPEGDEPGSVVALGSRIFSAGAEAAGFALVTPAKERRQKRAMRRQVQRRAKRRQRILHELTGVSLLPADDDELEALLGEDPAVLLERSAAGEALTLRQVGRVVYWFSSKRGFLSLRTGGGDLTDDDDERTEQARYRRPQVHADTGEVVADGQEDRLVAFLRDQAVHHPELLTDEVIFGRRGRLTYPVRPIRRERFLAEGGSWLDEFGIHGLVFFQRSVYWDEGTIGRCSLDPEHGGVRALRADRLAQRFRVWTTIANLRVGDPERPLAKEEREALFEALMTQKTLSFASLRSKVGLGAEEPVNFERSERESVAGNETDAEMRRVLGKDAWGELDEGIRDELVHVLLGDAPEHQLRSVLAKRFDLSDEQVERALNATFPGGRARYGRRTLRRLLEELPGCDSERDAIKAAGYPMPEEVRAQRPFDLGEVTNPLALKTLSQLGKVLAAVSGVHGRAGGAPFDVVRIELARDVRANARDRKEANQRQRANEKANKDADALLAEFAPGADPTRDLRRRARLWREQGERCLYCGEQIGAVAALGAATELDHILPRSRTLDDSLANLALVHAAENSDKGDRTVVEWVGADKADEIAERAWDNLEKAHRWGKVRRLRAEDVPDDVVPEALIVTTGYINRLARDFVRHELGIEAEVSNGRITAQLRYRLGVGKDPGDHRRHALDAAMVAISDKSTARSLAARFRQERDYGRRRDDDYGSWEPWEGLRADILDHYDGINVSHVVKGKVGGPWHEETRYGKVTSPHRDGDPLWARRRPVSDIKSASRLDEVADPAVKKALIADLARRGIDPEAKTFTFDPKDPPTMPDGQPIKKVRCHLSLPGNRVLRPDAEPKTSVTMSNNHSAYLYRNAGTGRWRIRVVPRFEAFQNRLVPAKQLRGLYAEEAEEFLFSVTPGCVVHLPGHEEAELWKVLSFEADGRIRMLPINDSTDARAVRFGSSRLSGLDATKVVVLADGQLRTARD

SEQ ID NO: 5160 - protein, 999 aa, synthetic construct
  REGION 1..999: note = Synthetic
MSPHKLVLGLDLGVTSIGWSLIQFDLDEAGKVSRSDDGQVSARLVGTGVRIFPATTEDKTNEPKNAKRRTARGQRRLVMRKAKRRNKLRELLSANNLLPAIDSATSASEFHALGDPYDLRVLALDQRLEPYEVGRTLYHLSKRRGFKSNRKSGESKEDGVVLGGIKEVKEKMEAQAMRTVGEYLRSQEKKRKHFTQRDMIEDEFEAIWQKQASFHPTLLTDELKKDIHNAIFYQRPLKSQRGLIGKCTFEKDKKRCDLARQEAQRLRYWQDINNLQLQDPTTLNWRPLTLEEKGRVAAKLENTKELTYKGLRKLLKVGEDVRINLEANDKKFYGNKSAYTFRKAIGERWDAFNDEEQNRLVEELFRIEDEDALGRRLGGFWAFGDDEIEKLKGVWHQLEDGYSRLSLKAIRKVLPKMIDGLRYDEAVREIYGDHRKQFGGEEFQKLQLPSKELRNPIVFKALCEVRKVVNAIIREYGLPAEIRVEMARDLKLTKLQKEQSMKQANANKRANEEAEDFFKRKFNLENISGTDKLKYRLWKESGERCPYTGNPIPPESLLDDGLVDLEHIIPYSRCFDDSYMNKTICDAKYNREVKRNRAPGEYLDRESEEYAQLMRRVSLLPFGKQRKFKLTSQELETNDWAGRQLSDTRYICREVRGYLRQLYPHSPDENKYVSVVAGGATAQLRHVWHVNAILSDGDIEVKNRWDHRHHAIDAIVVALCDRSLFQRISKLAGRNRELMKRILSGFSEPWPGFLTDVETAMNSLVVSHAPTRRIRGQLLEETAYGPTSTPGVYVVKKSLEGITDKQVKNIADRAIKEIVELRLSQFNGDSKKAFVEPLLHKDGKTPIRNVRVLVTMSPETVVGIKNESGEIYKYYPLAGNHHVDIYENADGERRAELVPRFYAAQRNWKPRDLGPEWRKLFSLCANDYVEFRGDDGELTVYRIQKMSGGGTVVIIGRPLEDARSEYVTGVVKQLQGKNLKNITRKLQVDPIGRLSKASD

SEQ ID NO: 5161 - protein, 645 aa, synthetic construct
  REGION 1..645: note = Synthetic
MSDGGFRTVGESLYARTEKARPEAPFAKLRKEFTHRSMTEAELDAIWTAQQEHHPAILTNELLADIRRVMFFQRPLRSQRGLIGKCIFEPGKKRCDLARPAAQRLRYWQDLNNLQLQDPATLNWRKLTTEEKAKLSAKLEGTKELTYKALRKLLKIGEDVRINLETNEKKLYGNKTAYAFRKAIGTKWDAFNDDEQNRLTEELFRIENEDALKRRLSSYWNFDADEVAKLEATWHQLEDGYSRLSLKAIRRVLPFMMDGLRYDEAVREVYGDHRRIFGREEYQKLELPPKDLRNPIVYKALCELRKVVNAIIREHGRPDEIRIELARDLKLTKLQKEKAMKQANKNKRANEDADTFFKERFGLENASSTDKLKYRLWKEAGERCPYTGNPIPPGSLLNDGLVDIEHIIPYSRCFDDSYMNKTICDAKFNREVKRNRAPGEIYDRESEAYSELIHRIAVLPPAKQRKFKMTEQELAETDWAGRQLSDTRYICREAHGYLRQLYPYSPDESKYVQVVSGGATASLRHVWHVNAILSDGDIEAKNRWDHRHHAIDAIVVALCDRGLYHLISKLSGRNHELMNRKLSGFSEPWQGFLDDVNRAMSTLIVSHAPTRRVRGQLLEETAYGPTAVPGVYVVKKGLEGITDAR

SEQ ID NO: 5162 - protein, 1010 aa, synthetic construct
  REGION 1..1010: note = Synthetic
MPFFKTVLGLDLGVTSVGWALLRFECDESGRVLRNEEGLLSNAKIDDCGVRIFPATTEDKTNEPKNRGRRMKRGQRRLVMRKAKRRNELREILTANGLLPEVDPAASEHTFDQLGDPYELRVRALNEKLEPFQIGRAIYHLSKRRGFLSNRKTGTSGEDGKVLGGIKEVREALERNGHRTLAEYLVTLPKKRKHFTHRSMSEAEYESIWETQRPHENVTLNDELKAQIKNIIFYQRPLKSQRGLSGTCTFETDKKRCDLARQEAQRIRYWQDINNLQLQDPATLNWRPLAEEEKQRLAAELEHSEVLKYEKLRKLLKIGDDVRINLEANDKKIKGNTTAHYFRNALKKTAKKWDDFNAEEQDRLIEELFRIENETALERRLKEFWGFDEEAVGKLRGVWHKLEDGYSRLSLKAIRKVLPLMMQGKRYDEAVSEIYGDHRKKFGSEEFPKLELPPKDLRNPIVFKALCEVRKVVNAIIREHGRPDEIRVEMARDLKLTKMQKEAVMKQQNINKKANEMAEAFYREHFNLENISGTDKLKYRLWREAGERCPFTGRPIPATSLLDDGAVDIEHIIPYSRCFDDSYMNKTICDARFNRDVKKNQAPGEIYDRKSPEFFELIERVKDLPGGKRRRFEMSRNEIEHPERFGKNAKDWIGRMLSDTRYICKEVRGYLRQLYPYSADEGKYVQVVAGGATANLRHVWHVNAILSDGDIEEKNRWDHRHHAIDAIVVALCDRGLYQFISKLAGRNRELMKNKLSGFSYPWEGFLDEVNEAIGKIVVSHAPTRRIRGPLLKDTAYGATQTPGVYVTKKPVEALTPAMVKSIVDPVVKEIVELRLSQFNGNIKKAFSEPLFHRDGKTPILKVRYRERCSPNSLVGIKDASGKVYKYYATGENHHLVVFESADGERTVVVVPRFYAAQQNWKPSDLGTGWRRLFALCRNDYVEFLGDDGKLGMYRLQKMSGDPGWYIWLRPLNDARKEYEGVVQIRNSSKMKRVTRKLQVDPLGRLTQASD

SEQ ID NO: 5163 - protein, 1012 aa, synthetic construct
  REGION 1..1012: note = Synthetic
MPFSKTILGLDLGVTSVGWAYLKIDTDENGAILRDEDGSLGNVAIIDTGVRIFPATTEGAKSEPKNSKRRNARGQRRLVMRKAKRRNELRELLSINGLLPRIESITSAAAFHEIGDPYSLRSRALNERLDPFEVGRSIYHLSKRRGFLSNRKSAKSKEDGVVYDGIARIREELEKGGFHTVGEALHARADKARNENGFAKLRQEFTHRSMSESEFEQIWHTQKDFHPQLMTDELRAKIRNIIFYQRPLKFQRGLIGKCTFETDKKRCDLARQEAQRLRYWQDLNNLQLQDPQTLNWRTLTSTEKETLANELENTKELTYKRLRKLLKIGEDVRVNLEANEKKIYGNKTACAFRKAIGKQWEDFNIEEQNRLVEELFRIENESGLKKRLKEYWNFDDQQIEKLEGVWHQLEDGYSRLSLKAIRKVLPKMVEGKRYDEAVTEVYGDHRRKFGSEEFQKLELPPKELRNPIVFKALCEVRKVVNAIIREYGRPDEIHIEMARDLKLTKLQKEKAIKQANENKRNNELAETFFRERFGLEKVSGTDKLKYRLWRESGERCPYTGNLIPPEALLDDGLVDIEHIIPYSRCFDDSYMNKTICDAKFNREVKKNQAPGEIYDRESEDYFQLMQRVSSLPFGKQRKFKMTKEELESTDWAGRQLSDTRYICREARGYLRQLYPYSPDENKYVQVVAGGATANLRHVWHVNAILSDGDIETKNRWDHRHHTIDAIVVALCERGLYQLISKLSGRNKELMKKILSGFSAPWRGFLTDVETAMNSITVSHAPTRRIRGQLLEETAYGPTNKPGVYVVRKSLDGIKLPAVKKIFDPVIKELVELRLSQFDNDLKKAFCDPLFHKDGRTPIRSVRIHETISPDTLVGIKDEAGNEYKYYSIAGNHHLDIYENIDTGERKAELVPRFYAAQRNWKPADLGPEWNKLFSLCANDYLEFRGDDGELRFYRVQKMSGGQTTCLNIRPLEDARSEYIPGVSIELKSSSGFKKITRKLQVDPLGRLTQASD

SEQ ID NO: 5164 - protein, 1204 aa, synthetic construct
  REGION 1..1204: note = Synthetic
MDFVFFGGGIVNNITEIEYKKIKNKLGNNDYRLGLDLGVGSIGYCAIALKDDDNGEKSVTDNVVLLGSRIFKASSGAVDRRQKRGQRNNHRHNRERKRFLWNLLASKNLALEIPKNIGKKEDSSEEETSKKRFPVETLKKDPYTLRYKALEEQLENYDLGYVVYHIANHRGTASVRTFLEDDETTRKDNTETARIADNIKSVMKSNGYRTYGEFLYKEYIQKTSQDKRVKVTNSNNKVFAVTRDLIIEELKIILKKQRDHANLTDEYIEKLIKAVDYETEKLIPEIGTCPYFREERRLPKAHKLNEYRRIYEALNNSRFFVPVTNLETGEITSFTERHFFDDIVDNKFPFKEKERDVLFNYLLGNKKLTVAKAQSLLKLPYGTEIQLQGKDKSKQEIKGYTLNTLEKMSFWNRLSEELKDEFLYDWNSSPDERQLKKKLLEIYNLSEQEIDECFKKLVISSSYADIGKKAMKIILPYIKKGLSYNEAIGKAIEDKKLPSFSKDVYDLLPYYGKILQESTQKVIAKGFSNQFKNKNYKIPNTNKDELEYGKIANPVVHQTLNELRKLVNEIITIFGKKPYDITIETSRELKKSQQARIELVNEQKDNEKKKKNIYDTYIVPHIAQIKSKKENPLNYILRFELLDEQNKRCPYCLKTLRVDDIISGKAEIEHIFPLSLSEDDSKNNKVLACSDCNATKGERSPYDAFAHLTEGKFVWNNILANLLDENNNKNFRNKAWRFYQGSFEKFLENKPMNKRFTTDNSYISKTASKYLNSLYDKPTKIFPVKGFLTSQLRLAWGINGVLIPFAKELLTEKEQEKLQKELSQNKKIRIDNRHHALDALVLAFASRGYHNFINTINSNGYKINYKEKNWLSKILLPPANKTVEEFNDFIKNKIPETNISIKHDHDKNGQLFKETIYQTYYLNDSKSILVSVKNVKDIDFPSEKEPKERLETALCKYNIKDTDNEKLKEKIKHNAEKYNQIIKILSNIKERLERENVMLKNEGKKEKKITEQLIFKSACEYVSGKYYQIETKLNNKFYSAKNPIQNKTGFGYDTGDNLCLDLYYDSEGKLCGEVIRKANFLAGQIPEYKKNGYTLFERIYQGDILEVDQSDKKWSLKNKTNSAPKNRVFVKIATFTELNAYYEKGKKDQIQIYFCNILKADQKHDDSFYISSMQEYNPRKVILSSLGIIKYRSSVLKDKNVENN

SEQ ID NO: 5165 - protein, 1195 aa, synthetic construct
  REGION 1..1195: note = Synthetic
MQKNINTKQNHIYIKQAQKIKEKLGDKPYRIGLDLGVGSIGFAIVSMEENDGNVLLPKEIIMVGSRIFKASAGAADRKLSRGQRNNHRHTRERMRYLWKVLAEQKLALPVPADLDRKENSSEGETSAKRFLGDVLQKDIYELRVKSLDERLSLQELGYVLYHIAGHRGSSAIRTFENDSEEAQKENTENKKIAGNIKRLMAKKNYRTYGEYLYKEFFENKEKHKREKISNAANNHKFSPTRDLVIKEAEAILKKQAGKDGFHKELTEEYIEKLTKAIGYESEKLIPESGFCPYLKDEKRLPASHKLNEERRLWETLNNARYSDPIVDIVTGEITGYYEKQFTKEQKQKLFDYLLTGSELTPAQTKKLLGLKNTNFEDIILQGRDKKAQKIKGYKLIKLESMPFWARLSEAQQDSFLYDWNSCPDEKLLTEKLSNEYHLTEEEIDNAFNEIVLSSSYAPLGKSAMLIILEKIKNDLSYTEAVEEALKEGKLTKEKQAIKDRLPYYGAVLQESTQKIIAKGFSPQFKDKGYKTPHTNKYELEYGRIANPVVHQTLNELRKLVNEIIDILGKKPCEIGLETARELKKSAEDRSKLSREQNDNESNRNRIYEIYIRPQQQVIITRRENPRNYILKFELLEEQKSQCPFCGGQISPNDIINNQADIEHLFPIAESEDNGRNNLVISHSACNADKAKRSPWAAFASAAKDSKYDYNRILSNVKENIPHKAWRFNQGAFEKFIENKPMAARFKTDNSYISKVAHKYLACLFEKPNIICVKGSLTAQLRMAWGLQGLMIPFAKQLITEKESESFNKDVNSNKKIRLDNRHHALDAIVIAYASRGYGNLLNKMAGKDYKINYSERNWLSKILLPPNNIVWENIDADLESFESSVKTALKNAFISVKHDHSDNGELVKGTMYKIFYSERGYTLTTYKKLSALKLTDPQKKKTPKDFLETALLKFKGRESEMKNEKIKSAIENNKRLFDVIQDNLEKAKKLLEEENEKSKAEGKKEKNINDASIYQKAISLSGDKYVQLSKKEPGKFFAISKPTPTTTGYGYDTGDSLCVDLYYDNKGKLCGEIIRKIDAQQKNPLKYKEQGFTLFERIYGGDILEVDFDIHSDKNSFRNNTGSAPENRVFIKVGTFTEITNNNIQIWFGNIIKSTGGQDDSFTINSMQQYNPRKLILSSCGFIKYRSPILKNKEG

SEQ ID NO: 5166 - protein, 1032 aa, synthetic construct
  REGION 1..1032: note = Synthetic
VLYHIANHRGTDSVRSFLEYDDDKIKENTLTAKIAKETKKVIDAKKYRTFGEYLYKGKIEKFQQNIRKKVSNRKTPANKNKEFAVTRDVIIKETEKILASQKQYYTYILTDEYIKKIKDAISYQTEKLIPESGYCPYFKDEKRLPRSHKLNEYRRMYEALNNAKYFDPVLDENTGEILSYQEKEFSREEKKILFDEVLLKGMELTESGAKKLLYHLPDGCEVQLQGRDKTTQKIKGYALVDLEASPFWLRLSQQQQDEFLYDWNSLPLEKLKPKLTNYYSLTESEVDETFQEIKLPSNYASVGKKAMEILLTYIKDGCSYTEALEKAVSEGKLKVDKQTMIYDSLPYYGKILKESTQKLIGKAFSKQFADRNYKEPDTNKNEREFGKIANPVVHQTLNELRKLINEIITVFGKKPLEIGLETTRELKKSKKNREYLSKQQNKNEYARNRIYKEYIEPHLSQIKSRQENPSKYISKFELLEEQNFICPFCSEKITPDDIINSKVDVEHIFPIEESEDITKNNLVIAHNECNADKGKKSPFDAFGDKTSGKYRWNCILHNAQKNLPHKVWRFYQGSLEKFLENKPMSRRFGTDNSYISKIAARYLACLFNDPYHSEIFCIKSSLIAQLRIAWDLNSIMVPLVKNILSEKELEEFKISKNKKIRIDNRHHALDAIVIAYANRGYHNFLNRIHAKEYKINYREKSWLSKILLPPLNRDLEDFKISVKDSIEKANVSIKHDHNTNGSLVKATAYKVYYSGAGEYIITTSKNVEEISFKEKEDPKDTLYRALCKFECRDIDIKDEKLIKKLKYNSTLYKKVQNNLSKAKQELEQDNKKTEEEGKKSQKITEVRIYKKACSLVKGQYIQCGSRLKDKFFAVKEPTEIKTGLGYDTGDNLFLDLYYDKTGKLCGEIIRKVNFNRNKPNYQKEGYTLFERIYQSDILEVDTSEDRISLKNKTGSAPSDRTFIKVNTFTEVNAYFDGKRDKIQIFFGNLLKSSFKNDSFFISSMQKYNVRKVILTSLGIIKYRSQILKNKEV

SEQ ID NO: 5167 - protein, 1187 aa, synthetic construct
  REGION 1..1187: note = Synthetic
MNQIYEQQATKLKQKLDGKDYRIGLDLGVGSIGFAIVSMEENSEKVLLPKEIVMSGVRVFKASDGAAGRREKRGQRNNHRHNRERMRYLWKLLAQEKLALSVPPDLVKKENSSEQETSSKRFLKEVLQKDVYELRVKALDKKLELQEIGYTLYHISNHRGSSAIRTFEEDDENTQKENTENKKIAGDVQRLMQKENYRTYGEYLYKEFFASKEKHDRDKVTNTTNNHKFSPARDFAIKEAQLILDKQSEFYKELTKDYIEKLIKAINYETEKLIPESGYCPYFKDEKRLPRSHKLNEERRLWEALNNAKYSEHVVDYSTGDIVNFEEKTFTQEQKQKLVDYLLTGKDLTQDQTNKHLLLKNVYNEDIVLQGRDKKTQKIKGYKLRKLEEMPFWARLSEQQQDQFLYDWNSCPDEKTLTDKLLKEYKLKDEEINEAFNKIVLSSSYAPLGKTAMKIVLEKIKNGLSYTESIEEALKEGKLTKDKQSVKDKLPYYGVIIPESTQAVIAKGFSRQFEGRNYKKPHTNKDELDHGRIANPVVHQTLNELRKLVNEIIEIFGKKPCEIGLETARELKKSIEARAQLSREQNENEKYRNDIYETYIKPRQQYIASRQENPKNYVLKFELWEEQKVICPFCLKPINSDDIIENRVDIEHLFPISESEDNTRNNLVISHVGCNQNKATRSPFDAFGSSPTMSLDGKQHKYDYNEMLSNAKKHIPKKAWRFNQGAFEKFIENKPIKKRFETDNSYISKVAHKYLSCLFEKPNIICVKGSLTAQLRLAWGLSGVLIPFAKRLLDDKEIEDFNNDVNKSKKIRVDNRHHALDAVVIAYASRNYGNMLNRISAQSYKINYKEKNWLSKILVPPNNKNRNELEADLQSFETSIKQALTDAYVSIKHDHNDNGQLTKDTMYKIYGSNKGYTLTTYKNLSGLKLTDKKKTPKEILETALLKFEGREDELKNAAIKNAVSNNKKLFDLIQNNLKRAEELLKEENQRAKTEGKKEKITNDVSICQKAISLLPSNTYVQLSKKEPSKFFAVQQPTDTKTGYGYDTGESLCVDLYYDNKQKLCGEIIRKIDAQRNVTPNYKNQGFALFERIYGGDVLEADFNNDKKSLSNNVTSMPMDRIFVKVTTFTEIANNNIQIWFSNVLKSRNSPDDSFTIGSMQKYNPRKVILSSAGLIKYRSPILKDKES

SEQ ID NO: 5168 - protein, 865 aa, synthetic construct
  REGION 1..865: note = Synthetic
MNNITELEYKKIKNKLGNNDYRLGLDLGVGSIGYCAIALKNDDNGEKSITDNVVLLGSRIFKASNGSIDRRQKRGQRNNHRHNRERKRFLWNLLASKNLALEMPKDIDKKEDSSEKETSKKRFPKETLKKDPYTLRYKALEEQLEKYDLGYVVYHIANHRGTASVRTFLEDDEATRKDNTETARIADNIKSVMKSKEYRTYGEFLYKEYIQKTPQDKRVKVTNSNNKIFAVTRDLILEELKKILQKQSKYEYYRTILTDEYIEKIIKAVDYETEKLIPEIGNCPYFKEERRLPKAHKLNEYRRIYEALNNSRFFIPVTNAETGEITSFTKRHFFDDIIDSKFPFKEKERDILFKYLLNNKKLTAVKAQSLLSLPSGTEVQLQGKDKSKQEIKGYTLNSLEKMSFWNRLSEGLKDEFLYDWNSSPDDRQLKKKLLEIYNLSEQEIDECFKNLVISSSYADIGKTAMTIILPYIKKGLSYNEAIENAIEDKKLPSFSKNVYDLLPYYGKILQERTQKVIAKGFSNQFKNKNYKTPNTNKDELEYGKIANPVVHQTLNELRKLVNEIVTIFGKKPYDITIETSRELKKSQQARMELVNEQKDNEKKKKDIYDTYIVPHIAQIKSKKENPLNYILKFELFDEQNKKCPYCLKTLEVDDVISGKAEIEHIFPLSLSEDDSKNNKVLACSDCNATKGERAPYDAFAHLTEGKFVWNNILANLLDENNNKNFRNKAWRFYQGAFEKFLENKPMNKRFTTDNSYISKTASKYLNSLYNKPTKIFPVKGFLTSQLRLAWGINGVLIPFAKELLTKEDQEKLQKLLSQNKKIRIDNRHHALDALILAFASRGYHNFLNTINSKGYKINYKEKNWL

SEQ ID NO: 5169 - protein, 1389 aa, synthetic construct
  REGION 1..1389: note = Synthetic
MTTSLGLDIGSNSVGSAWVDTGKKEIRLGDSVFPAGVEDSDDKRGKPRNAKRASTRRTRTTLARRAERKRMLRQCLTKAALLPMDGKDLQTLMDMNPWELRRKALTEPLSLHQFGRVLVHLNQHRGASGVHLGAEEDKSNKKSKMKSKKGGEEDKEGAVKEAIGRLRGEMVDRYATEGDDRDGLKASREKFAAWARQRLVTVGRFVADEMPDRRNEMKTKDKRSDRERDKGHPRIWCNPVRNREGRFKFHADRELIRQEFVMLWDRQASFRGPVAALLTPELKQKLLDPTESTDWRCQGLIFGQRRQTWDLGTLGRCVLEPSERCAPHADRFASYYRTVETVNNIRIIPSGQSPRPLTVDERKKILTLLRGPLGVHEKGKYAGEPKTTVNVTDIRLALGLGKPTRRSQIRLNIENDPDREINTDWFHREIAHGAIGEDSWNNWDESRRESVNRAILKFNPDDDEHASRLRDGAISWCGSTNEQAERLIAAWRKRPKLEDRVKLSRRAIRNVLAVMDAVPDHASFGFDNLHQWLTQIEARKLIAEDVDFRDVTTGRPLDEFAKHRYATGAKGLNKRDRHYLKKHLLKKDGETVFGPDGRPIAILPPAPMLTNPVVRKAIHEVRRHVIEYLRQFGRKPDYIRIELGREARMTKKDADRTLERIRRQERIRKNIVKQFDLGDRTRNQQNAAVERVVLAVQQNGICPLCGNTDVKDYLCPTRAAEGNGVEVAHIIPLGNGGPNGWSNKVLAHTKCNQNMLNMTPRDLWGDRFKEKMKRVEEIYKDRNLPKKEDAEGQAEWPLYFDRRDDHAKLDMFSKSVKDLEGFRESQLKDTRYAARQVMAYLADALFEGKGLPERRGPRLIFASTGIWTKRFRREWGLFFDPHGQRAKGLAPDEEKSRQEKNREDHREHALDALVTAMATEEIKDSWLRRAAEAERLKMDEDVYRREHPIAPPSPWKSVKELQEQAKREIFGDPDKPRPVAHRPAKRKIVGPLHKETLYGAVLDKNGVRSRDRCTKRQSVYATPDDCLKPSHLRVGRMETLLEAIKRITKELLAEGLGRKEAKTEAQRQVNSEGFKFKWTEPDPQKTGVVRDPELCRVLRRQLVQRGLDPDSFTPAQLKATIEAQGPLTQKSGVPIHSVVLLWSNKDPAVFSRWQTDPATGAKIKQYDALTDSGDRRAARIYDAQSNHHIEIRRDDKDQWSGKIIKTWKVAERNSDRLRAVRDFLKKNGVQVRRPRRGERSPPPGVPLRRLPKPERERIRKAVGQINSQYPLVDRTNDPVKGGDFVMSLSQGEMIFARPWDSKSKGPLGSPNYFVVVKLDPPNSIVLVPHWDGRRAKGRKDENGKKVPNSQRDDFTVTPGNLPRCGPADGEPPYKVRVGPLGDVVRLNND

SEQ ID NO: 5170 - protein, 1238 aa, synthetic construct
  REGION 1..1238: note = Synthetic
MEQKPPANYILGLDLGVSSIGFAVVRSIGDQPGEILKLGVRIIPLSKDDETEFTQGNAISKNMDRTLRRTQRKGLDRYQLRRKALIEVLTANNMMPDRRLLLELSPLEIWGLRAKAVTDKVSLQEVGRILLHLNQKRGYKHSKSDEAEDKKQTEYVQEVNERFASIKERSETIGQHFYAQLQQYFSVAQKTAPAYRIKEKVFPRAAYIEEFDAIWKRQQQEHPSVLSTDLYNQIRNEIIYYQRRLKSQKGLVNFCEFESQTFTTPEGKSIVAGPRVAPKSSPLFQIEKIWESINNILIKNRKGELFEISAAHRQGIFDHLNNNDRLTQTDLYKILGIGRNDGYFTNELIRKKGIQGNITRMAFAKILGSDHPSLQLNLLLSSMQRADTTTGEVTEQPVVDTTFEKEPLFRLWHIMYSLDEENCQKKLAKEFGFDEITARKLSSSIDLTKGGFGNKSTRAMRKILPYLMEGYTYDKACTLAGYSHSDSLTKEENERRELQPRLSPLRRNSLRQPVVEKILNQMINLVNAIIDQYGTPSSIRVELARELRQSREERNDAYNNINKQERENKKIETLLFELPYFQNKKSVSKRDIEKYRLWAEFRGISPYEPGKSINLSELYSNDYDIEHILPRALRFDDSFGNKTICPRRYNSGENAKNRSTAYDYMQYKRSKEDFESYLTLLESAYNDRRISKSKYEKLLMKEPDIPNDFISRQLNDTRYISRKAIGLLSNICRNVYSTSGSITQRLRTLWGWDQILEQLNLPKYQQVGLTEERQITRNGQMHVITRIKNWSKRDDHRHHAIDALVIACTKQKLITRINALNAQHTREEILSEIAGIEYKNKLSLLDNYLFSFKPFDTAEIARNCENINISFKPGKKVATFSIRKIKKGKKKVPIQRHIITPRGPLSEESVYGKIKRKITRTVKLDKSFLTVDNIADETVKLIIRDRLSQHENEPSKAFGNLKKDPIWTDGTKTKSISQVDIFDYVEEYVIKYDISNITAKDVQHIVDKRIREILADRLQQYGDNHKEAFKTTVWLNEEKKIPIKRVRCYTGLKSDSVVLIKVSDKSWGIEYEKYVKPGNNHHIAIYKDRDGKLQEHVVSLWHAVERKKYGLPVVIKDPSSVWTDILNKRELPNTFLENLPSDNWKFQTSMQQNECFVFNMNIDELKKAIQNKEYKCIAPNIFRVRKLTSGGYWFNQQFETTPRESLEDKRSGRCIQASLTSMSGIKARINTLGEIFLE

SEQ ID NO: 5171 - protein, 1072 aa, synthetic construct
  REGION 1..1072: note = Synthetic
MKSKMKKGYILGLDLGSQSIGWTVCYCDEREQVTGLGDLGVRIFGDGRDDKSREPLAVGRRNAKQTARRRMRSVMRRRALIRYLQRIDLLPEDDRAKRGLAQLDPYHLRSAAVTRQIERYEIGRALLHINKRRGFKSNRKEFQSSDDEVVGMKKGIAVLERKLGKEMTLGQLLHKERSANLKNTVRFRPSTANGKNSWDIYPERSMYADEIRLILDTQREFYPDLDEKVFSKLHRIIIEQRPLKKPRVGSCRFYPDQDRAPLALPSSQAFRILQEVANLELRENGELRQLSDDERNSVVQQLLLKEDRKCLNSKGTEILFSKLKTKLLGDSSLRFNLEEMERKSLNVDLTAKALSSHVCFGSKWFELSREDQDVIVLKLVGAEDKPLQDSDDIVRKWLIEEWGLEAKQAEACLHAKLEDGYGRLGQRALNELLPHMENGLNYFEAKEAASLEEPNLHTEIREELPYYGEILENYTMPVQNASPSASVATCEAKFGRIPNPTVHVGLNQLRSVVNALIERFGVPSVVRIELARDFAFSAKQELELKNRQVSNKKRNDRARDAIAKAGQDPRSSDNLLRFKLWEELNASDPLQRLCPFSGRPISVETLFSSEVEIEHIIPFSRSFDDSFNNKTLSFRAENRLKLNRTPYEAYGQRDDYNEIRERASNLNPSKQWRFEPDAIDRFIGEHGSLIARTLNDTRYFSRLATQYLRAVCPKVESIRGAMTASLRRQWGLENVFDDSGKKDRSEHRHHAIDAFVVACSTRSFLHKFQQATEAMKREFPEKNPLHIPSFPEPFDGYHPGVVQAKAVKIIVSHKQDRRRPLGGVDATPGELHEKTFFGLESDVGNESVVKVRKPLADLKRKDCAKIASPRLRSYFEQQAMIHASDKEWKDFLHSILGTGRIRRLRMLEKANKNSFVRFKARDGSTYRLAKTRANAWVDVFEVLNKSGKAIWKMEVTSLYQAANETSSQPPWKKEYPTARKIARLSINDSVALCGEDGFWRLFRVKKMSKGKLFVRDLRVAHEEGDSLSLQLSATKMQNMKLAKVAILPDGKLMAPKHIRENLYVGSIYSDTK

SEQ ID NO: 5172 - protein, 1194 aa, synthetic construct
  REGION 1..1194: note = Synthetic
MPIIFAYDIGTNSLGWAVVDLENKKILGSGSEIFPEGINRDTKGAEISKNQTRRMKRQTRRQFFRRRLRKFRLATILFNHGMFPDFIALHDQFYPDKVKDHNREKFKRILQQVRQPEELKRFFALNPYDLRSKAAQGEKLSKMELGRVLYQLAQRRGYKENLQTPLEDGKAIMKGDPSEEKVGIEATRAALEENKTLGQYLSSLDTTQERIRNRYTLRSWYLHEFNVIWESQKDYYPDFLTNELKKQIGDEQEGELFYQRPLVNQKHLLGTCTFEPNKPKCPKSSPLFELRRMYEFINNIRLEGRRLNEEQKNIIIDLFNSKDRFTFEEIQKKLCLTNGNFNYEKELKIAGNKTLAGLSKVFGKKAWNDMSWEQKMHAWHIKLNGKDRDKTIEYVKNKWGFDDKQADKFIKLRLADGYGQLSTRAINRILPYLKRGEGYSDAVLLAGLSKAFGNTVWNNYSDEYKKEIEDNVLSVFMKDDEGTGMDHAKDLLREAYGLNDHQLDKLYHHSDIDGNPHLGYLPEDDKKIKKIKNPVVEAALFEVRRMTNALIEKYGKPNEIKIEMARELKMGAKKREEFRFKQREREKENIEAKKTLDEYGMPYTRRNVQKVLLFRELEKVSGKAISPFSGKTISISQLFNEGYFQIEHIIPYSVSLDDSMANKTLCEADINREKGDDTPYEYYKRIGGDWDDIKNRIFKILPYKKAKRFISKDNPALEQFISRQLNDTRYISRFARDYLKMACQNVSVTQGSVTETLRRHWGLDGILNAPQKLEGYPDGEYIVAVDVDGKLIEGSLEPWVPQPEQIKKIETDKQKIGKPAHGYVRNNAFYLKKLRNDHRHHAIDALAVACSNQGFLQKLATMSGKGQDRNAALNFPEPWEGFYQDAKKSIEGILVTYHQKDRVLTKVKKALFDKKSGKRLEKKGKKLYGQGIAARGALHEETYYGKRNSPDNGEEGYHIRKGLDQLTPKMVNQIVDPTVRKAVKEALLKADPTIDFTKKFNIPKNAFFEMDDNGKRIPKVHIPNRNGDPIPVKKVRIRKTASNMVQLSEVNKWVEPGSNHHVLLFDLPDGKRIGKMVTFWDAVEAEKQGLETIDRHHEEGAKFYTWLKKGDMVLLNVEEDIDVDSLSNKEIGDHLYYLRKTGQSQYGIMLVFALHRAANVDANKDNNPIILRCSPNTFRGIKVEISKTGEVTRV

SEQ ID NO: 5173 - protein, 1056 aa, synthetic construct
  REGION 1..1056: note = Synthetic
MPKQELVYSFDLGSGSIGVCVRSGKNILHLNSLLLDNEFASVKEAAAQRRQIRTRIAHKEREKWWNEQAKKAGIEVLQTAQPTKENPNLKPDSRMLIEFLPKNSKDKTIYSSHLLRIALLQGIKLESWQIYKAIRSAIQRRGYDANLPWATDYDSDTKANSDAATRYEEKLKEFFADKEEYYYPCYYEAYIQSIWSPSNPKDLSGRLSENPSPARNKDNKPQEDKCFPSRDLVEKELKDLLSAAAKLFPKLKDKENYVLYGQAQRAYASYEYKKDIDKENYISHRGTSWDWQGLLGQKVPRFDNRIIAKCRLIPRFNVCNAKKQINKEVSFLLALKNMRFTLDNTTTQSLNCAQINEIFKTYAEFCEYEKQKETAVAKKQNPCTKTFWKNYVHALGGEVNPGQQEIAKPKEGGRSSFCKPALNILHSLILSGKTPHNYYAELVEQTKNTDLQKGLIKDDYRFLLNMPNDWNSISIQDTREEDKKLSQQEALRKIDEIIAGVNNRIVCHRLLMLKQVLQKLDDQFNKEYGVPDKVVFEIAREDFMGKKKKDEYLKKAKDGKKNNDDAVKKLKDMGLPVSDPNIIKIKLGNEQKWKDIYDTSDKRNLIPENIGQYEIDHIVPRTSSKGGSDSFVNFILTKNALNQTKKDRTPYEWLSSDNSKWQAYLANIADFSKSANSKKIELLTSDKAENIEKRKTDLQATSYLEKLAQTIAGLYFGFGINTKDDKKRILFFTGGETATVRSKLDLNRVLYKNDEEFEKAQKAGLKEKNRKNKKHHALDALVLSMLPEIKVSKREIIEKPDYFHKDYCVKQLKSIIPQTIKQIKPKLRATIYALRSRYENGKPYYYFISRFNSNLTLFEKMEDAKKEITNIFDLKIKNDWKVKLEEKGLTQEKWIEFLNKYTNNGKRIKQIAMTDSKAFKKEETFNSNGIIKNVIGEYGSNGVKGQWIKGKEGHQGQIVYKDEKGKWRVEPVYVFESIYNKKKLYENKYKDVRFLKSGQLVELKKDYENIKAGIYILRTLKSNGSCKLEDINTQEEIDKSVNVLIEQCGMRSYEKK

SEQ ID NO: 5174 - protein, 1069 aa, synthetic construct
  REGION 1..1069: note = Synthetic
MRLKEECYMPKNELIYSFDLGSGSIGICARSGKKVLYLDSLLIDSEFASVKEAAARRRQIRTRIAHKEREKWWNEQAVKSGIEVLSTAQPTKENPTLKTDKRILTEFLPKDSKDKTIYSSHLLRIALLQGVRLEGWQVYKAIHSAIQRRGYDANLPWGSGTDNSDEKDNSESSNIYNEKLKEFFGDKEKYHYPCYYEAYVQGIWSTENPKDLSGRLSENPSPARNKDNKPAQEKCFPSRQLVEKELKALLASAAQFFPKLKGKEDFILYGPAEKAYASYNKDDKYTQYRGTNWDWKGLLGQKVPRFDNRIIAKCRLIPRLNVCKAGKQVNKEVSFLLNLKNMRYSKDNTTSMALTPVQINDIFKVYTQYIESEKEKEQNKKSGVKIQNKRAGKSNPFTKTFWKNYVRDTLGSEINVGQQEITKPKDGGRSSFCKPALHILHGLILSGKKPHDYYKELVAANKNTDINKGLVKDDYKFLLNMPNDWNSISIQDTREDDKKLSQKDAKDKIKDIISGVSNRIVRHRLIMLVKQLEKLSDKLKREYGDPDKVIFEIAREDFIGEKKKNEYISSQNANKKENEAAVKKLKDMGIAVNSQNILKIRLGNQQRWKDIYDTSEKRDLIPQYIQKYEIDHIIPQKLGGSDSFVNFILTKNALNQAKGRRTPYQWLQTSSNWQTYLSNVEAFSKFASPKKIELLTSDKAIELEKRKTDLQATSYLEKLAQQITGLYFGFGINTKDDKKRILFYTGGETANVRSKLDLNEILYSSKEEYEKAKQSNLKEKNRKNKKHHALDALVLSLLPEIKTKAKVVEEKPEYFNKEYCKKEISKVIPETIKQITPKPRQTIYALRCRIEEDGEKHYYFVSRFNSNLSLFTKIADAKEESKKIFDLKIQKDFQEKLKENGLTQESWEKWLNKYSGYGKRIKQIAMIDSKSFDEKDVFNSDGTKKEIIDKYGDKGVMRGQWIRGEESHQGQIVYKEQNKWNVEPIYVFESVYNKLKEYKNKYDKVKFFKSGQLVVLKEDCNDIKSGVYKLRTVKSSGRCKIESVDTQKEIEKNIAIFIEQYGMEVYKKQ

SEQ ID NO: 5175 - protein, 1279 aa, synthetic construct
  REGION 1..1279: note = Synthetic
MPPGKTQRLLRRATHTGIAAQHRRNPRQQLRHTERLDHIIIRPQLQPLHPLLLLPVRRQNNAGRTGALAAHHAQQLKAVNLGHIHIQQHQRHLRRKQQLQRAAAILSRQHGITRRLQRIPQSLADRRIILRHQNATTAHHPTILAQPPSCGQEKSRGTPPHPHADQSHTAGATAPAPAARPSPPAEQKKSPPEGGPDQMLLRPMCWTSSNREAACISNFVLIPERLYDTLAEVSIPNMNKLTFSFDIGYASIGWSVIENTADKGEAPRVKAAGVVIFGADDCLASERRAYRRMRRTIRARRKRIARMAQILSHSGLLSREELDAPGHPAPFWLAARALQGKARLSLLETWHILRWYAHNRGYDGNTLWTNDQGKASEEEQEDAKRVSAAKKAMAQYGTSSMAETITAFLGLNTEAAAADFTVASPKYRQCNWAFPRDDVKREVQNIICNSPLPASVANLLLNEAALQSEELAACGVILPRRYRGSVLFGQLVPRFDNRIIARCPITWESEYRSALEAGKPESDARRQADKMAKVPKADCPEFYRYRFARILANLREHGEPLSAALRQTLMQEAVRAKKLTKTSFRKLLSRHIDIKSSNFDNYFDLVDSADKALILVPEKDSRDKASGRAPYARPVLRRVIDEILRGEDPCKPARSLLHPEGEEKAQDGTLYCIADPNSEVNRHLAARSLDSQTNNPLVRHRLLILGRLVREMIERYAGGDPAQVSHCCIEVGREVRSYAGLSNKAIKIKESEKMQSFHAAVSYYEKLRGESGGDSLPPLNANLIRKCRIALDMDWKCPFTGMQYSARDLPYLEKEHIIPRSDRRTDSMAALVLTFREVNNFKNKRTALQFIRECGGQSVPGAPHLTILKEAEYTELVKNLRVSKNPHDKSRTATRKKLLMTERFGENNQVTAFTEGQMTQSSQLMRLAARVVRRCAPQVSVAMIPGRVTAELRRSWKLFGCLDAAAARNGTAPAENFKDLSKEDIRSRTHLHHAIDAAALGLARILIPGGTNGRVWNALISRRLSEQDEQALRDNLRPGLYSITPKHQLQLNNVPQETLDTLSAALAENRVVQHIPADMSGAKLEANYKRILGVGKEKGKDIVRLKKRPESEEAKRKKAERRAKSGNTKERKREPEDPLPLSKIIGLREDSKLRPMKAALVIEKNYAIALDPEPTLIRHHRVYKQLAERRRQNGGKPVRLLRAGDLIRLPSSPRHPEREGLWRVVSLKDAKGRGIVVDLQRPSSARPLETHPDNWINVSVNTLLRIGAEILAHRYTGDF

SEQ ID NO: 5176 - protein, 1087 aa, synthetic construct
  REGION 1..1087: note = Synthetic
MNYSLGLDIGTASVGWAVINEDKKRIEDLGVRIFERPEQPKNGDPLALERRTARSARRRLKRRRERLNFLKQFFIKKELLSSDEINDIFKKLQTKKNRDVKIYYDPYRIRVKAIKEKVPNDQLFVALYHIAKRRGYKSNRKKVEEADKVNDGQKVLGAIKANEAILAKYDSVGEALLKDKKYSAHKRNKLDSYTNSFIREDFEAEIRKILEKQKWSDDDIEELLMQKNRGLFYQRPFMDADLVDKMRGSCQLEKGEKRAWKASYSFELFNLAQNLSHLHYNQGNKLTQEQIAACVDKAKNTRTVKYKAIRECIGYKDDPNFYFDYIRGKREATYEAGEAHTFCELKFFHDIKKATTKNPSDWDRILNDIDLFDKIGYILTFYKEDAKVEQALKDLKLSSDSISGLMKLSYSGFSHLSVKALRKLTPHLLGGDTYDKAVEQEYPNQFSEKLSGDANTLPPLDEFQSNQITNPVVKRAINQTRKVVNAVIKKYGAPAQIKIECANELAKNFRDRKAIKKAQDENAANNQRIYELLKNDFKITAPNGLQITKYKLREEQYCKCAYCGKALGPEVFLKQHAAEIDHIIPYSRCGNDSLNNKVLVCSPCNQEKTRQTPYEKWGSDKGRWQLITALTQASKMPFNKKKRILASKPPKEDWNVRALNDTRYITRFISNYIKNNLKFSDSSHGKRKVLLPNGNITNQLRKIYKIGHKDRDLNNTHHAVDACIIATISDKQIKKFAEWNKYKELGANRHTVFYNDDNGNPIQVSEADFQILRDELLPWENFDKEVRIRSSMNYDSDKIEKLADFRDKFRDFANYDKDFLSKIHPIFVSRMPKRSAKGKAHQETLRSPKDDGSEKVMRLTRKRLIDCSLKDIENSVLPESDRVLYEQLKQLYQEKGKKAFQEPVYKNNKKVDQNGNQISPVTTIKVYSSQPNGILINNKTQFVNNGKTVCLNVYRRNNKYYCAPIFLHSLNEANPKILPTPKGKNKAEKADLQSIREKDGSILANPENGFEFCFSIFPNDYVRITFADKIVEGYYVKYHITAGTFYLMRHNQTSKENSSLIQCSAQSALDIKKLNISVLGDNYLPAE

SEQ ID NO: 5177 - protein, 1074 aa, synthetic construct
  REGION 1..1074: note = Synthetic
MRYSLGLDIGTTSVGWAVINEDRNRIEDLGVRIFERPENPKNGESLAKPRRDSRSTRRRLKRRRQRLNNLKHFFINQQLLTNEEIQDLLNPSKTAEQKAQFDPYQLREKAINSQVSPTELFVALYHIAKRRGYKSNRKKVEENSKEESGRVLMAIKQNKALLDNYRSVAIALLRDDKFKLHKRNKLDSYTNSFIREDFEKEMLAILNAQQWPDSWIEELLYSKPNGLFFQRPFMTSELIEKMRGKCPLEGTPRAQKASFSFELFRLAQDLAHLTYNDGNKLSEDQINRVIEKAKTTAKVTYKAVKEAIGFKSDPNFRFDYIRGKQTEYTEMEKREFCNLRFYHAIKKACTEIDWDRISQDLDTYDQIGYILTAYKDDESVEAELLKLNLQPETINQLESLSFSGFCGHSLAALRKLTPHLLSGKTYNQAVELEYPGQFNEKLSGENNELPPLTEAQLCQLTNPVVKRAISQTRKVINAVIRKYGAPTQIKIECANDLAKNFKERHDIKKAQDENANFNEKIIEKLKELGITTPTGTQITKYKLREQQLAKCAYCGANLTEDTLLDDRLTEIDHIIPFSRSGNDSNNNKVLVCPTCNQEKLNRTPFEKWGNDTERWLKIQALAESFNIPFAKKKRLLTEKLPKEEWGSHALNDTRYAMRFISQYIKSNLKFSNESSGKQKVLLPTGFITSYLRKMYHLGEKDRDLNNCHHAVDACIIATVSQAQIKKFAEYNKWKELGASYQTVIWYDEDGESHQKTKVEYAEMKAELLPWPRFDEEVKKRSGSTYDSSKIEKLSDFRDKFRDFDTYDETFLEKIHPLFVSRMPKRSTKGQAHKETIRSPKAEAGGRRLTRKRLSDCDLEDIKNSILPESDQALYQQLCNLYSENGKDAFKEPIYKNNQRIDKNGKAISPVKSIKVYSTEPSGILINHGTQFVNNGDTVCLNIYQRQDKFFAAPVYVHTLNRAAEILPTPNGKSKLEKADFNQLRTKDGKIFATKENGFELVMSVFPNDYIRLVHENKTVEGYYVKYGISAGTLSLISHNSTSKNDLDMIHCSVGQAVAIYKLNISVLGDNYIER

SEQ ID NO: 5178 - protein, 1101 aa, synthetic construct
  REGION 1..1101: note = Synthetic
MKYSLGLDMGTTSVGWAVINEDKQRIEDLGVRIFERPENPKNGESLTKPRRDARSTRRRLKRRRERLNYLKEFFVGHNLLSSVQVDNLFKYDKAHEHKDPYIIRSIAIKEKVSNEDLFIALYHIAKRRGYKSNRKTVEEKDKESGRALSAIKANQPLLAKYDGSVAAALLNDAKFTRHKRNKDSGYENSFIRADFENEILAILYAQKWNDGMISELLYANPNKPETKGKSGLFYQRPFMNNVLINRMRGKCQFENKPRAPKSSYSFDIFRLAQDLAHLEYNNETKLTPEQIKLCVEEFKKTKEPSYGTIRKILGYAKDEKFHFDNIRGKCGADQKENEKIKFGGLKFYHMVKSALKNLPDDWRKIENGEDLFDRIGEILTLNKDDESLEKALAEIGISREAKEQLMTINVSGFCHLSFAAIRKITPYILDGNTYDKAIEQAYPGQFSEKLSGDKNELPPLSEDQLYQLTNPVVKRAVSQTRKVINAVIKKYGAPYQIKIECATELAKSFHDRRKMEEQQKENAKYNEAIKVKLEEFGVTNPSGQQIIKYKLYEQQNGKCLYCGASLNVNDVFSNNKNVEIDHIIPFSICGNDGINNKALVCTRCNQEKKDHIPFDVWGGNTERWRNIMTLVNDQKIPLQKQNRLLCEKPPKEGWNKRALNDARYMSRFMSQYIKKNLKFAELGRGKQKVFTPNGTITSYLRKIYGIGSKDRELNNCHHAVDACIIATVSSGQIERASDWNKYRELGAEYQTILIENDNGEMFQMSPGDYDEWRKTLPPWENFAKEVCIRSGMSHDAGRIESLSDFRDKFRQFQTYDEDFLQKIHPLFVSRMPKRSMKGQAHEETLRSPKAKDGDLRLTRMKLDKKAAENYLKYKNNKNKNWLENSVLVESDKTLYEQLKRLLEEKGKEAFDEPVYKNNKQEDKNGRSLSPVRTIKVYEKKPSTSGTYLNDKTQFADNGKTICLNIYRRKDKAGDYKFFAAPLYAHSINKSSIPILPTPIGRSKEEKVEFTAMQNSEGLIMASPENGFELVAKVFPNDYVKIKYNDRTVEGYYVKYGITKGQITLLPHNSTSKDMASTCYVGQAIEVVILSISVLGDNYDFE

SEQ ID NO: 5179 - protein, 1159 aa, synthetic construct
  REGION 1..1159: note = Synthetic
MEKRQYRFAFDIGIGSCGWAVVSENETGNRRIEDAGSRIFDSGEMKEGKDRKSQKRRGFRGVRRVLRRRSHRKYRLRNYLRYVHFMTDMEIRCASEASMNQILPVKVRGIDEKLTKAELLQVLIHACNHRGYKDFYEVTETDEAQSQEEEDEKINQAAADRLDRSFEESHCRTISEYICRYCTIPGTDRIDYRNRFYKNENRMIIRRKHVENEVSTILKKQREWYPELTDQKIKEIMEVIFSQRDFEDGPGYASDKAEYRRYTGFLESIGYCRFYPEERRGFRNTVLGDVYAAINALSQYRYVHADTGEAKLTQEAAAKMVSYILKQGSLTRTQASKLLKPLGIAMYGSKDVDKTLVKSFRFLKEMKKIAEKCQVSWESLLSETDLTEYEEGKTSLLNQLGTVCSMYQTPHRKEEELKKLYAKWEHVHLPPAFWNALKRHKFNGTSSVSYHHMADAIEAFLKGDIYGNFQWNKQKQLDEKQESQRERLLSAKVLMQDEDVKDNPVVLRSINETRKVLNCLIRLYGSPAEIHVEVADDVARSYLERKRIQKMQRDHEKTRDAIKKKIAEILHCKESEVKGSQIERYKLYMEQEGKCLYSGRELDLEMVLDTQSHAYEVDHIIPYSLILDNTLANKALVCGNENQAKGQQTPLMYLKGEKKEAFIERVKAEKKRASHPISNKKYDYLMLATLYGKEAKEILTGWKSRNINDTRYITKYVVGLIKNHLQFAGEKARVFGIRGHITSRFRKEWLGKNTWGSDEKCRANYLNHAADAIVLANLSKMDVEVAMDYEKLRQIRRHYGETSIQYDHFLKNAAQRIAAFYPITEEAIRKQLVESKRTPSYVPNLEKEVDLRLGNPEGETRSEEEYRAKTEMYYEGAAFVVKPHLPYVSMKVERKFRGEIAKSNPIRLVEGNGIFYQVSRKPVEELESKDLSELYTSDGYLIEALEKAFTEGEKYLNNEDDKENKKDSQKKPIKKYMEKEHIDVFRTTNGQPVRKVSLKGTPVSNYYKKSINETNYSILGVPKYYCVEVYTNSKGQTQIWGLRFVDMISYEGKLYLKDGVRPADYARHVMYLFPGEYIEVEKKGKIVYEGTYQNVFNINQGKLRIKVKNTNALKTISIGNKAGVFKYAISLNGRKSGVVKEGEAGYPCFAHCLSKKEND

SEQ ID NO: 5180 - protein, 1148 aa, synthetic construct
  REGION 1..1148: note = Synthetic
MEKSKRIYRLGLDIGIGSVGWAVVSEKDGIGRIENFGTRIFDSGELNDGKDRTSQERRGFRGVRRVQRRRKFRKQSIKLFLTEIGFLTNDEIKKAEENFTADIIPLKVRAIKEKISKSELLNCLIHTCNHRGYKDFYEIDEDEIEDEDEAEAEEQGNIAAANSFDKNFRKSGCTIVSEYLMKNYKVSDGKINFRNKDHKEDERIIIRRKHMEKEIETILEKQSKFYNELTEENRKNIFEIIFRQRAFEDGPGQAGNSYRRYKGFIDSIGRCRFYPEENRGFRNTVIGDLFAGINALSQYRYVNKETGEVGLTPEIAKILIDEILKKGNLNKTEAKKLLKKENIEIYGSKDVDKTLTSSFKYIKGIKKITDEAKINWNILIFENQFEYEENKMSLLNKLGCILSCWQTPSKRSDKLEEFIKNHPKGNLFNDEVLEKLMKKKISGTSNASYHYMSEAVQAFLEGKIYGDFQWEREEKLLNKQIENNNIKVPVSALKNNVDIADNPVVYRGINETRKIVNAIIDVYGMPEYINVEFAKDVAKSFDARKKEEKRQKENREKNEKTVKEIAKILGIEETDVRGTQIERYKLYKEQECKCMYSGESLDLKKVLSDKDRSYEVDHIIPYSLILDDTLANKALVLGNENQIKKQRVPLMYLTGKKKEDFLKNVEAFSTRKVNPISAKKREYLLMPTIYGKEIQEKLKDWKSRNINDTRYITKFMIALLKSTLIKENENGEKLPHVYGIRGHITSRFRKKWLGKNWGNEEKPRESYLNHAVDAVVIACLTQDDVRITMEYEKLRQMYRHKEWMNNDNYREALFRVAGRLKMFSKKSKEEIVDILLDRNFSTSIIPSLYKEVDVRFGPVEGDKRTEEEFRIDINNYYSGTEDFIVKPHLSHVSKKQTKRFRGAVADSNPIRLIDEEGEKIKISRKSIKDLKRKDLKNLHTNDTSLIEALNKVFEGKEDKYTVEKYMKENNLKEFCTAGGQKVYKVSVRCPKVSNYYKKQIDGKNFSILGVPKYYCVEVYEDNKGKTRTWGLRYVDMVKHEGKLYLKDNVLPKDYAKHVTYLFKGDYIVVYKKDKKIFEGNYQSVDNINKNRFKGFGGNASKLIELGISSNCRVEKYHIDLLGRKCGKIDESRGDYPCFVPLSSKKKKS

SEQ ID NO: 5181 - protein, 690 aa, synthetic construct
  REGION 1..690: note = Synthetic
MEKRQYRFAFDIGIGSCGWAVVSENETGNRRIEDAGSRIFDYGEMKEGKDRKSQKRRGFRGVRRVLRRRKHRKELLKNYIRNIQFMSDYEIRCACENPADKVLPVKVKGLDEKLTKAELLQVLIHACNHRGYKDFYDVVDTDEKASAEEEEEKKNQAAANRLDRLFAESHCRTISEYLCQHCTIPGTDRIDYRNRFYKNENRMIIRRKHVENEVRMILEKQKEWYPELTGEKIEEIMNKIFKQRDFEEGPGKSDDSYRRYTGFLESLGYCRFYPEERRGFRNTVLGDVYAAINALSQYRYVQTDTGEAKLTKEAACRMISYILKEGSITHKQAAKLLKPLGLVVYGNEEVDKTLKKSFRFLKEIKKIAENCHVEWDTLLMETDMTEYVEEKMSLLNQIGMECSKNQTPHRKEDALKILQKKWGKTNLPSIFWNALKQHKFSGTSSVSYHHMKDAIEAFLGGDVYGNFQWSRQKQLDEKQESQRERLLSAKVLMQDEDVKDNPVVLRSINETRKVLNCLIRLYGSPAEIHVEVADDMARSYLERKRIQKMQRENEKTKDAIKKKIAEILHCEESEVKGIQIERYKLYKEQEGKCLYSGRELNLEMVLDTKSHAYEVDHIIPYSLILDNTLANKALVCGNENQAKGQQTPLMYLTGEKKAAFIERVKAEKGRTSHPISNKKYDYLMLSTLYG

SEQ ID NO: 5182 - protein, 1069 aa, synthetic construct
  REGION 1..1069: note = Synthetic
VVEETPKPNLIEIKCRAVKEQISKGDLLRILIHTCNHRGYQDFYESNDEEINEERRSKEEKAAEEEERVIKGAALKFANNFENSKCQTVSEYILQNFTDKKDGRLYYRNRFYKGDDRIIILRKFVKKELKLILEKQKPFYPDLTDDRINHLMDIVFSQRDFEDGPGNPDDKYRRFTGFLDSIGYCRFYPDERRGFRNTLIGNMFSAINALSQYHYVNTETGEMGLTKDAANRMVNFILENGGIKQKELNTVLKRMNVKVVSSGNKKDIDNTLSKSFDFIRPLKKIIDDEGMDWNEIIQAGDVFDYQKLSFLNQIGHTLSSFKTPRRREKEIEVLKQAADKRNIHCTEGFWKRILGLKMNGTSSASYHHMADAIEAFRNGDIYGNFQWETESKKQVENNDKRSLTLPASLLTQDEDIKNNPVVYRSINETRKIVNALIRIYGAPECINVEVAKDLARSFIERREIQNQQKKNEKNNEDIRKKIKDILGYEEAKDVTWRQIEKYKLYMEQEGKCIYSGKELQLEEVLKDSSHKFEIDHIVPYSLILDNTLANKVLVYGSENQRKGQRTPKMYMDEEQWEHFRQRVIAFYQRKGKVKPISSKKYQYLMLESIYGEKTQELLSGWKSRNINDTRYITKYVVALLKNNLQFAGKPRVYGIRGSITSRFRKHWLNKGTWGSDIKCRENYLNHAADAAIIASLTPLDVEIAMDCEKLRQIYNHYEKRTDSKPYQNFLWMAVRRISGFYHKDKDEVVKLINDYINDLSRIPSVISDLRAEIDLRLGLPEGDLRTPEEFYKQVEEFYHGANDFLLKPYQPISSIKPERKFRGTVVDSNPIRVIKEAGKYYKISREAIQDVKRTNLKQLYTSDKYLLEKLEEVFQSDDEIDKVGDYLKKHSLQEFRTTSGQLVRKVSIKKKPISNYYVKRINDDNFSVLGLPKYYCIEIYEDKLGNLKMWGLRYVDLIKKGDKLYLKGTLPEDYGKHYLYLHKGDYVEIKAKKGKSVLGFYQNAYNVNQSMISVLPVNSSNEPIPKIISKNITIKKYDINILGVKGGLIREDREGFSCIVPLLSKMEKN

SEQ ID NO: 5183 - protein, 1140 aa, synthetic construct
  REGION 1..1140: note = Synthetic
MEKRQYRFAFDIGIGSCGWAVVSENETGNRRIEDAGSRIFDSGEMKEGKDRKSQERRGFRGVRRVLRRRSHRKYRLKNYLRYVHFMTDMEIRCASEASMNQILPVKVRGIDEKLTKAELLQVLIHACNHRGYKDFYEVTETESQEEEDEKINQAAADRLDRSFEESHCRTISEYICRYCTIPGTDRIDYRNRFYKNENRMIIRRKHVENEVCTILKKQREWYPELTDQKIEKIMEVIFSQRDFEDGPGYASDKAEYRRYTGFLESIGYCRFYPEERRGFRNTALGDVYAAINALSQYRYVHTDTGEAKLTQEAAAKMVSYIMKQGSLTRTQAAKLLKPLGIAIYGSKDVDKTLAKSFRFLKEMKKIAEKCQVSWESLLSETDLTEYEEGKTSLLNQLGTVCSMYQTPHKKEEELKKLHAKWEHVHLPPAFWNALKRHRFSGTSSVSYHHMADAIEAFLKGDIYGNFQWNKQKQLDEKQESQRERLLSAKVLMQDEDVKDNPVVLRSINETRKVLNCLIRLYGSPAEIHVEVADDVARSYLERKRIQKMQRDHEKTRDAIKKKIAEILHCEESEVKGSQIERYKLYMEQEGKCLYSGRELDLEMVLDTQSHAYEVDHIIPYSLILDNTLANKALVCGNENQAKGQQTPLMYLKGEKKEAFIERVKAEKKRTSHPISNKKYDYLMLATLYGKEAKEILTGWKSRNINDTRYITKYVVGLIKNHLQFAEEKARVFGIRGHITSRFRKEWLGKNTWGSDEKCRANYLNHAADAIVLANLSKMDVEIAMDYKKLRQIRRHYGEMSIQYDHFLNHAAQRIAAFYPITEEAIRKQLVESQRTPSYVPNLGREVDLRLGNPEGETRSKEEYRAKTEMYYEGAAFVVTPHLPYVSMKVEKKFRGEIADSNPIRLVEENGIQYKVSRSKVEELKREQLSKLYTSDGYLIEALEKAFENKDVKTVKDYMEKEHLDVFRTTNGQPVRKVSIKGMPVSNYYKKSINETNYSILGVPKYYCVEVYTTSKGQTKIWGLRFVDMISYEGKLYLKDGVRPADYARHVMYLFPGEYIEVEKKGKIVYEGTYQNVYNINQGVLRIKVKNTNALKPISIGDKAGVFKYAISLNGCKSGVVKEGEAGYPCFAHCLLKKEND

SEQ ID NO: 5184 - protein, 1103 aa, synthetic construct
  REGION 1..1103: note = Synthetic
MGKTLGLDLGTNSIGWALVDNEHKQIIKTGVRIFPEGINRDTKGSEVSKNESRRLARQARRNNFRTKMRKSILKKALIANELCPNGDTLTDWHALNPYELRSRALKEKLSLHEIGRILYHLSQRRGFKSSRKTANDKNEGSIFDGDEKIGKTGINETSDFIAKHGTLGNYLASLVPDKKPYNQLKRIRNRYTTRDMYIHEFQIVWEAQSKYYPTALNNELRDTIGHPEKGILFFQRPLRSQKFLIGKCTLEKKKPRCPSSALPFEEFRAWQFINSIQRWNSNGEIINFSTEERLAILDVINTSEKAFEFKKILNKIDKKRLYRYNYVPDHTVPANPTHAGLIKVFGNKLWNAMTEDDKETIWHNLFIAKENEWLKGETNSNSHRWSDRAKVLGLSDEQLEKLSKIHLKDDYANLSRKALNNILPFLRIGFIYSTAVLFGGIKNALGLLWDELSEESKNKVIEEINNLKESNTDERLNELIITYLIKRFSLSPTQLKKLYHHSDDEVLRKPELEELPQPKNLRNPLVQQALYELRNLVNHIIKQYGRPSEIRIELARDLKNPKKKRDEMRFENKQRERENTRIKLELEKLGELPSRDNIQKYALWEECKKQCPYTGKEISVTDLFGNKFQIEHIIPWSVSLDDSMANKTLCEANENRNKGDLTPYQYYGKNLEKWDEVKRRAYDLLPMYKYKRFIREEMAAPDDFIARQLNDTRYISREAKQYLSHVCKNILVTKGPLTAELRHYWGMNSILNPSENKKSRDDHRHHAVDAIVIACSKNSHFQELRSWNKYRKSHENHNFPEPWKGFLDEAKQSVESILVSHKNRHRLLSTTKKKIVKDGKKFTGQGVSARGTLHEETVYGKRKSPFGDEHFYTVRKPIGSLTPAMIRDKIVDPEIRKLIWERLMKYDINPNDKKFEIPKDAFAKPIYLRNKNGDPVPVFKVRIRVESSNILQMREGVNQWVDPKTNLMVILYRDQQGTLYEEVLNFFEATKRKINKQSLISIHENKQYFESIQKNDLFVLGLAKSQFRTYFSRPDILSKHLYKVEAISSKYYEFRLHCESTQKNNDFPEYLIISSLGAGKKGWLTFNPIKVKIDPLGNIVEDA

SEQ ID NO: 5185 - protein, 1197 aa, synthetic construct
  REGION 1..1197: note = Synthetic
MKDFTIPPASANDFLKGLVFGFDLGTGSIGYAVRRGAEFLDVGVLICDSDIGALDGRNGMRRMRRTLRSRTYRRKWSAQQLERIGLSKPQAAFFQKQEGETHVVFQQRTNPVILRCRALAGEKLNPEQLHVAVAHLWKRRGYEPVVPWSKDGKPLEGEDEWKGTVSPGQNNKTFQESECAHPAQFLKNQMERRDAAEAWPKGVYDQRRRVWQRDLLEQEFRAMIKAQPGALDKNITVTNLDGETASVSFEHWFLYGDGKLRTRHGKEYRWYDKPTEGRNPGVLGLKWPRFSNRSPGLDVLRPYDEKGRPQHVVSKDAPIARKAMWELATANFRVTDLQTGKRVRPSQESLDKLKELWKATLTKKQRSALDGGTADFDVEVSAEDKKNKKGEVSKESLLTKWGTLYQGQYALLTHQHDLVSAAGEGRTRYSSPTIQAMFDHDLEALQKTPQPLLVRPGQSREDAMNAFLADVRSPVVRHRLTLLLRLMERLVKEHGTPKLIIVEAARSFGLGRKAKEKHMKEVAQNQKEREQARKTVKKEGFSSGRNGLTRYRLWREAGGRCPFCGDAITIEQFKTGGADIAHIVPQSIHECHDFYNLTVAHADCNRREMENKIPRDAFGHRWHELETFARTHFKDRKLELFLAPTLAEAQDILEGKDQLCMTAHLSKLVRRLCIIRFGWEGKDGRDPTTEEGNLPSQQFLVTNGSLTSALRGAWGINTLLHRAPCPTEDEWHKLSEDQRKDIKQKRWEAKQKNRGDHRHHGLDAMVITCTLPWLARRVIDRGENAQGELIWWKLDEQTRERRAINPAFPGENAFRHAAAQWRDKMEVRHHVANATHKQPAKTTFYSRRSLDKFISREDVTSLTPKDLHTEGNRKCRVHPEELGRYLHLLWTSYSEDLLGYLAAARDVWIKEHPISKDNQEDVLKEFKKRLCFAAFETWRVRGMKSEPELPVEPAQHLRFDGILKTVIQENIGAIELPLRQKLFKRLTPDFARRLCFTDFQKWRAKKQADAPTFPMQVRIPILKLRYIAKLNLDNAVPGPKTMPGYGGHPVYVQRTDFREVRIVPATSGDGYVPVFVPLGAKYSLFSPFGDYVKEGEAMLTIRKRQRIKLVQDYNDSIKAGEYVIEVLGADQVTINLAHVARPNEARAAFGLPATGYKPYWKLLLPAMGIKFSATALGVEVNGTDEGSEDTDEDDKEK

SEQ ID NO: 5186 - protein, 1080 aa, synthetic construct
  REGION 1..1080: note = Synthetic
MNENTTSYRVGIDVGTHSIGFSAIQTDPTGTPTNILTSTSFIHDGGVDPDHHKAGDTRRAVSGTARRVRRLMRRTRTRLDKLDTFLSDNGFPIITDATENDPHEPWLIRATLATTPITSATQLDHHLSIAVRHMARHRGWRNPYQKVDTLLGDLQPSPKLIELKNRVEEHLGARVGEQYTPATLICAILDAAPTTPIRGADGILAGTLHQCDYALELRRIQNVQHLNPTLVDQLIRLIFSMNSPIGSARHLVGKDTLPGMENEPRCEKAQPVFQRFRIIQTVANLRVLDGGHERHLTRREMNQAVTFLSTATRPTWGDVADTLTIDRRNLTGTARQTSDGEFLGTHPPIDQTRAVIRALNIRPLTEWWDKATDSEKAAFIDATSNVGTDAINEDALESVNTLFASLDASQRAKIDAARFPLGRAAYSAASLERLCERMMHDNVDLHEARAREFNVPDGWQPPADPIGTPTGNPKVDRVLKQVARWLAAVTQRYGTPISITIETARGGLNSEKVARQISRDNQKAADRNRQLADRVLQLTGQDGTISHADITRMRIWDRQGGACLYCGTPIAFTAFELDHIVPRSGPASTNRLVNLAAVCRTCNHEKGATPFAAWADGSSRTSLGETVSRVKAWKNTDRMPVKAFATVKRDVIARLKRRRPDEPLDDRSLESVAWMAVELRHRIDSHYGGTVDVRVYAGHVTASARRASGLERDIRMIGGGGKTRLDRRHHAVDAAVLAMMRPSIAHTLTIRDNMRRAHQLTGVDNQWWEFDGVTTGDRLVWHEWRDHMRVLTGLLNEKLDNMTIPVTMNVRLSVPNAAAHDATIRPLDRHRVGAAWTVDEVDRASTPALWCALTRQDDFTPGVGLPANQNRRIMVNGTPFEAGDEVGVFPALASAVAVRGGWASIGGTVHHSRIYRVGKRFYQLRVFAVDVARSGGRDVFSIELPPKSISVRTANEKLREALARGDAEYVGWVVRGDTLRLESTDFKAARIRTFFDTYPVREWTVTGFESAGMMNLRPTLLSSEGLPDDAPDDVRVVLKRCWRVSVNDLMTVGHPSVVRRNTLGEVRMKDTKLPATVRLA

SEQ ID NO: 5187 - protein, 1032 aa, synthetic construct
  REGION 1..1032: note = Synthetic
MEKKRYRLGIDLGTASIGTALVELDGPANRPYPTNILHMGVRIFDDGRDPKTKVPLGVARRMAKQNRKMLDRYLRRRKRLIDALIEFKIWPTDEAQRKALCLLNPYDIRTRALDEKVSLHELGRAIFHLNQRRGFKSNRKTDGGEDGKIRQAVAKLEETFQKEGCRTLGEFYQKCIERGLSVRARLEGAGAKAEYPFYPSRQMIECEFDKIWNKQAEFYPDILTKQAKKKIKETLLYQRPLKPVKPGKCFLEPNEDRAPIASPYFQRFRILQTINELRIISRYGDQRSLTLEERNILLDDLSQKKELKFSAAKKLLSLSVYDRFSIQDERRDKFQGDQIAVLLGNKKYFGKNWKSLPLENQNAIVAELINQDDTENLIKTLCAFGLSKEAAAQLSEETLPTGYGRLSLVALKKIIPFLEEAVITYSEAAAKAGYNHSDNYTGEIFHYLPYYGKVLENRVMRGSGNEADNDEDRYGKVGNPTVHIALNQLRRVVNCVIKHFGAPEQIVIEVARDLKMTQDELKDYKKKQADNEKRNERIDEELRKLGQSVNRENRERFKLWEELADDPKERCCPYTGECISMTRLFSDEVEIEHILPFAQTYEDSLANKTLSMRYANRLKQNRSPYEAFAEHSYKGILPYQKMLDNLQKKGKAWENKRWRFEKGAMDRYNANGDFQARQLTDTAYASRLALEYLKFVCPKDSIWAIPGKMTSILRRQWGLNSILGREMPDGSFKKSRDHHGHHAIDGLVIAMTDRALLKKVSKITQLNWERQERILSHIEPPIIDIFDQAKERLSHLVVSHRKDHGLGGALHNDTAYGIVGEFKEGEVSTVRHKVPITSITGSNFNQIQDESIRYGIQNLIAESSSDAALKDAINEYASRTGIRRVSLIEKLSVVPIKDKSGHIYKAFKPDGNYCYDIWANGDKWEGKIVSRFEANTQGANKSKNVLMRLIVGDTVCREINGKKDYLRLVKMSLGRITFAPIFEAGALKTRDSDPKDPFKYITISPNLLKQNKTRLIHVDECGFVYDPGFKEK

SEQ ID NO: 5188 - protein, 1031 aa, synthetic construct
  REGION 1..1031: note = Synthetic
MEKKRYRLGIDLGTASIGTALVELDGPVDHPYPKSILHMGVRIFDDGRDPKTKVPLGVARRMAKQNRKMLDRYLRRRKRLIDALIKFKIWPADETQRKSLCLLNPYDIRTRALDEKISLAELGRAIFHLNQRRGFKSNRKTDGGEDGKIRQAVAKLEEVFQKEGCRTLGEFYQKRLEKGQSVRARLEGAGAKASYPFYPSRQMIECEFDKIWDKQVEFYPDVLTDAAKKEIRSTLLYQRPLKPAKPGKCFLEPSEDRAPIASPYFQRFRILQTVNELRIINRYGDQRPLSLDERNILLEVLSQKKELKFSAAKKLLSLSNYDRFSIQDERRDKFQGDQIAVLLGNKKYFGKNWKLLPLENQNAVVAELISQDDSEELIKTLCAFGLSKEAAAQLSEETLPTGYGRLSVAALKKIVPYLEESVITYSEAATKAGYNHSDNYTGEIFHYLPYYGKVLENRVMRGSGNEADNDEDRYGKVGNPTVHIALNQLRRVVNCVIKHFGAPEQIVIEVARDLKMTQDEIKDYKKHLAENEERNARIDKELEKLGQATNRENRERYKLWEELADNPMDRCCPYTGERIGIERLFTEEVEIEHILPFAQTYDNSLANKTLSMRFANRLKQNRSPYEAFAEHSYNGVLPYQEMLDRLPQDKAWMNKRWRFEKGALDRYNEDGDFQARQLTDTAYASRLALEYLKFVCPKDSVWAIPGRLTSMLRRQWGLNDIIGRELPDGTFEKSRDHHGHHAIDALVVATTDRSLLQKMSKATQVNWEHQERVLSHIEPPFFDIFDQASERLSRLVVSHRKDHGLGGALHNDTAYGIIGEYKDGVVSTVKHKVPITAITGSNINQIQNDFIRNSIQNLIAESSSKSSLENAINEYSNKTGIRRVTLVEKLSVVPIKNKKGQIYKAFKPDGNYCYDIWANGDKWDGKIVSRFEANNNGAKKHDNLLMRIFVGDTLCCEIENKKKLYHILGITDGKITMVEHFEAGNLRERDRDKKDYLKYVFKTPNTLKPLKARIVHVDECGFVYDPGFKEK

SEQ ID NO: 5189 - protein, 1111 aa, synthetic construct
  REGION 1..1111: note = Synthetic
MPEQPPQDFILGIDLGSNSLGWALIERANGGPAGLLRAGVRIFEAATEGDRESGQEESRNRARREARSHRRQLWRRARRLRKLFHLLQSYGLLPAGVATERERQDLLNELDRSILASSWFRAKADSGLFPEPSQALPYILRAAALDEPLEPHFLGRALYHLAQRRGFLSNRLKPAKKDDDEGVVKQGISELRQKMADANAHTLGEYLAHLSPSEQRLRGRWTHRDMYQHEFEKIWDAQAKHHPALLTDERKKPLFQAIFFQRPLKFDPAVIGKCELEPDCQRAPAYLLVSQRFRLLQTVNNLKVLPPGEAERDLAPEEHAKLIEALELQGDLHFQKDRKSNGKTLPSVRKLLDLRKGCAFNLERGGEKSLKGNRTFADFYAVFGQRWLDMPPQERDAAVEYVYAFEKLDKLKEAAKKRWSLDQAAAEKLAETSLEPDYMNLSRRAMEKLLPLLEQGVTYAKARQQLYPEKFQARGELPSLPPVEAASDPAKLQEWVKRAKALPPGAQFPDPISGIRNPAVMRSLTELRKVVNAIVRQHGKPSEIHIELARDLRKPKWQRQEASDRMRANEKGRKAAAKRIPDETEIKDPKPDDIRKVLLAEECGWQCPYTGRTISMRKLVGPESEFQIEHIIPFSRSLDNTFVNLTLCYVEENKTKSNRTPYEAYSGDSDRYAAILGRVKKFIASRGMVAEKLKRFQMTPEQVEGMLGDFSERQLRDTAYASKLASRYLGLLYGGLSDAEHQRRIQATPGRVTAFLRNEWGLNAILRDGSTDKGGAVPKERTDHRHHAVDAVAIALTSPGTVKQLSDAAQRAPIEHRRRFASLQAPWPDFVDSVRDVINSIIVSHRVSKKVSGALHEETIYSQPTAVAPVSSPAKKTRRSETATIEGTEVRVRRPLEKLTKSEVQDIADDRVKQMVTEKLGDGDPKKVFSNKDNLPFFETTDGRRIPIKRVRLNKAVPTFALGEGRTERHVTSESNHHLEIFAELDENGNELEWDGVVVSMAEAYLRLRLHQPVVQRDFGPHRQFKFSIGQGEVLECDDPGGNRRVLVVRGVWPQVKGSPRLAAVAINEARKKQDIISSKQFLSPVVNTLMKWHARKMVVSPLGEVSEAHD

SEQ ID NO: 5190 - protein, 1109 aa, synthetic construct
  REGION 1..1109: note = Synthetic
MAEQPAGNYILGIDLGSNSLGWALIARENGEPKGLIRAGVRVFEAATEGDRESGQEESRNKARREARLHRRQLWRRARRLKKVFDLLQQYALLPRAKGSTPEQRQDFLNDLDKQILTSPWFATKKTSGLYPEPEQVMPYILRAGSLDERFEPYFLGRALYHLAQRRGFLSNRKAAPKKDEKPGEVDKGINELRDGMAQTGARTLGEYFARLDPFDRRIRQRWTHRGMYKDEFDRIWKAQEAYHAEILTTDRRQELSRAIFFQRPLKFPRSLVGHCELDPEEPRAPRYLFIAQRFRLLQVVNNLKVEFDGAERLLTPEEREKLVETLELEGDRTFAQARKLLKLSKASRFNLERGGEKNLRGNRTTSALYKVFGARWLEMTAAEHDAALHDVQSIQNEEVLKRRAVGHWNLDEAAASAFAKISPEPGYFNLSRKAMERLLPLLETGVEYAKARHQLYPEKFQARGELASLPPVEVAADPAKLQEWIKRRKALRPGAQSPDPITAIRNPAVMRSLSELRKVVNAIVRQYGKPAEIHVELARDLRKPKWQRQETSGRMRENERARKAAAQRILAETGIKEPSPEDIRKVLLAEECRWECPYTYTGKTISMRKLVGHDSEFQIEHILPFSRSLDNSFVNLTLCHVAENAVKGNRTPHEAYSGDPDRYDRILTRVRAFSGNRGIVAEKLRRFQMTPEQLQEFLSDFSARQLTDTAYASKLAARYLGLLYGGEIDDAHQRRVQATSGQVTAYLRNLWLLNRILNDGPTTHGGAVPKLREDHRHHAVDAVTIALTSPATIKTLSDAAQRAPLEHRRRFASIQSPWPDFVDTVRDAVNHIVVSHRVSKKVSGALHEETIYSPPMVAAVSAPRSAGSLPARLRATGDGGATRETVRHVRKPVKSLTKPELAEIVDPVVRQRVQAKLEELGGDLKKFAKEENLPYLETKDGRHIPIKRVRIKKKLSTFALGSGRTAREVTHESNHHLEVFAELDEDGREIEWDGVVVPMLEAYRRNRQGQAIVQREHGPQRRFKFSLAPGEVVECDDGPEKRRQLVVRAVSQYSAGAIVISLVRLNDARKKKDIQESKAWLSIVPNKLRQLHPRKLVVSPLGEVGEAGD

SEQ ID NO: 5191 - protein, 1055 aa, synthetic construct
  REGION 1..1055: note = Synthetic
MPEQPAADHILGIDLGSNSLGWAMIGLEEAKPAKVLRAGVRVFEAATEGDRESGQEESRNKARREARLHRRQLWRRGRRLRKIFKLLQTYGLLPPGNGADPEERQKLLNELDKQIVASPWFAAKKASGLYPESEQTMPYILRAAALDERLEPHFLGRPLYHLAQRRGFLSNRLRPAKKGDDVGEVKKGISELRKAMEEAKARSLGEYFSRLAPSETRIRGRWTHRDMYRAEFNQVWEAQAKHHPGLLTDERRKELSSAIFYQRPLRFDPDVIGMCQLEPGERRAPAHLLISQRFRLLQTVNNLHILPPGGTEMELNPEGRQKLIDRLEQEGDLTFAKARKLFGWSKAYAFNLESGGEKSIKGNRTFADFYAVFGPRWLGMSAQERDQVVEYVHAFEKPDKLKGAARKRWALDDTAAENLADISLEPDHMNLSRRAMEKVLPLLEQGLTYAKARQELYPEKSEAKEPEPYLPPAEKALLEIRNPAVLRSLTELRKVVNAIVRQYGKPVEVHIELARDLKKPKKARKNISDDIAENRKARVQAAKKIIAEVDISEPSGRDILKAQLWQECGGHCPYTGKPIAFRDLFSGEPQFDIEHIIPRHLSFDNTFRNVTLCEVHENREKKAGRTPFQAYSGNPGEYRDVLDRVRKFQGKGARGKLRRFLMNDEELEEFLNKFTERQLRDTAYASRTAANYLGVLYGGVNDQAGNQRIVSTSGEATFELRKAWQLNSVLGDGPTSKGGTVEKKRTDHRHHAVDAVAIALTSQSAMKQLSDAARRGRERGSRALSMEGPWPDFVDTVREAIDRIVVSHRVSKKVSGALHEETLYSAKGDAEGERRVRKLLSQLTKSEAGDIADEEVKRRVLEKLADGDPKRVFSNPENTPFFETEEGRRIPIKRVRIKKAVPTFALGDGKTARHVTSESNHHLEVFAELDENGNEVEWDGVVVPMAEAYRRKKLRLAVVQRDHGPQRRFRFSLGQGEVVECDDKQGDRSLFVFRKVTQFSVGGIQIGFAPLNDARKAREMQVSRAWLWTTPNTLGERHARKVVVSPLGEVSEAHD

SEQ ID NO: 5192 - protein, 998 aa, synthetic construct
  REGION 1..998: note = Synthetic
VAPPTQADKALQSAPALDLLPPAPSISEHLPNGHRRPITPEQRQDLLNQLDRRILSSAWFQTKVNSGAFPEPEHTMPYILRAAALDEPLEPHMFGRALYHLGQRRGFLSNRKQAPKKNDDEGAVKEGIAELRKAMQTSGARTLGEYFSRLNPSTERIRCRWTARDMYEKEFNAIWDAQAPHHADLLTPERKKQIYDAIFFQRPLWLDPGTVGNCELEPGEKRAPAYLLVSQRFRLLQTVNNLRVLPPDDVDMPLTPTDRKKLVDALEMKGDLTFKEISKLLKLEKGYKFNLESGGEKRIKGNRTNADFYAVFGERWLAMSPEERDRAVEYVHSFQKAEKLKDAARKKYDLTEEQAEQLAGISLEADYINLSRKAIEKFLPLLEEGVTYGEARKKLYPESFEAREAMPLLPPVETALAQIRNPAVMRSLTELRKVVNALVRRYGKPSCVHLELARDLKKSKKQRQAISENNRRNESARAKAAEAIIKADVGISAPSPDDIRKVLLAEECHWTCPYTGRSISMRSLLGPEPQFDIEHIVPFSRSMDNSFQNLTLCYVPENRSVKGNRTPWQAYHGDPERYQAILDRVRKFAGDRQTVAAKLRRFTMTDDELEGFLEDFRNRQLNDTAYATSLAAKYLGLLYGGVNDADGRKRVQATSGQATAYFRSLWKLNSILNDGPTSDGGAVPKSRDDHRHHAVDAVVIGLTDAAMIKRLSDAAQRAQLEHRRRFASLEAPWPNFVDSVRTEIDRIIVSHRVSKKVSGALHEETIYSRPMGKDGEVRVRKPLDSLSRPEVEKIADEGVRKLVQQKLEQLGGIEPKKAFPNPENLPRFPSSGVVIKNVRITKPLPIFTLSEGRRARHVTSESNHHVEIYAELDEHGNEKKWGGEVVSMAEAYQRLKTGKPIVQRDHGPLVKFKFSLAPGEVVECEGKDGMRGLFVMRKASQLTSGQLQIGFAPLADARKAREIQTSRAWLWASPNTLGERNPRKVVVSPIGEVTETHD

SEQ ID NO: 5193 - protein, 1103 aa, synthetic construct
  REGION 1..1103: note = Synthetic
MDTQPSRDYVLGIDLGSNSLGWAMIGLEDGQPAKLLRAGVRVFEAGMEGNIESGQEESRNLKRREARLHRRQLWRRARRLKKVFRLLQTYGLLPAVPPPFRAAPAFVALAFRPADGGLKPTATPDQRQDFLNELDRQILTSAWFAAKKASGVYPEPEQTLPYILRSAALDERLEPHLLGRALYHLAQRRGFLSTRKQARAAKKKEEEGVVKQGISDLRRKMEEAKARTLGDYFSRIPPSEERIRGRWTARAMYEEEFQQIWNAQAKFHGELPTDERKKLLFQAIFYQRPLKDQPELIGHCELEPEERRAAAYLVTSQRFRLLQTVNNLTILPPGEPEKKLTPADRAKLIEALELHGEQTFPHIRKLLGLTRNYGFNLERGGEKSIKGNRTNADFYAVFGDRWSRMSPEERQRAILDVHSIQKPETLVRRAREYWKLDEEAAQRFCDISLEPDYLNLSRRAMEKLLPLLEDGITYGEARRLLYPGRFQAVEPLPLLPPVQDALTEIRNPAVTRCLTELRKVTNAIVRQYGKPAEIHIELTRDLKQPKKRRQDRADRMRANEKARKAAAKRIVEEAGISDPSPDDIRKVLLADECRWECPYTGKSISMRALVGHESQFQIEHTIPFTRSLDNSFLNLTLCHVEENKVKANKTPYEAYSGDPERYERILERVKRFQGDKGIVAQKLQRFLMTPEQVEEFLAGFTARQLTDTAYASRLAADYLGLLYGGVVDQAHARRVQATSGQVTAYLRNLWLLNTILRDGETTHGGYATKPRDDHRHHAVDAVAIALTSPATVKQLSDAAQRAPLEHRRRFAALQAPWPDFVDSVRQEINRLIVSHRVSKKVSGALHEETIYSAPVAAGGTCPDLIGSPPGAALKGGATDVRHVRKPLASLTKTEVEDIVDPGVRRRVLEKLEEVGGDIKKFTKEENLPFLLAKDGRRIPIKRVRIKKRLPTFELGSGRTLRHVTPESNHHLEVFAELDEQGNEAEWDGVVVSMAEAYHHKKLGLPVVQRDHGPARQFKFSLAQGEVVECDLAPGERRLFIFRKVSQLSSGSITIGFAPITDARQAKEMQTSRAWLWSTPGKLRERHARKVVVSPLGEVSEAHD

SEQ ID NO: 5194 - protein, 1100 aa, synthetic construct
  REGION 1..1100: note = Synthetic
MLPKQLSRGKCMDTQPSQDFVLGIDLGSNSLGWAMIGLQDGQPAKLLRAGVRVFEAGMDGDIESGQEESRNLKRREARLHRRQLWRRARRLTKVFKLLQSYGLLPPVAPPFRAAPADSADGGLKPTATPEQRQDSLNELDRQILASVWFAAKKASGGYPEPEQTLPYILRAAALDEHLEPHCLGRALYHLAQRRGFLSTRKKAKAAKEEEESVVKQGISELRQKMAEAGARTLGEFFARIPPSEERIRDRWTARAMYEEEFQQIWNAQAKFHPELLTDERKKLLFQAIFYQRPLKDQPELIGHCELEPEERRTPAYLLVSQHFRLLQTVNNLTILPPGEPEKELTPADRAKLIEALELHGDQTFAQIRKLLGRLPRAYTFNLERGGEKSIRGNRTNSDFYAVFGERWHEMSPEERQRAILDVRSIQKPETLLRRAREYWKLDEEAAQGFCDISLEPDYLNLSRRAIEKLLPLLEDGATYGEARRLLYPERFQAVEPLPLVPPVQDALTEIRNPAVTRCLTELRKVTNAIVRQYGKPAEIHIELTRDLKQPKKRRQDRADRMRANEKARKAAAKRIVEEAGISDPSPDDIRKVLLADECRWECPYTGKSISMRGLVGRDSQFQIEHIIPFTRSLDNSFLNLTLCYVEENKVKANKTPYEAYSGDPEGYERIRERVKRFQGDKGIVAQKLRRFLMTPEQVEEFLAGFTARQLTDTAYASRLAADYLGLLYGGVVDQAHTRRVQATSGQVTAYLRNLWLLNTILKDGETTHGGYATKPREDHRHHAVDAVAIALTSPATVKQLSDAAQRAPFERRRFASLQAPWPNFVDSVRQEINRIVVSHRVSKKISGALHEETIYSAPVAAGFSPPGAALKGGATDVRHVRKPLASLTKTEIEDIVDPGVRQRVLEKLEEVGGDIKKFTKEENLPFLLAKDGRRIPIKRVRLRKKTPTVTLGEGRRAREVTPGSNHHIEIFAEFDEHGEEVEWDGQVVSMFEAHQRMKAGQPIVQKNHGPDHVFKFSLAQGEVVECDDKQQGRSLFVFRKVTQLTAGGIQIGFAPLNDARKAREMQVSRAWLWTTPNTLGERHARKVLVSPLGEVSEAHD

SEQ ID NO: 5195 - protein, 1073 aa, synthetic construct
  REGION 1..1073: note = Synthetic
MDTQPSPDYVLGIDLGSNSLGWAMIGLEDGQPAKLLRAGVRVFEAGMEGNIESGQEESRNLKRREARLHRRQLWRRARRLRRVFNLLQRFGLLPPGEGSLPEKRQDFLNELDKTILSSPWFAAKKISGVYPEPEQTLPYILRSAALDERLEPHFLGRAVYHLAQRRGFLSTRKKAKGAKKEDEEGVVKQGISDLRRKMEEAKARTLGEFFARIPPSEERIRGRWTARAMYEEEFQQIWNAQAKFHGELPTDERKKLLFQAIFYQRPLKDQPELIGHCELEPQERRAAAYLVTSQRFRLLQTVNNLTILPPGEPEKKLTPADRAKLIEALELHGDQTFPHIRKLLGLTRNYGFNLERGGEKSIKGNRTNADFYAVFGERWSRMSPEERQRAILDVRSIQKPETLLRRAREYWKLDEEAAQRFCDISLESDYLNLSRRAMEKLLPLLEDGITYGEARRQLYPERFQAVEPLPLLPPVQDALTEIRNPAVTRCLTELRKVTNAIVRQYGKPAEIHIELTRDLKQPKKRRQDRADRMRANEKARKAAAKRIVEEAGISDPSPDDIRKVLLAEECRWECPYTGKSISMRAVVGHESQFQIEHIIPFTRSLDNSFLNLTLCHVEENKVKANKTPYEAYSGDPERYERILERVKRFQGDKGAIAQKLRRFTMTPEQVEEFLAGFTARQLTDTAYASRLAADYLGLLYGGVVDQAHARRVQATSGQVTAYLRNLWLLNTILRDGETTHGGYATKPRDDHRHHAVDAVAIALTDAGTVKQLSDAAQRAPLEHRRRFAALQAPWPDFVDSVRQEINRIIVSHRVSKKVSGALHEETIYSAPVAAGFSPPGAALKGGATDVRHVRKPLASLTKTEVEDIVDPGVRQRVQDKLEELGGDIKKFAKSENLPFLLAKDGRRIPIKRVRIKKKLPTFELGSGRTLRHVTPESNHHLEVFAELDEQGNEVEWDGAVVSMAEAYHRQKLGLPVVQRDHGPKRAFKFSITPGEMLQCDGPHGGRRLLVVRSTTQLSAGGIIIGLAPVNDARPKKEMQADKSWVWKGPDTLRKLNARKVAVGPLGEVSEAHD

SEQ ID NO: 5196 - protein, 1077 aa, synthetic construct
  REGION 1..1077: note = Synthetic
MEKNYDLSFGIDLGIASVGWSVFNLKENRILDKGVYLFSEAEKAEDRRGYRSVRRRKKRKLHRIERINILFNSKGISENNTYDSQLLEKRLLGVKEKITMQDIVNIIMYFARHRGYIPFKDEDERKSEIVDELRKQGLLACQIQEKIFEDNTKYRGDEYLIQHSDYVKELKTMLYEQKKYYKEIDEEFINGIIEIINSKRKFWEGPGGPRENQLNKYGRYRNLEDIERYNKDKNYNKYLFENLIGNCNIYANEKKASAWNFYAESFNFFNDMTNLKINIQDLDETNRMYFEKVDKETYKLKNTAITTLKDNVLNSSSVSYPKLFKKLFLVDFSQIYGYKKDKNGNPELAKFEQIRRLKNRLEDTKLIEELLCNMDAYNKAIYLIQVSPDKQTRYEILKDNLEEFYSDRLIELLSSCSLENRYHSFSEKALRKYLELMEEHNQNSSYIERNFSDEINPTREEKLINSYIGENIEKGNLKYINSKGIEDIIASPATKKSLRKAISIINKLFSKYGYPGYICIENTRELLSIDKQKEYENKTLDNNRKRETAKKKLEEAGYEASDINIDKYLLLNETNHKCAYCNKDITVSNCEIEHILPRSKTANDTFLNKTVSCTQCNSLKNNRTPYEFLTSQNMYEDFKNRVQKNSKFDDKKKDNLLFEGNIDKYEKSFKNRNLNDTAYATNELANQIELFKKAYIRHNYGEILDTKVLKIPGQFTGIIRRKAKLDKNRDLKYHHAVDASIIASMPYLRVSKLIDMVQNEPNKYWQINNLSEYRDNLYDELYLNKTLKEALQKADYSNTRFAQEIQKKKNGQLFDANISKVVMKNNEYYKVEQIDNIYDLDYKDIEKYFTNSKTKKYFLCQDNDSKLYKKIYDIIEMYQGQKVNPFVEYCKENNMCENEKFDYRKYGIRKNDNSPVVAKLRFLTKVNTPYIMKNDKLIISQKQNKKAPMVMFDSLKQYCTRIYRDKESGKLLFMPILRIFVDNNSGEIRTDSDYYKVLFDTYVGKEEQDVEKYMDLFNNEYVRFYKNGEALGEGLVSCFHKTLNKIIIKNCNVSITPKIDIIEKIKSDILGLYNLNI

SEQ ID NO: 5197 - protein, 1015 aa, synthetic construct
  REGION 1..1015: note = Synthetic
MPKKSTVFAWDLGKASLGEAVRQGDHIVAVESFKIPEDHASLADERTRRRAYRTRKAHKAREDYLQQVFQEAGLETLTGRRGKELGDPRLEREFPAQGEDTCYTSSLLRIKLIEGEALAQWQVYKALHSAIQRRGYDSDVPWATNADRDPDKTGDDKDEAENAANAARFRASCLEMSDDADYHLPCFVDAWHMGLWTEQDGITSLRIDHHAQRARGYVATREAVETEVRLLFTAAQTQYPELGISVDAFLYGPTELAYASMNPDLCKKHGIREGAATDWRGVLSQKVPRFDNRMPNRCCCIPRYHVCRATDILHAQVHFLLGLINLRYMGGNETFSLTPAEVNECFQTARKNASKKDKDKKADQYKITKTAWNKWLAKNDRVAVVNNNEIPKPKTGGRSRYSRPALRIMRDLILSGDSPHAFRSALLAETDNQDPLKGLVPSDLDFLAKMPDDWERIHIPSATLPKSNEEQEAAIAKLIGSQGDPIVCHRLGVLHQRLKKLTATYGEPDLVALEFVREDFMGEKAKKRLMDFQKKRTKARIAAREEAKTISDRGSAPLKLQLLKEQGGRCIYTGDHLCLEQIDAYEIEHIVPRGSKYNGSDAMYNKVLTTHEANQAKAQQTPFEWLAGTPEWSAYLGRVDSMRARSSKKKINLLVSEDAPDMDRRYTGLAETAWIAKLSQQLVSLFYGWPTGEKGSERRVAIVSGGLVGKVRRQHGINKILYPEIEDLEKLDKKNREDDRHHGLDAMVISYIPTWARDPKKERYFSFPDGIDAPYFKAKIDTCIPTNLVYSKIGLEETVYAKRLLPAGESAVLRRDLATMGGDVKTWTVKKAKKTAATVVEPMIREAILTFLETSPSQAEWVAFASELRSNSHDHNGPLIKKVATRTGTLSEYADLSKDETGQYRRTDKNTGVVFYKDKEEEFQRHQILGHESLFEAQAEVALISSEIIGFFEAACLVELGSDISRKGSEDISAGRYRWKSYKHNRSVILERPGEKEISVSWKSVCEAGIKRLDA

SEQ ID NO: 5198 - protein, 1149 aa, synthetic construct
  REGION 1..1149: note = Synthetic
MGNYYLGLDVGIGSIGWSVINIEKKRIEDFGVRLFDSGEDVKNKNSFCQQRRSKRGIRRRYRRRSHRKLRLKNYLSVIGLTTSEKIDYYFETADNNVIQLRYRGLSEKLTPEEIVACLIHICNNRGYRDFYEVNIDDIEDPDERKEYGAIDDIKRLMDDGEYRTPAEMICKCSEFDEPNSVYRKYHNSAASEKHYLLTRHMLEKEVSLILEHQSKYYDILDNKVIASIKDIIFAQRDFETGPGNENDKYRKFTGYLDSLGKCQFFQDQDRGCRFTVIADIYAFVNVLSQYTYTNSSGENKFDATFANELINSALKKGSMDKRELKAIAKSYHIDINDKTGDTSLTKCFKYIKIVKPFFEKYGFDWDKIIENYTDTDNNILNRIGIVLSQAQTPRRRREKLKALNLGLDESLINDLTKLKLSGTANVSYKYMQGSIEAFCEGDLYGKFQAKFNQEIPDVDENAKPKKLPPFKNEDDCEFFKNPVVFRSINETRKLINAIIDKYGYPAAVNLETADELNKTFEDRAIDTKRKNDNEKENDRIVKEICECIKCDEAQARHLIEKYKLWEAQEGKCLYSGKTITKEDMLRDKDKLFEVDHIIPYSLILDNTISNKALVYAEENQRKGQRTPLMYMNNTQASDYRIRVNAMLKSKKCNKKKYQYLMLPNLNNQDLLSEWKSRNLNDTRYICKYLVNYLRNNLRFDRSYESKDEEDIKIRDHARVFAVKSRFTSTFRRWWLNEKTWGRYDKAELKKLTYLDHAADAIVIANCRPEYVILAGEKMKLNRMYHQAGKKITPEYEQSKNACIESLFKYYRMDRRTSERLLSGHGRLSPIIPNLSDEVDKRLWDKNIYEQFWKNDEDKKSCEELYRENVMSLYKDDPKFAASLRMPVISLKPDHKYRGSVTTDNAICVKEIDGKMIQLSRKSISSITEKDIDKIYTDDRILIDSLRSIFERGSYKDVGEYLKKTDQTFFTTSNGMRVNKVTVKSTAPGRWLRKDIDGSNFSMLDDRSYYCIELYKDGKGNNNLQGIAMSDIVHKNGKLWLKPDFKYPDDYSAHVMYFFPGDYIRIKTFSKKSGEKLKFEGYFKSIKSVNENSFRFISDNKPCAEDKRVAVAQKDIVIKLTVDLMGKIQGENDGRGISCGEPLSLLKEKS

SEQ ID NO: 5199 - protein, 1156 aa, synthetic construct
  REGION 1..1156: note = Synthetic
MGNYYLGLDVGIGSIGWAVINIEKKRIEDFNVRIFKSGEIQEKNRNSRASQQCRRSRGLRRLYRRKSHRKLRLKNYLSIIGLTTSEKIDYYYETADNNVIQLRNKGLSEKLTPEEIAACLIHICNNRGYKDFYEVNVEDIEDPDERNEYKEEHDSIVLISNLMNEGGYCTPAEMICNCREFDEPNSVYRKFHNSAASKNHYLITRHMLVKEVDLILENQSKYYGILDDKTIAKIKDIIFAQRDFEIGPGKNERFRRFTGYLDSIGKCQFFKDQERGSRFTVIADIYAFVNVLSQYTYTNNRGESVFDTSFANDLINSALKNGSMDKRELKAIAKSYHIDISDKNSDTSLTKCFKYIKVVKPLFEKYGYDWDKLIENYTDTDNNVLNRIGIVLSQAQTPKRRREKLKALNIGLDDGLINELTKLKLSGTANVSYKYMQGSIEAFCEGDLYGKYQAKFNKEIPDIDENAKPQKLPPFKNEDDCEFFKNPVVFRSINETRKLINAIIDKYGYPAAVNIETADELNKTFEDRAIDTKRNNDNQKENDRIVKEIIECIKCDEVHARHLIEKYKLWEAQEGKCLYSGETITKEDMLRDKDKLFEVDHIVPYSLILDNTINNKALVYAEENQKKGQRTPLMYMNEAQAADYRVRVNTMFKSKKCSKKKYQYLMLPDLNDQELLGGWRSRNLNDTRYICKYLVNYLRKNLRFDRSYESSDEDDLKIRDHYRVFPVKSRFTSMFRRWWLNEKTWGRYDKAELKKLTYLDHAADAIIIANCRPEYVVLAGEKLKLNKMYHQAGKRITPEYEQSKKACIDNLYKLFRMDRRTAEKLLSGHGRLTPIIPNLSEEVDKRLWDKNIYEQFWKDDKDKKSCEELYRENVASLYKGDPKFASSLSMPVISLKPDHKYRGTITGEEAIRVKEIDGKLIKLKRKSISEITAESINSIYTDDKILIDSLKTIFEQADYKDVGDYLKKTNQHFFTTSSGKRVNKVTVIEKVPSRWLRKEIDDNNFSLLNDSSYYCIELYKDSKGDNNLQGIAMSDIVHDRKTKKLYLKPDFNYPDDYYTHVMYIFPGDYLRIKSTSKKSGEQLKFEGYFISVKNVNENSFRFISDNKPCAKDKRVSITKKDIVIKLAVDLMGKVQGENNGKGISCGEPLSLLKEKN

SEQ ID NO: 5200 - protein, 991 aa, synthetic construct
  REGION 1..991: note = Synthetic
MSTILGLDVGPNSIGWAFIYPDNSEIVATGVRVFPEGVDNYGSLGQQESKNAKRRIARGMRRQNQRFKMRRDNLAWQLKQLNMYPEKKDELSAYFSLDPYSLRSKGLDKKLSLLEFGRVLYHLNERRGFKSNRKAGSSEDSKIFKSKNDLVGITDTEIAINTGGFRTLGEYLYSLDSHELRKRSRYTLRAMYEQEFEMLWGNQKTYYKDILTDEANEKLHHAIFFQRKLKSQKHTIAKCTFETQKRCAPISSPTFQYFRILEQLARLKVTDGDRKGDFLTQNERDILVNELNNKEKLPFKRVTKLLGLSSEAMYNLEHEKQLIGNRTNTKLARVFGKKEWDGKSPEEQYNIWNDFHFSDDLDWLKERGNIIWELNETQIEKIEKVSLEKGYGKLSQKALFKIIPYLEISETEDSDPMTFDKAAKAAGYHHSDVYEHSGKMGKLPIPDDIRNPIVQQALFEMRKLVNAIVDKYGNPETIKVELVRDLKLPRQRREQIFSENRKRREYHDEIRDILIDVGMNDPSMDDILKYKLWEECDKTCPYSGKKINSIAKLYSAEFEIEHILPYSRSLDNSYMNKTLCHRDFNNEKGNKTPYEAWGETTEYEKITERAKKLPYPKYRRFIQKELKEDEFINRQLTDTAYIAKEVRKYLSHICTDVRTVPGTATARLRNFWGLNGILSKDVDIKNREDHRHHAVDALVVANTERKYIKHLSTFHHYRRTPKGEHFPMPWESFWSDAENAVNSILVSHKVKNKLSGALHKESFYGLIMDDVGTPQKNDKGQFIYGKRKPVQNLNDSEVKKIADDDVKKSVKRWKSLPKDSRSEYPTLPSGQNIKRVRIHDVHTNVVELRPGVFVEPGSNHHIAIFENIETGKRKGKVVSLFEAVQRDKNGEPVIDKTAEEGWKFVMSLSINEMVLINNNLDEIDWGNKIQLSKDLYRVQIAPASLQISFRHHNVARLKTDDNRKPGLILKKPNTFKGIKVGIDYLGNIYKI

SEQ ID NO: 5201 - protein, 1328 aa, synthetic construct
  REGION 1..1328: note = Synthetic
MPKIVGIDLGTNSVGINIWDKYNNGLLKNQIESSVDIFRNGVSKGNSMTRESSLAAERTTKRSKRHLVRSARTRKQATLKHLIKYGYCPLTMEELNRWRFQNKEKGYDRTFPSSDKFMQWINMNFEGHENGKADYSSVYQLRNELMTRDFDFENSKIDRYKLGRALYNIAIHRGFKSNKGNKAGEEDKEDEMTEGNATSEIKKSAKLRQLMAEKNLQTIGQAFYYLEKNGAFAEGEKGFRVRNSEYTADRSLYYAEIKAIFQKQHFDLDSDFCKGILSKKKHEGTIFYKRPLSSQKGNIARCFLESDKPRCYISHPEFEEFRALQLINNIRVKLSENGEWIGLDDNQRQQLYKDKFLNSSKDYFKFSEIREYLEKMFSATFSKQSGTINYKDSTSVSRCPVTVRLNRLFEGKGFRETIAQDNNKRYTVEDIWHICNTCDDEDWLKEFAKDKLHFDSQKTKELTTLWNNIPEGYSNLSLKAIRRINRMLRKGMVYSDAVMFAKLPDILGEKTFSAIEDSIMDIADEFTRQYNEERDAIRAENAKIEAYIAEHPNEDFGHAIGKFRSMPNKMDCFKHFMHRSFPEVKSYTWDRLYHHSDVSLYPVPPRDEDGNLYLADPIKGRILPPAVKRTLCILRKRINSLIKRGEIDPDSTRIVIETARDMCDANMKWAIDTYNARREDENKKIEELIKEFCEGYADKSVTPDEITKARLLLEQGKQQNDCLEAEGRYYEMKVNAERYKLWKEQDYISIYTSKVIPLSKLFTDEYDIDHTLPISQSFDDSLENKTICEAHYNRNIKKNILPTALPDYEEHIRHSIVLDIWNQKVERLKRQVDVWDKKARRAADPESKNEYIRQKYTYRMELDYWEGKLSRFFVTDIDDKFRNNQLNDTRIITRYAMHYMKSVFQKVSVQRGETTARFREILGIEKKDRSLHYHHAIDALILSLIPHARLRDEILQTYYEIKEAKRYGTNKQCDELNRELRHKLMLAGISYSEVKDAVEKIKTELIVDHERKDVKMVRDSKNMRIRGKVVKGKLMRGDVVKGQLHLDTLYGAIKLPDHPIQYVSRKPLKSVKKLDEIVDPQVRWSIERQMQMYGIKSLASSDGKPMWMMRNVKNEDGTTTEIIIKEDKNGRPLLPIRHVRVFSSPQINAGNIPIKKTERKSKKALVRLSDREHKDFQYAVKGDFIACLVYSTINEKNKLQRGYRFLTDFDIAKAKRKNRDSASRCKSLKEFIMAIDDYVLADIPQYSNNTLTGYIKMKIERVILPGTVLIEKDENKSLSERTFIVRNCNYYRKSGVIWASNHLVADVTDTKNLIEIRPSKLSSFDIVE

SEQ ID NO: 5202 - protein, 1552 aa, synthetic construct
  REGION 1..1552: note = Synthetic
MSKVLGLDLGTNSIGWALLDLRDEENKLEGKGVLIFSEGVKKEKGQEKSKAAERTGFRSARRIKFRRKIRKYQTLLVLAKHDMCPLTIEEVKEWRKSNFKKYPAKPEFLEWLRTDEEQNINPYYYRDKASREKISKYNLGRALYHIAQRRGFLSNRLDQSDDNLIKSKKDEIQDIINNTSLNKVDLIDAIEAIFETYEFKEKKKKDCTNATEEKLWSIRKYILNVIENKIKGKDYSKNEDVRKEIDRYINKPENLGAVQGNISELNTAISEANCKTLGQYFWKLYQQDRNDAKNKIRNNYTSREDHYLHEFEVICKTQGLDSINEAKKDPSERYSGIVKELYKAIFYQRPLKSQKGLIGKCSLEPNRVRCTVSRPEYELFRMYSFINTIKLKEPTAEKFRFLNSEERESIKSKFFRKSKPTFTFIDIKKTLGEDNKYNYKDNSTVSGCPTVSALISVFGDDWENIIYENYTDKIIRNLKNDKSEEVKSKEDVTADVWHVLSTFTSDEKLVDFAKNKLQLSQKDAEKFSKIHLKKDYASLSLYAIKKILPYLEKGLLYSHAVFMANMDKIIKPERWENNEDRELIEKEVGEIINNHQEENKMLFAVNSALKICFDNHQTYSKEAETGYKDDVEKQLKKEFGEKTWDNKPNKEALFSEAFDIFIQHLKERKHPAIKRIDEKVMEFLSDNDLLIPNTFNKLYHPSDIEKFRSVKLKDKDGNVIKIDGKEAIGLGSPDVGSIKNPMAMKALHQLKKLINTLILEGQIDENTKVNIELSRQLNDANKRKAIEKWQNDRKELFQEYEKKIKELYKIETGNELKEVTNEDIEKFTYALEQRKDKKLVSKEDVMKYVLWEEQNHICIYTGKTISLSSFLGANPQFDIEHTLPRSRSWDNSQMNKTLCDKTYNQQTKKERMPIELSEKDYSEILPRIQHWKDKYEALANEIEKKKRSTRGATDKEQKDKLIQQRHYLQMEYNYWKGKYDRFVMKEIKEGFKNSQAVDIGIISKYATAYLKSVFKKVYSVKGEMVSEYRKAWGLHDTFKDKWGRTQYQPKDRSNHIHHCIDAVTIACMNKNKYDKLAHAWGLEDKGEFDKAKKELENEKPWDTFTQDVRNLENEVFIVHQNKDVLPIQTKKKFRKRGKAQPKVIYKKDENGKYVFDTNGKKIVEKYIYKKDDLGNLIPVKGKKLNTDLIKDKKEGEDYFKIESENGTKFYEYLKDKENKIVYQKDYMIEQGDGTRGSLHKLNYIGVIAKPELENGKPKTENGAFILQKDDEGKVSKFYVKRNPVTKDFSESDVKKIVDEGIKRRIEKHGLKNVKTPDGFILLPAEKKGLNGSEKDLKEMLIKKIRLFEKDKPIEIKKQNEINLQTEKALRKKHKHHFYAQNDENYSMAIYEGFDKKGKPKRDFELVNNIDAGEYYKLSNKSHRENHDLVPNPHLKSSLPLKYILKKGMMVLMYDKDPDEIWELSDNQKLGRLYEITQLDVEKYAEIKLLHHQEAREKKEITKFMGLKTGMKGGKNLDNYRKFPWIKIGYTTFDCIVENIDFKILPTGKIEKI

SEQ ID NO: 5203 - protein, 1171 aa, synthetic construct
  REGION 1..1171: note = Synthetic
MYSFINTIKLKEPTAEKFRFLNSEERESIKSKFFRKSKPTFTFIDIKKTLGEDNKYNYKDNSTVSGCPTVSALISVFGDDWENIIYENYTDKIIRNLKNDKSEEVKSKEDVTADVWHVLSTFTSDEKLVDFAKNKLQLSQKDAEKFSKIHLKKDYASLSLYAIKKILPYLEKGLLYSHAVFMANMDKIIKPERWENNEDRELIEKEVGEIINNHQEENKMLFAVNSALKICFDNHQTYSKEAETGYKDDVEKQLKKEFGEKTWDNKPNKEALFSEAFDIFIQHLKERKHPAIKRIDEKVMEFLSDNDLLIPNTFNKLYHPSDIEKFRSVKLKDKDGNVIKIDGKEAIGLGSPDVGSIKNPMAMKALHQLKKLINTLILEGQIDENTKVNIELSRQLNDANKRKAIEKWQNDRKELFQEYEKKIKELYKIETGNELKEVTNEDIEKFTYALEQRKDKKLVSKEDVMKYVLWEEQNHICIYTGKTISLSSFLGANPQFDIEHTLPRSRSWDNSQMNKTLCDKTYNQQTKKERMPIELSEKDYSEILPRIQHWKDKYEALANEIEKKKRSTRGATDKEQKDKLIQQRHYLQMEYNYWKGKYDRFVMKEIKEGFKNSQAVDIGIISKYATAYLKSVFKKVYSVKGEMVSEYRKAWGLHDTFKDKWGRTQYQPKDRSNHIHHCIDAVTIACMNKNKYDKLAHAWGLEDKGEFDKAKKELENEKPWDTFTQDVRNLENEVFIVHQNKDVLPIQTKKKFRKRGKAQPKVIYKKDENGKYVFDTNGKKIVEKYIYKKDDLGNLIPVKGKKLNTDLIKDKKEGEDYFKIESENGTKFYEYLKDKENKIVYQKDYMIEQGDGTRGSLHKLNYIGVIAKPELENGKPKTENGAFILQKDDEGKVSKFYVKRNPVTKDFSESDVKKIVDEGIKRRIEKHGLKNVKTPDGFILLPAEKKGLNGSEKDLKEMLIKKIRLFEKDKPIEIKKQNEINLQTEKALRKKHKHHFYAQNDENYSMAIYEGFDKKGKPKRDFELVNNIDAGEYYKLSNKSHRENHDLVPNPHLKSSLPLKYILKKGMMVLMYDKDPDEIWELSDNQKLGRLYEITQLDVEKYAEIKLLHHQEAREKKEITKFMGLKTGMKGGKNLDNYRKFPWIKIGYTTFDCIVENIDFKILPTGKIEKI

SEQ ID NO: 5204 - protein, 1224 aa, synthetic construct
  REGION 1..1224: note = Synthetic
MKKVLGLDLGVGSIGWALVNVDETHAPVNLLGMGSRIVPLTTDDAKEFTQGNAASKNQKRTQKRTARKGYDRYQLRRQQLTDKLRSLGMLPDERLIKLPVLELWELRANAATPSYKLSLPEIGRVLYHINQKRGYRHSRDEDSDKQQRDYVAAVNNRWKEIREEGKTIGQHFANKLKETEIISEKGKFYTYRIKEQVFPRGAYMEELDRIVEAQKVFWPDIFTDENVDELRNRIIFFQRPLKSCKHLVSLCDFEVRDFVKKNHSGNVITDRNGNQCHILAGPKVAPKSSPLSQESKLWEEINNIRITNSKNDEFFISQEKKVEIYRFLSENEVMKANDLKKILGISANDKEWTIDKAVSKGLTGNTTRTRLRKALSHFKREDLLRFDMQLTDSSFVNPETGEILHEIDPKCEQEPLYRLWHCIYSIDNKEDLAKALENQFGITNKEAIDNLNKIDFVKQGYGSKSAKFIRRILPYLQNGAMYSEACEIIGTNHSGSLTKAENAARQLLQRIPQLNKNELRQPVVEKILNQMINVVNAIAEKFGSIDEIRIEMARELKLSQEARATTAKSIRDREKINLEYAGKIREFGIVPSKNKILKYRLWEEAGQRCFYCGQTISAQEFLSGFDSDIEHIIPKSRLFDDSYSNKACSCRKCNSTKNNMTAYDFMKAQGEDKFKDYCDRVANAYKEGKISRTKRDRFMTPAEKIPKDFISRQLVQTQYISRKAMEILMQICHDVYASSGDVTAYLRRIWGYDEILQRLNIPRYREGGLTEMVTYEHNNQQHTEERIKGWSKRLDHRHHAIDALTIACTRQNIIQRLNNLNAQESSGEDKLNLDKWTMAQAHFSVREVSDAASRILISFKSGKKVATPGKRYIYRNGKRILAQENIIVPRGALSEESVYGKIRTIEKGIAINKLFDRHEDIFQPLIKKIIEERISEFDGNIKAAKASLKKRPLYLDKEKTIELKYGSCFKYEYVIKYPLNTLRAKDVEYIVDENIRETVSDRLSQFNGNVKEAFKEPLYTDGTSPVLIKTVRMFTGLDAVVPVRKDSDGKNIGFVKTGNNHHVAIYKDKEGKYQEHTVTFWHAVERKKYGIPIIIEHPDEVWQKVLDLDAPQSFIDQLPSPDWTYVMSMQQNEMFILGMGDDEFNDAMSAKDYRTLAQHLYRVQKVCSKDYYFRYQYETQLDDKEAALSMKKFYRVTSLSSLQSLNPKKVSINLLGDISLHNII

SEQ ID NO: 5205 - protein, 1221 aa, synthetic construct
  REGION 1..1221: note = Synthetic
MKKNLGLDLGVGSIGWSLINADKDNKPIAILGLGSRIISLSPDESSEFTSGNAASKNQKRTQKRTARKGYDRYQMRRQALTDKLRKLKMLPDEHLIKLPVLDLWTLRARAATPGEKLTLPEIGRVLYHINQKRGYRHSRSDDSADKEQREYVQAINKRFQEIREEGVTIGQHFVKKLKESEVVTDKGAFYNYRIKEQVFPRDAYVAEFDRVMDCQKVFYPEELSEANINEFRNEIIFYQRNLKSCKHLVSRCEFMTRSFLDEEHRPVLDASGKLVISGPKVAPKSSPIFQVCKIWEEINNLSIRNKENDELHISPEQKKEIFEYLDNNEKITSAALYKILGISKGDGWSVDKALSKGFTGNTTKVAISKALGKANDAKKRDLLRFDLRLKENGVNKDTGEIICEIDPECENEPLYKLWHVIYSINDKDAQRHALTSQFGINDEASLAELSKIDFVKQGYGSRSVKFMRKLLPSLMDGAKYSEACDVIGVNHSGSLTKSENEARELLQRIPQLQKNELRQPVVEKILNQMINVVNAVIEKFGGVDEIRVEMARELKLSKEGRAATAKNIRDREKENKEIAEKIIELGVTPSKNKILKYRLWQEAGQKCFYCGQPVGATEFLNGLDVEIEHVVPKTLLFDDSFSNKVCACRKCNAEKRNSTAYDYMKSKGENAFNDYLRRVDTAFSEHKISFTKRSRLLTPADKIPKDFISRQLVQTQYISRKAMEILKQVCHNVYGSSGEVTSYLRRIWGYDEILHSLDLPRYREGGMTAEVSYEHRGQTHTEERIKDWSKRLDHRHHAIDALTIACTRQSVIQRLNNLSSMTAVAGEAMSLDKWTLAQPHFSVQEVSDKVGGILVSFKAGKKVTTPGERYTYRGGKRILAQDGLLIPRGALSEESVYGRISALEKNVPVKKLFERVEDIVKPGIRAVVEDRLMACDNDVNAACASLKKEPLYLDAEKTIPLEYGTCYKAKYVMKYALSALKPKDVEYIVDEHIRKVVSERLSEYGNDPKKAFAEPLYADDAETIPVRTVRCYTGLDQVVPVKRDVAGNDIGFVKPGNNHHIAIYRDADGKFHECVVTFWDAVERKKCGIPVIVRNPDEVWDVVIDKNVPEELAAGLPALGWSFVMSLQQNEMFILGMEDDEFRDAMAEADYKALGAHLYRVQKLAGSDYYFRSHYETLLDDSAGARIMKKFYRISSSKALFALHPRKVAVSLLGEMSLKND

SEQ ID NO: 5206 - protein, 1221 aa, synthetic construct
  REGION 1..1221: note = Synthetic
MKKVLGLDLGVGSVGWSLVNVDDNYKPTEILGIGSRIISLSPDESSEFTSGNAASKNQKRTQKRTARKGYDRYQMRRQALTEKLRELKMLPDERLIKLPVLELWTLRAKAATPGEKLTLPEIGRVLYHINQKRGYRHAKSDDSADKEQRDYVQTVNKRYQEIKDEGTTIGQHFAIKLKESEIVTDKGPFYNYRIKEQVFPRDAYIEEFDRIMDCQKTFYPEELSEDNIDEIRNKIIFYQRDLKSCKHLVSQCEFMTRSFLDADHKPILNSSGELVMSGPKVAPKSSPIFQACKIWEEINNLSIRNKENDELHISPEQKKDIFEYLDNNEKINATALYKILGIGKGDGWSVDKALSKGFTGNTTKGAIAKALGKDHNTKKSDLLRFDLRLKENGVNKDTGEIIYEIDPTCENEPLYRLWHVIYSINDKDALRHALTNQFGINDEESLRELTKIDFVKQGYGSRSAKFMRKLLPALMDGARYSEACDMIGINHSGSLTKSENEARELLHKIPQLQKNELRQPVVEKILNQMINVVNAVIDQFGSIDEIRVEMARELKLSKEGRAATAKNIRDREKMNNEMAEKIKELGITPSKNKILKYRLWQESGQKCFYCGQPVGAAEFLSGLDVEIEHIVPKALLFDDSFSNKVCACRKCNAEKSNTTAYDYMKSKGENEFNDYLRRVDAAFNEHKISFTKRSRLLTPADKLPKDFISRQLVQTQYISRKAMEILKQVCHNVYGSSGEVTSYLRRIWGYDEILHSLDLPRYREGGMTAEVSYDHRGQTHTEERIKDWSKRLDHRHHAIDALTIACTRQSIIQRLNNLSAMTAVAGESMSLDKWTLAQPHFSVQEVSDNVSRILVSFKAGKKVTTPGKRYVYRGGKRVLAQKGLLIPRGALCEESVYGRIHSLEKEVPVKKLFERVDDIVKPGIRAAVEERLRACDNDVKVACASLKKEPLYLDVEKTIPLEYGTCYKVEYVMRYALSALKPKDVEYIVDEHIRKVVSERLSEYGNDPKKAFAEPLYADKSKTIPIRALRCYTGLAQVVPVKKDSKGNAIGFVKPGNNHHIAIYRDADGTYHESVVTFWDTVERKKYGLPVIIRKPEEIWDIIIDKNIPEELAAGLPAPDWKFVMSMQQNEMYVLGMEDDEFRDAMEVKDYKTLGAHLYRVQKLTSIDYYFRSQYETTLDDSAGARMMKKFYRIKSIKSLFALHPRKVSVSLLGEMALKDD

SEQ ID NO: 5207 - protein, 1219 aa, synthetic construct
  REGION 1..1219: note = Synthetic
MKKVLGLDLGVGSVGWSLVNVDDNYKPAEILGLGSRIISLSPDESSEFTSGNAASKNQKRTQKRTARKGYDRYQMRRQALTEKLRELKMLPDERLIKLPVLDLWTLRARAATPGEKLTLPEIGRVLYHINQKRGYRHSKSDDSADKEQRDYVQTVNKRFQEIKDEGTTIGQHFAIILKESEVFTEKGPFYNYRIKEQVFPRDAYIEEFDRIMACQKAFYPEELSDININEIRNEIIFYQRNLRSCKHLVSRCEFMTRRFFDAEHKPILNNSGEIVISGPKVAPKSSPIFQACKIWEEINNLSLRNKENDELHISREQKKEIFEYLDNNEKITATALYKILGIGKGDGWSMDKALSKGVTGNTTKTAIARALGKMNNPAKESLLRFDLRLKENGVNKDSGEVIYEIDPECENEPLYRLWHIIYSINDKEALRQALTNQFGINDEESLKELSNIDFVKQGYGSRSAKFMRKLLPALIGGAKYSEACDMIGINHSGSLTKSENEARELLHKIPQLQKNELRQPVVEKILNQMINVVNAVIDQFGDIDEIRVEMARELKLSKEGRAATAKNIRDREKQNNEIAEKIKELGITPSKNKILKYRLWQESGQKCFYCGQPVGAAEFLNGLDVEIEHIVPKALLFDDSFSNKVCACRRCNAEKSNLTAYDYMKSKGENEFNDYLRRVDAAFNDHKISFTKRSRLLTPADKLPKDFILRQLVQTQYISRKAMEILKQVCHNVYGSSGEVTSYLRRIWGYDEILHSLDLPRYREGGMTTEVSYEHRGQTHTEERIKDWSKRLDHRHHAIDALTIACTRQSIIQRLNNLSSMTATAGESMSLDKWTSAQPHFSVQEVSDNVSRILVSFKAGKKVTTPGKRYIHRGGKRILTQEGLLIPRGALCEESVYGRILSLEKAVPVKKLFERVEDIVKPGIRAMVEERLQACNNDVKVACASLKKEPLYLDAEKTIPLEYGTCYKAEYVMKYTLSALKPKDVEYIVDEHIRKVVSERLSEYGNDPKKAFAEPLYADEAKTIPIRTVRCYTDLRQVAPVKKDANGNDIGFVKPGNNHHIAIYIDSDGVYHKSTITFWKAVERKKYGLPVIIRKPREIWMIIIDKNIPEELAAGLPDPDWKFVMSMQQNEMFVLGMEDDEFRDAMEGKDYKTLGAHLYRVQKLEHLNFRIQYDTILDDSKAAKDMKKFYEIRGFKAFWALHPRKVSVSLLGELSLKDD

SEQ ID NO: 5208 - protein, 1217 aa, synthetic construct
  REGION 1..1217: note = Synthetic
MKKILGLDLGVGSIGWCLIQTDNDGNPQAILGIGSRIVPLSTDDTNEFSSGNAISKNQKRTQKRTIRKGYDRFQLRRQYLTEELRKLGMLPDEALIKLPVLKLWQLRADAATPGKKLSLPEIGRVLYHINQKRGYRHSKNDEGEDKSQREYVQAINDRFATIKAEQKTIGQFFAQKLSASAITTDKGQFYTFRTKDQVFPRKAYEEEFDQIIACQRVYYPKLLTDQTIRRLRDEIIFYQRPLKSCKHLISRCEFSLREYKTADGKSIISGPKVAPRSSPLFQVCKIWESVNNIELKNRNGESYPFTAKERQVLFDFLDNNEKLTVTDLKKILGLSVKEKWWGGKAIGKGIQGNITKVALKKALQGHEDLLSFQLKSAGSHFIDTETGEILQEITPEFEKEPLYRLWHIVYSIEDPAEMAAALYHQFGIQDPNIITRLTKIDFVQPGYGNKSARFIRQILPYLQKGMKYSEACDYININHSNSLTKAENNARELLPYMTPLQKNDLHQPVIEKILNQMVNIVNALLDKHGSFDEVRVELARELKQSRDERNHAYLDNNKRERENKVIEARIREMGIRTSRTRVQKYRLWEEAKHICFYCGQPVGVKEFLQGADVEIEHIIPRSLFFDDSFSNKVCACRKCNAEKGNRTAYDYMLQKGQNEFQDFTRRIEEAFERKEISKTKRERLMTTADDIPVDFIERQLRQSQYIAKKAVEMLKQVCRNVWTTSGSVTDFIRHQWGYDKILHELNFERYDFAGQTEIITYDHRGQIHQEKRIKGWTKRLDHRHHAIDALTIASTKQSYIQRLNHLNASRDKMFSELESQTDEVKEKYSLLEKWMRERPHLPTDKVMEAVDGILVSFKAGKRVSTLGKRYTYKNGKRTIAQSGIVVPRGALSEESIYGAISCLEDNVPLKVIFEKPESIFKPYIKEKVEERINEHNGDWKAALKSLKKKPIYLGDNETKPLEYATCWKKEFVIRYPLINIKKKDVDYIVDSHIRQIVAERIEAVGEKEAFKEPLYADKAGTIPIKSIRMFTKLNEKSVAPVKYEGCTPVGFVKLGNNHHIALYRDASGNLSEHVVSFWNAVERKKYGIPVIIEDTAVLWNQMAKKNLPEHFLNSLPPAGLKLETSLQQNEMFILGMPEEDYQRAIREKDYKQLNKYLYRVQKIATQDYYFRFHVETVLDDSAEALSSKKYYRTRIGAFMKLNPHKVLVNLLGEIAEL

SEQ ID NO: 5209 - protein, 1212 aa, synthetic construct
  REGION 1..1212: note = Synthetic
MDYYKYRNKILFQMEMISSTRGKYLGCFLFLYSLERFFLHMSKKCSTFAAAKVNNEYSMIKHILGLDLGVGSIGWALIETEDDQPKQIIGMGSRIVPISKDDSDQFSKGQAISKNADRTARRTTRKGYDRYQLRRALLTKVLRQNRMLPERMDENVIDLWKLRSDAATEGHQLTLPQIGRVLYHINQKRGYKHAKADDNVDSKQTKYVEAVNQRYAEIQEAKQTVGQHFYLELLRSKVESGNGPYYTFRIKDKVFPRAAYIAEFDQIMKVQKVYYPEVLTDEFIDTLRNRIIFYQRPLKSCKHLVSLCEFEMKPYKTKDGKIVYGGPKCAPRTSPLAQLCAMWETVNNITLTNRNNERYEFSLDERKQLVEHLCTHEALKLTDLYKILGITKKDSWYGGKAIGKGIKGNATLNQLRKALNGKYGEWLEMPIERIDAVDDETAEVFWQVSPKVEETPLFKLWHAVYSIQDAEELSKTLRNKFGIDDQEVINALCKIDFVKPGYANKSHKFIRRLLPYLMDGMMYSEACARIGINHSNSMTAVERDARQLSDHIELLQKNALRQPVIEKILNQMINLVNRLQQEYGPIDEARVELARELKQSREEREGAYRRNNQNERLNKEIIAKIEEMGIRPSRSRIQKYKMWEENNHRCMYCGKTVSLAEFLNGADVEIEHIIPRSILFDDSFSNKVCACRECNHEKGNMTALDYIETKPAAEQEAYKQRVDEAFKEGRISKTKRDHLLWHRSEIPTDFIERQLRQSQYIAVKAVEILQQGIRQVWTSGGSVTDFLRHQWGYDEILHTLNLPRYRQVEDLTEMVHYEHAGQEHDEERIKNWSKRIDHRHHAIDALTVALTRQAYIQRLNTLEASHDFMEKQVKEAGTQYNEKKSILEKWILEQPHFSVDDVTQSVDSILVSFRAGKRVTTPARRAIYQGGKRTIVQTGLQVPRGALTEDHIYGKLGDKFVYKYALTDQSMHPENIVDPTIRAIVQKRVAERGKDAFKEPLYSAEGMEIKSVRCYTSLSENGVVPVKQDEHGRNIGYAKKGNNHHVAIYQDKDGQYQEMVVSFWDAVERKKYGVTVVITNPHDVWDSIMDKDMPQEFLEKLPKDDWTYILSMQENEMFVLGMEEDEFNDAIDAKDYAALNKHLYRIQNISSLFYIFRYHTETKVDDKYEGIANGRNASMSLGALVPIRSFKALFAQFPHKVKIDIMGRITRA

SEQ ID NO: 5210 - protein, 1165 aa, synthetic construct
  REGION 1..1165: note = Synthetic
MATKKILGLDLGTNSIGWALIETEDSNPKSILAMGSRIVPLSTDDSTQFAKGQAITKNADRTQKRTARKGLNRYQMRRAMLTEELRRHGMLPERTDENIMDLWRLRSDAATDGKQLSLPQIGRVLYHINQKRGYKHSKADNSANTKQTKYVEAVNQRYRDIQACHQTIGQYFYEQLLSSAVQTPSGSYYTYRIKDKVLPREAYIAEFDQIMKVQRVFYPDVLTDELVDTLRNHIIFYQRPLKSCKHLVSLCEFEKRPFKREDGQIVYSGPKCAPRTSPLAQFCTVWEAVNNITLTNRQNETFEITQEQRVAMADFLNQHDKMGVKDLQKILGISPKDGWWAGKAIGKGLKGNTTFTQLREALGNLPNAEHLLKMKLSMVDAAVDTTTGELIRQVSPQVEEEPLFRLWHLVYSLQNEDELRKALRKQFGIDDEEVLDKLCKIDFVKPGYANKSHKFIRKLLPYLMEGYQYHEACAHIGVNHSDSLTAEQNAARPLLDKIPLLEKNELRQPVIEKILNQMINVVNALKAEYGDIDDVRIELARELKSSKDEREAAFKRNNENERQNKIYENRIREYGIQPSRSRIQKYKMWEESNHLCFYCGKPVNVTDFLAGAEVEIEHIIPQSVLFDDSYSNKVCACRACNQAKGNLTAREFMEKHSKEEYDSYLRRVDDAFNAHRISKTKRDHLLWRKEDIPQDFIDRQLLQSQYIAKKAAEILRQGYRNVYATSGSVTDFLRHQWGYDEILHRLNLPRYQQVEGLTEDVTYDHCGQEHQQERIKGWTKRLDHRHHAIDALTIALTQQSVIQRLNTLNNSREQMFDELGKRTDTPEYTEKRSLLEKWVDAQPHFSVQEVTDKVDGILVSFRAGKRAATPAKRAVYQNGKRHIVQTGLQVPRGALSEETVYGKLGNKYVVKYPLGHQSMKMDDIVDPTIREIVRTRLNAFGGKAKDAFAEPLYSDAAHQMQIKTVRCYTGLQDKAVVPVRFNAQGEPVGFVKMGNNHHIAIYRDAKGQYQESVVSFWQAVERKRYGIPVVIEQPHEVWDKLINSDNIPQDFLETLPHDDWQFVVSLQQNEMFILGMDDADFEAAMEQKDYRTLNKYLYRVQKISSKEYCFRYHTETSVDDKYDGVINKSISMELQKLKRLTSISAFFSQHPHKVRVNLLGEVSAL

SEQ ID NO: 5211 - protein, 1161 aa, synthetic construct
  REGION 1..1161: note = Synthetic
MTKKILGLDLGVGSIGWALIETQDDKPSQILGIGSRIVPISNDDSDQFQKGQAITKNAERTQRRTARKGYDRYQLRRALLTNLLREKNMLPDYMNESAKDLWRLRSDAATEGKKLSLKEIGRVLYHINQKRGYKHSKADVSADSKQTKYVQEVNKRFQELRELGQTIGQHFYQMLQQSVVQSEKGVYYTFRIKDKVYPRRAYEEEFDKIMSTQKVFYPDILTDEFIDTLRNRIIFYQRPLKSCKHLVGLCEFEMRPYKKADGSIVYSGPKCAPRTSPLAQICAVWEAVNNIKLTNRNNEIYPISQEERQAMVDFLQTHKEMKVADMQRILGIKKSDGWWGGKAIGKGIKGNQTLCQLREALGEKYQDLLKMEIKKIDSGFFDAETAEVIEIIDPACENEPLFQLWHVVYSVQDKDELRKALLKKFNIDDEQVVENLYNLDFVKPGYANKSHKFIRRILPYLMQGEMYSVACARVGINHSNSRTKEELNTRPLVEHIKLLQKNTLRQPVIEKILNQMINIVNALRDKYGEIAEVRVELARELKQNKEERETTYKNNSKNERLNREITERIKEMGIRPSRMRVQKYKLWEESLHQCFYCGKTVGAAEFLSGADVEIEHIIPRSVLFDDSYSNKVCACRECNHAKNNQTAFDFMKAQPTDKFEAYKSRVDDAFKEKRISKTKRDHLLWGLEDIPQDFIDRQLRQSQYIAAKAVEILQTAIRDVHATSGSVTELLRHQWGYDEILHHLNLPRYSKADLTEIVQYDHAGQKHTVERIKNWNKRLDQRHHAVDALTIALTKQSYIQRLNTLNASREAIYNEVEQADAKLRNEEKRTLLENWVAIQPHFPVKDVEDKVAGILVSFRAGKRVTTPAKRAVYRNGKRINVQKGLLVPRGALTEETVYGKLGDRFVVKYPLQHPSMFPDNIVDPTIRELVKKRLSEFNNDPKQAFATPLYSDKAQKMEIKSVRCFAPGVSAQGSTPVRFNNDGNPIGYSKTGNNHHIAIYKDANGKFWESVVSFTEAVHRKLIGLPVVIDKPKQVWDKVINMNLPEDYLLTLPQDNWEFVVSMQVNDMFIIGLTNVEFEDAIHEKDYALLNQHLYRVQQLSKANYMFRLHTETSVDDKYEGVKNEKLSMDLKKMISIRSPKGMTNNIHKVRISILGEITPL

SEQ ID NO: 5212 - protein, 1159 aa, synthetic construct
  REGION 1..1159: note = Synthetic
MIKHILGLDLGVGSIGWALIETENDQPKQIIGIGSRIVPLSKDDSDQFSKGQAISKNADRTTRRTTRKGYDRYQLRRALLTQVLRQNGMLPERMNENVIDLWKLRSDAAMDGHQLTLPQIGRVLYHINQKRGYKHAKADNNGDSKQTKYVEAVNQRYKEIQEAKQTIGQHFYMELLRSKVESGDGPYYTYRIKDKVFPRAAYIAEFDQIMKVQKAYYPEVLTDELIDTLRNRIIFYQRPLKSCKHLVSLCEFEMKPYKTKDGKIVYGGPKCAPRTSPLAQLCAMWETANNITLTNRNNGQYDFSLEERRQIVEHLCTHEVLKLTDLYKILGITKKDGWYGGKAIGKGIKGNATLNQLRKAMNGKYSEWLEMPIERIDAVDNETTEVFWQVSPEIEQTPLFKLWHAVYSIQDADELAKTLRNKFGIDDQDVIDALCKIDFVKPGYANKSHKFIRRLLPYLMDGMMYSEACARIGIKHSNSMTAAERDARQLKEHIELLQKNALRQPVIEKILNQMINLVNRLQQEYGPIDEARVELARELKQSREEREGAYRRNNQNERLNKEIFAKIEEMGIRPSRSRIQKYKMWEESNHRCMYCGKTVSLAEFLNGADVEIEHIIPRSILFDDSFSNKVCACRECNHEKGNLTALDYLETKPTAEQEAYKQRVDEAFKEGRISKTKRDHLLWHKSNIPKDFIDRQLRQSQYIAVKAVEILQQGIRQVWTSGGSVTDFLRHQWGYDEILHTLNLPRYRKVDGLTEMVHYEHAGQEHDEERIKNWSKRIDHRHHAIDALTVALTRQAYIQRLNSLNAEFTREEMLKEVEAANTVYNEKKSLLEKWVNEQPHFSVEDVTHSVDSILVSFRAGKRVTTPARRAIYQGGKRTIVQRNIQVPRGALTNEFVYTKNGNKYARKYPIDAISNPENIVDPTIRQLIKARLAAFNGNAKEAFKEPLYSAEGMEIRTIRCYNNKLADKGVVAVKYNERQKPIGFSETDSNHHIAIYRDKSGKYQEMVVSFWDAVERKKFGVPVVISNPHDVWDSIMDKDLPQEFLVKLPKDDWTYILSMQENEMFVLGMEEDEFNDAIEAKDNAVLNKHLYRIQNISSLFYNFRYHTETKVDDKYAGIENGRNASMSLGALVPIRSFGSLFALFPHKVKIDIMGRITKA

SEQ ID NO: 5213 - protein, 1155 aa, synthetic construct
  REGION 1..1155: note = Synthetic
MNKHILGLDLGVGSIGWALIETEDDQPKQIIGMGSRIVPISKDDSDQFSKGQAISKNADRTARRTTRKGYDRYQLRRALLTQVLRQNGMLPERMDENVIDLWKLRSDAATDGHQLTLPQIGRVLYHINQKRGYKHAKADDNGDSKQTKYVEAVNQRYTEIQEAKQTIGQHFYQELLRSKVESGNGPYYTFRIKDKVFPRAAYIAEFDQIMKVQRAYYPEVLTDELIDTLRNRIIFYQRPLKSCKHLVSLCEFEMKPYKTKDGKIVYGGPKCAPRTSPLAQLCAMWETVNNITLTNRNNERYEFSLDERRQLVEHLCTHEVLKLTDLYKILGITKKDGWYGGKAIGKGIKGNATLNQLRKALNGKYSEWLEMPIERIDAVDDETAEVFWQVSPKVEETPLFKLWHAVYSIQDADELAKTLRNKFGIDDQEVIDALCKIDFVKPGYANKSHKFIRRLLPYLMEGMMYSEACARIGINHSNSMTAVERDARQLSDHIELLQKNALRQPVIEKILNQMINLVNRLQQEYGPIDEARVELARELKQSREEREGAYKRNNQNERLNKEIIAKIEEMGIRPSRSRIQKYKMWEESNHRCMYCGKTVSLAEFLNGADVEIEHIIPRSILFDDSFSNKVCACRECNHEKGNMTALDYLETKSAAEVEAYKQRVDEAFKEGRISKTKRDHLLWHRSDIPTDFIDRQLRQSQYIAVKAVEILQQGIRQVWTSGGSVTDFLRHLWGYDEILHTLNLPRYRQVEDMTEIVHYEHAGQEHDEERIKNWSKRIDHRHHAIDALTVALTRQAYIQRLNSLNAEFTREEMLKEVEEANTVYNEKKSLLEKWILEQPHFSVDDVTNSVDSILVSFRAGKRVTTPARRAIYNGGKRTIVQRGLQVPRGALTEETIYGKLGDKFVVKYPLDHPSMKPDNIVDPTIRALVQKRVAERGKDAFKEPLYSAEGMEIKSVRCYTSLSENGVVPVKQDEHGRNIGYAKKGNNHHVAIYQDKDGQYQEMVVSFWDAVERKKYGVPVVITNPRAVWDSLINKDLPQEFLEKLPKDNWTYILSMQENEMFVLGMEEDEFNDAIEAKDYAALNKHLYRVQKISHADYWFRYHTETTVDDKYNDVKNPQLSFDMGKAFDIRSCKSLFALFPHKVKIDIMGRITKA

SEQ ID NO: 5214 - protein, 1154 aa, synthetic construct
  REGION 1..1154: note = Synthetic
MKKKILGLDLGVGSVGWALIETEDNQPKQILGMGSRIVPISKDDNDQFSKGQAITKNADRTQRRTARKGYNRYQMRRALLTQALRNHNMLPDRLDENVIDLWKMRSDAATEGHQLSLSQIGRVLYHMNQKRGYKHSKADDNGDSKLTKYVEEVNQRYKKIQETKQTIGQYFYTELLRSKIERANGPYYTYRIKDKVFPRAAYLAEFDQIMQVQRAYYPEVLTDDFIDILRNRIIFYQRPLKSCKHLVSLCEFEARPYKTKEGKVVYGGPKCAPRTSPLAQLCVMWETANNITLTNRNNEKYEFTLEQRRQIVDFLCRNKEMKVSHLQKILGIGRNDGWYGGKAIGKGIKGNATLNQLREALQGKYDQWLEMPIKHVDVVDTTTGEVFWAVSPEIEETPLFKLWHAVYSLQNADELAKTLREKFLITDESVIEALCRIDFVKPGYANKSHKFIRRLLPYLMEGMMYSEACERININHSNSMTREERELRPLSARIQLLQKNQLRQPVVEKVLNQMINIVNSLKDQYGEIDEVRVELARELKQSRDERESAYKAMGQNERRNKEIAIKISEFGIRPSRSRIQKYKMWEESLHQCFYCGKTIDLAEFLNGADVEIEHIIPRSILFDDSFSNKVCACRRCNQEKGNQTAMEYMETKTVGELEAYKRRVDEAFTSKRISKTKRDHLLWRRADIPTDFIERQLRQSQYIAVKAVEVLQEGIRQVWTSGGSVTDFLRHQWGYDEILHTLNLPRYRQVEGLTEFVDYEHAGKKHTEERIKNWTKRIDHRHHAIDALTVALTQQGYIQRLNTLEASHDFMEKQVKEAGTKYNEKKSILEKWINEQPHFSVEDVTKAVDGILVSFRAGKRVTTPARRAIYKGGKRVIVQRGIEVPRGALTEETVYGKLGDKFTVKYPLNHPSMKPENIVDPTIRALVQKRVAERGKDAFKDPLYSAEGMEIKSVRCFANVTDNSVVPIKYNGEGLPIGYAKKGNNHHVAIYTDKSGKPQESVVSFWDAVERKRYGVPVVIANPHEVWDSLLDNDLPQEFLEKLPKDDWQYLFSMQENEMFVLGMEDDEFYDAIERQDYASLNKHLYRVQKIRSGEYTFRYHTETKVDDKYEGIANGTNASFQLGALVSIRGFSSLFAKHPHKVKVDILGHIHKV

SEQ ID NO: 5215 - protein, 1154 aa, synthetic construct
  REGION 1..1154: note = Synthetic
MKKKILGLDLGVGSIGWALIETEDYQPQKILGMGSRIVPISKDDSDQFSKGQAITKNADRTARRTARKGYNRYQMRRALLTQALRNNNMLPERMDENVIDLWKLRSDAATEGHQLTLPQIGRVLYHINQKRGYKHSKADENGDSKQTKYVEAVNQRYKDIQETHQTIGQHFYLELLRSKIERANGPYYTYRIKDQVFPRAAYIAEFDQIMNVQRVYYPEVLTDEFIDTLRNRIIFYQRPLKSCKHLVSLCEFEMRPYKTKDGKIVYGGPKCAPRTSPLAQLCAMWETANNITLTNRNNERFEFTLEQRRQIVDFLCHNKEMKVTHLQKILGISKKDGWYGGKAIGKGIKGNATLNQLRDALQGKYDQWLEMPIKRIDVVDATTSEVFWAVSPEVEETPLFKLWHAVYSLQNADELAKTLREKFQITDEAVIEALCKIDFVKPGYANKSHKFIRRLLPYLMEGMMYSEACERININHSNSMTREEREQRPLSARIQLLQKNQLRQPVVEKVLNQMINIVNSLKDQYGEIDEARVELARELKQSRDERESAYKAMGQNERRNKEIAEKISEFGIRPSRSRIQKYKMWEESLHQCFYCGKTIDLSEFLNGADVEIEHIIPRSILFDDSFSNKVCACRRCNQEKGNQTAMEYMETKSAAEQEAYKQRVDEAFTAKRISKTKRDHLLWRKTDIPADFIERQLRQSQYIAVKAIEVLQDGIRQVWTSGGSVTDFLRHQWGYDEILHTLNLPRYRQVEGLTEFVDFEHAGQKHTEERIKNWSKRIDHRHHAIDALTVALTQQGYIQRLNTLEASHDFMEKQVKEAGTKYNEKKSILEKWINEQPHFSVEDVTKAVDGILVSFRAGKRVTTPARRAIYKGGKRVIAQRGIEVPRGALTEETIYGKLGDKFTVKYPLDHPSMKPENIVDSTIRALVQKRVAERGKDAFKEPLYSAEGMVIKSVRCYTSLSENGVVPVKYDEAGKPIGYAKKGNNHHIAIYQDKDGQYQEMVVSFWDAVERKRYGVSVVITNPHEVWDSLLNKDLPQEFLAKLPNDNWQFVLSMQENEMFVLGMEDDEFNDAVEHQDYATLNKHLYRVQSISAHDYFFRYHIETRVDDKYEGVEKGREASFISGALIRSRSFSSLFAQFPHKVNVDLLGHIHKA

SEQ ID NO: 5216 - protein, 1242 aa, synthetic construct
  REGION 1..1242: note = Synthetic
VICFRWCKIKTIYRKTKIIFILMKKILGLDLGVGSVGWSVISCDDEHRPLEILGMGSRIVPLTPDESNEFSSGNAASKNQSRTQKRTARKGYDRYQLRRQALTVKLRELGMLPDEALIKLPVLDLWTLRARAATPGDKLSLPEIGRVLYHLNQKRGYRHSKQDDSADKTQRDYVQAVNKRFQEIKDEGLTIGQHFAEKLKESEIITDKGAFYNYRIKEQVFPRAAYVEEFDRIIQCQREFYPEVFTEAIVNEIRNEIIYYQRPLKSCKHLVSVCEFMQRELFDAEHNPIRNGKGEIVVAGPKCAPKSSPLAQVCKIWEEVNNIRITNKENDEFFISIDNKHEIFDFLNTHEKMKADDLFKILGLAKNSGWSADRAMSKGMVGNTTRVALMKALKGRRDIDEILRFDLREVESNQVNADTGEVLMEIGAECESEPLYRLWHIIYSISDKNEQKATLEKQFGITDESMLESLCRIDFVKQGYSSRSFKFMRKILPYLMDGAKYSEACDVIGVNHSDSITKAENQARELLTRLPQLQKNELRQPVVEKILNQMINVVNAVIDKYGAIDEIRVEMARELKLSKAGRESAAKNIRTREKANEEIAKRIEELGLVPSKNKILKYRLWEESGKRCFYCGQPVSATEFLNGLDVEIEHVVPKSLLFDDSFSNKVCACRKCNAEKGNATAFDFMKGRGENAFEDYLKRVETAFKENRISQTKRNRLLTPADKIPKDFISRQLVQTQYISRKAMEILNQVCRNVYGSSGDVTAYLRRIWGYDEILHSLDLPRYREGNLTGDVTYVHKGQTHTEERIKDWSKRLDHRHHAIDALTIASTRQSIIQRLNTLNAKTAIGEEQISLDKWTLAQAHFSVADVADHVADILVSFKSGKRVTTPGKRYVYKAGRRIVAQENILVPRGALSEESVYGRIKSIEEKVPVKKLFERVDDIVKPRIRYLIRERLETCGGDCSKAVSSLKKSPLYLDEENTIMLEYGSCFKPEYVIKYSLNSIKAKDAVSIVDNHIREVVTARLAAFGDDPKKAFAEPLYADGAGKIQIRTVRCYTGLSQVVPVKKDADGNDIGFVKPGNNHHIAIYKDADGKYQESIVTFCDAVERKKYGIPVVVRNPAAVLDTVIDKNVPEKLAGGLPSPEWTFVMSMQQNEMFVLGMGDDEFNDALAGRDYKSLGEHLYRVQKLATSDYFFRSQYETKLDDSKGASAMRKFFRTASLKALFALNPRKVSISLLGEISLKDD

SEQ ID NO: 5217 - protein, 1226 aa, synthetic construct
  REGION 1..1226: note = Synthetic
MKKILGLDLGVASIGWALINVENDIPTEILGIGSRIIPLTTDDANEFSTGNAISKNQNRTTSRTQRKGYDRYQLRRKNLTDFLRKYNMTPTEELIKLDVLGLWGLRAKAATEQITLIELGRILYHLNQKRGYKSAKSDGIDDKKQRDYVANVNNRYGIIKELGQTIGQFFYGNLQKDVHYRTKEQVFPRAAYVQEFESIWDAQAKYYPEILNEENKGIVRDEIIYYQRSLKSCKHLVSLCEFDMRAYKNKEGKTVYDGPKVAPRSSPLFQVCKSWESLNNIVLKNRRGNEFEFSLEHKQAIFNHLENHEKLTISDLYKILGINKSEGWWGGKAIGKGLQGNSTKMQISKAIEGLVDYQNLLQFNLKIIDTKLVDTETGEIIQQINPDFEKEPLYRLWHTIYSINDKDELANVLHKNFGIEDPEAIDALYKIDFVKSGFGNKSSKAIRRILPYLQSGLMYSEACLAAGFKHSESLTVAENDARILLTKLPQIRKNELKQPIVEKILNQMINLMNAVIDQFGTIDEIRVELARELKQSKDERNAADKNMRLREKENDYFAKRIFQEYGLAASRTRIQKFRMWEESKQKCFYCGQTVNVQEFLRGFDVEVEHIIPKSLFFDDGFSNKVCACRKCNAEKNNQTAFDYMKSKAENEFENYLVRIEEYYKNGDISKTKKERLLTTKEKIPTDFIDRQLRETQYIARKAKDILAQVARNVWATSGSVTDFIRHTWGWDNILHDLQIDKYRINGQTEIVEFNHKNQKHSEERIIGWSKRLDHRHHAIDALVVACTRQGYIQRLNNLNTERDAMWQELKNQSEEHRNKFMSLENWLNDQPHFSKELVQNKVAGILVSFKPGKKAASTGKRIKYVNGKKIVLQEGIIVPRGSLHEESVYGRIKTLEEKKSIKYVFENPQLIFKPYIKELVEKRLEEFDGDPKKAIASLTKNPIKLKDEENLEYATCFREDYVIKYPLQSITPKDVSSIIDKHLRDVVKERLKKFNNNEKDAFKDLQKNPLWLDKDETIQVKTLRCFTGLSAVEPIKNNGIGEAIGFVKPGNNHHIAIYTDKTGKKIEHSVTFWSAVQRKKYGIPVIISNPIEVWDSIFEKDISENVLNSLPLIDWKFEVSLQQNEMFILGMAEEDYQMAIEKNDLTLLSKHLYRVQKIAPSDYVFRFHLETKLDGSSDAKEVKCFYRIKSLSAFFALNPWKLKINCLGQITVAKNKPIMNEMIKMT

SEQ ID NO: 5218 - protein, 1159 aa, synthetic construct
  REGION 1..1159: note = Synthetic
MKKKVLGLDLGVGSIGWALIETTDNQPEEIVGMGCRIVPIGKDDSDQFSKGQAISKNADRTARRTARKGYDRYQLRRALLTQVLRQNGMLPERMDENVIDLWKLRSDAATEGEKLTLPQIGRVLYHINQKRGYKHAKADDSADKKQTDYVAAVNQRYADLQAENKTIGQHFYLELLRSKVEGASGPYYTFRIKDKVFPRAAYIEEFDQIMHVQSTYYPTILTDELIDTLRNRIIFYQRPLKSCKHLVSLCEFEMRPYKTKDGRIVYGGPKCAPRTSPLAQLCAMWETVNNITLTNRDNEKLDITLEQRKQMVEFLCANKELKLTNLYKILNISKKDGWYGGKAIGKGLKGNATLLQLREALGGKYDQWLEMPVELKDSKWVDTETGEVIKEVAETIEQTPLFRLWHAVYSLQNADELAKTLREKFQITDKAVIDALCKIDFVKPGYANKSHKFIRRLLPYLMNGYQFSEACAHIGINHSNSMTAEERDSRTLVEQIELLPKNALRQPVIEKILNQMINLVNRLQQEYGPIDEARIELARELKQSREERDNAYKAINKNERENAAIAAKIAEFGIRPSRSRIQKYKMWEESNHRCFYCGKTMDIAQFLNGADVEIEHIIPRSILFDDSYSNKVCACRDCNREKGNSTAMEYMEGKPTGEFEAYKQRVDEAFTEHRISKTKRDHLLWRRADIPQDFIERQLRQSQYIAVKAVEILQTGIRRVWTSGGSVTDFLRHQWGYDEILHTLNLPRYRKVDELTEIVHFEHAGQEHEEERIKNWTKRIDHRHHAIDALTVALTQQSYIQRLNTLEASHEWMEKQVKEANTAYNEKKSVLERWVADQPHFSVADVTNKVDGILVSFRAGKRVTTPARRAIYSGGKRKIVQTGLQVPRGALTEDTIYGKREEGFVVKYPLDHPSMKVENILDPTIRNLVKEHIAAFGGNAKEAFKMPLFSAEGMQIRSVRCKTNLSENSVVPVKLNEDGQPIGYAKKGNNHHVAIYQDKKGEYQELVVSFWDAVERKHYGVPVVIINPHEVWTDLVNKDLSQDFLNKLPHDDWQFVLSMQENEMFVLGLEDDEFNDAIERHDYNLLNKHLYRVQKISHREYSFRYHTETKVDDKYDGIENGRSTSMSLGALISFRSMNGLFSQFPHKVKIDIMGRITKA

SEQ ID NO: 5219 - protein, 1222 aa, synthetic construct
  REGION 1..1222: note = Synthetic
MKKILGLDLGVASIGWALINVVNDIPTEIIALGSRIIPLSTDDANEFSTGNAISKNQKRTERRTQRKGYDRYQLRRKNLTNFLRKYDMTPTEQLIKLEVLELWGLRAKAVNEQISLVELGRILYHLNQKRGYKSAKSDDIDDKKQKDYVSDVNNRYKTIKGFGQTIGQYFNEHLLKDKHFRTKEQVFPRIAYVEEFEVMWDCQAKYYPTILTAENKAIVRDEIIYYQRNLKSCKHLVSVCEFEIRPYKNKKGQTVYNGPKVAPRSSPLFQVCKNWESLNNIVLKNRRGKEFEFTVEIRTKLFTHLDNNEKLTTSDLFNILDVKKSDGWWGGKAIGKGLQGNTTKMQISKALKGIPEYQNLLQFKLKNIDTGLVDLETGEIVEQISSDFENEPLYRLWHTIYSINDKDELTKVLLRNFGIEEPEVIDALYKIDFRKAGFGNKSSKAIRRILPYLQNGLMYSEACLAAGFRHSESLTVVENEARELLSKLPQIKKNELKQPIVEKILNQMINLVNAVIDQYGTIDEIRVELARELKQSKDERNATDKNMRQREKENDNYANRILQEYGLTASRTRIQKFRMWEESKQKCFYCGQTVNVMEFLKGLDVEVEHIIPKSLFFDDGFSNKVCACRKCNSEKGNQTAFDYMRTKADYEFEDYLIRIEDYYKNGDISKTKKERLLTSKEKIPTDFIDRQLRETQYIARKSKAILSQVTRNVWATSGSVTDFVRHTWGWDKILHDLQVDKYRAMGQTEIVEFIHKNQKHKEERIKDWSKRLDHRHHAVDALVVACTKQSFIQRLNNLNTERDSIWQALKDQSEEHKEKFSSLENWMNEQPHFSKEYLQNKVAEILVSFKAGKKSASIGTRSKYVNGKKIILQEGIIVPRGALHEEGVYGEISRYFKDKKTGQVTYEPQIVIKYDVGLGSQGYIFSGKETVEIKYKTDKKTGIINIVIEDKIQKVLDSIIDERVKKVLLERLNSGFENGQTYKDDPKKALNSFRDLINHPIYLDKNQSIPIKSVRCFTGLSAVEPLRYNDKGEAISFVKPGNNHHIAFYHDQEGNKQVHVVTFWHAVQRKKYGIPVFITEPTFVWDFVQINEFPEAFLKNLPNVNWTFENSLQQNEMFILGMSNDEFTSSIEKSNYELLSKFMYKIQNLSANPNGKVIQPVIRLCHHIETRFEINKANKSDKRFLNIVSIEVWNKLNPVKITLNCLGKITSINGKAISYLTT

SEQ ID NO: 5220 - protein, 887 aa, synthetic construct
  REGION 1..887: note = Synthetic
LAQLCTVWEAVNNITLTNRQNETFEITQEQRVAMADFLNQHDKMGVKDLQKILGISPKDGWWAGKAIGKGLKGNTTFTQLREALGNLPDAEHLLEMKLHLVDSAVDTTTGELIRQVSPQVEEEPLFRLWHLVYSLQNEDELRKALRKQFGIDDEEILAKLCKIDFVKPGYANKSHKFIRKLLPYLMEGYQYHEACAHIGVNHSDSLTAEQNAARPLLDKIPLLEKNELRQPVIEKILNQMINVVNALKAEYGDIDDVRIELARELKSSKEEREAAFKRNNENERQNKIYEDRIREYGIRPSRSRIQKYKMWEESNHLCFYCGKPVNVTDFLAGAEVEIEHIIPQSVLFDDSYSNKVCACRTCNHTKGNQTAREFMETHSKAEYESYLLRVDDAFNAHRISKTKRDHLLWRKEDIPQDFIDRQLRQSQYIAKKAAEILRQGYRNVYATSGSVTDFLRHQWGYDEILHRLNLPRYQQVEGLTELVTYDHCGQEHQQERIKGWTKRLDHRHHAIDALTIALTQQSVIQRLNTLNTSREQMFDDLGKRTDTPEYTEKRSLLENWIDAQPHFSVQEVTDKVDGILVSFRAGKRAATPAKRAVYQNGKRHIVQTGLQVPRGALSEETVYGKLGNKYVVKYPLGHQSMKVDDIVDPTIREIVRTRLNAFGGKAKDAFAEPLYSDAAHQMQIKTVRCYMGLQDKAVVPVRFNAKGEPVGFVKMGNNHHIAIYRDANGQFQESVVSFWQAVERKRYGIPVVIEHPHEVWDKLINIDNIPQEFLETLPRDDWQFVVSLQQNEMFILGMDDADFEAAMEQKDYRTLNKYLYRVQKIATKNYYFRYHTETSVDDKYDGEKNEMWSKNMKKLINIRSFDAFFSQHPHKVRINLLGEVSAL

SEQ ID NO: 5221 - protein, 1165 aa, synthetic construct
  REGION 1..1165: note = Synthetic
MQTRKILGLDLGVGSVGWALIETEDDQPKSILAMGSRIVPLSSDDSTKFQKGQAITKNAERTQKRTMRKGLNRYQIRRALLTDLLRRNGMLPEYMNENVIDLWQLRSDAATEGKQLSLPQIGRVLYHINQKRGYKHSKADISADAKQTKYVEAVNQRYRNIQALHQTIGQYFCQQLKETAVQTEKGVYYTFRIKEKVLPRASYVAEFDQIMKVQQSYYPNVLTDELIDTLRNHIIFYQRPLKSCKHLVGLCEFEMRPYKRNDGQIVYGGPKCAPRTSPLAQLCAVWEAVNNITLTNRSNETLEITPKQRKAMADFLYEHEKMGVKDLQKILGISPKDGWWAGKAIGKGIKGNTTYTQLRDALGPISNAADLLSMKIELTDSMVDTTTAELIRQVSPNVEEQPLYRLWHIVYSAQNEDDLRKALHKQFDIEDEKVVANLGKIDFVKPGYANKSNKFMRKLLPYLMQGYKYNEACAHIGVNHSNSLTAEQNTVRPLLDKIPLLEKNALRQPVIEKILNQMINVVNALKAEFGDIDDVRIELARELKESKDERESAFKRNNENERKNKEYEARIREYGIRPSRSRIQKYKMWEESQKKCFYCGKTIDVVEFLNGVDAEIEHIIPQSVLFDDSFSNKVCSCRDCNHTKGNLTAREFMEQHSAADYEAYLRRVDEAFDEHRISKTKRDHLLWRKEDIPQDFIDRQLRQSQYIAKKAAEILRQGVRNVYATSGSVTDFLRHQWGYDNILHYLNLPRYQQVDGLTESVTYDHCGQKHQEERIKDWTKRLDHRHHAIDALTIALTQQSVIQRLNTLNASREEMKNDLGQRIDTPEYTEKRSLLEKWVDIQPHFSVQEVTDKVDGILISFRAGKRVATPAKRAIYQQRKRCIVQTGLQVPRGALSEETVYGKLGNKYVVKYALTHPSMKVDDIVDPTIREIVRNRLNAFGGNVKDAFAESLYSDVAHKMQIKSVRCYTNLQDKAVSAVRFNAQGEPVGFVKMGNNHHIAIYCDKKGQYQESVVSFWHAVERKRYGIPVVIEKPQEVWDKLIDIDAIPQDFLENLPKDDWQFVVSLQQNEMFILGMDEADYEAAMEQKDYRTLNKYLYRVQKISSKEYYFRYHTETSVDDKYEGKNNPNISIELQKLKRIKSFGALFSQHPHKVRINLLGEISAL

SEQ ID NO: 5222 - protein, 1220 aa, synthetic construct
  REGION 1..1220: note = Synthetic
MKKILGLDLGVGSVGWSVISCDDEHRPLEILGMGSRIVPLTPEESNEFSSGNAASKNQSRTQKRTARKGYDRYQSRRKALTDKLRELDMLPDETLIKLPVLDLWTLRARAATPGDKLSLPEIGRVLYHLNQKRGYRYSKEDDSADKTQRDYVQAVNKRFQEIKNEGLTIGQHFAVKLKASEVITDKGAFYNYRIKEQVFPRAAYVEEFDRIIQCQREFYPEVFTEAIVNEIRNEIIYYQRPLKSCKHLVSVCEFMQRELFDAEHNPIRNGKGEIVVAGPKCAPKSSPLAQVCKIWEEINNIRITNKENDEYFISIDNKHEIFDFLNTHEKMKADDLFKILGLAKNSGWSADRAMSKGMVGNTTRVALMKALKGRRDIDEILRFDLREVESNQVNADTGEVLMEISAECEREPLYRLWHIIYSISDKNEQKSALKNQFGISDESMLESLCKIDFVKQGYSSRSFKFMRKILPSLMDGAKYSEACDVIGINHSDSITKAENQIRKLLTKLPQLQKNELRQPVVEKILNQMINVVNAVIDKYGAIDEIRVEMARELKLSKAGRESAANNIRTREKANEEIAKRIEELGLVPSKNKILKYRLWEESGKRCFYCGQPVSATEFLNGLDVEIEHVVPKSLLFDDSFSNKVCACRKCNAEKGNATAFDFMKGRGENAFEDYLKRVETAFKENKISQTKRNRLLTPADKIPKDFISRQLVQTQYISRKAMEILNQVCRNVYGSSGDVTAYLRRIWGYDEILHSLDLPRYRDGNLTEDVTYVHRGQTHTEERIKDWSKRLDHRHHAIDALTIACTRQSIIQRLNTLNAKTAIGEEQMSLDKWTLAQAHFSVADVADHVADILVSFKSGKKVTTPGKRYVYKAGRRRVAQENILVPRGALSEESVYGRIKSIEEKVPVKKLFERVDDIVKPRIRHLIRERLEACGGDCSKAVSSLKKSPLYLDEENTIMLEYGSCFKPEYVIKYSLNSIKTKDAASIVDKHVREVVTERLAAFGDDPKKAFAEPLYADEVGKIQIKTVRCYTGLSQVVPVKKDADGNDIGFVKPGNNHHIAIYKDADGKYQECIVTFRDAVERKKYGIPVVVRNPVEALDTIIDKNVPEDLAGGLPSPEWTFVMSMQQNEMFVLGMGEDEFNDAMAGMDYKSLGEHLYRVQKLASSDYFFRSQYETKLDDTKNALLMKKYYRTRSFKALFALNPHKVSISLLGEISLKDD

SEQ ID NO: 5223 - protein, 1219 aa, synthetic construct
  REGION 1..1219: note = Synthetic
MKKILGLDLGVASIGWALINTENDIPTEILGIGSRIVPLSTNDANEFSTGNAISKNQNRTITRTQRKGYDRYQLRRKNLTDFLRKFNMTPTEELIKLDVLGLWGLRAKAANKDEKISLIELGRVLYHLNQKRGYKSAKSDDAEDKKQKDYVADVNNRYKIIKELKQTIGQYFHSQLKRDVHYRTKEQVFPRAAYLDEFEIIWNTQARYYPEILTEENKAIVRDEIIYYQRSLKSCKHLVSLCEFEMKAYKNKEGKTVYDGPKVAPRSSPLFQVCKNWESLNNLKLKNRKGLEFDFTLEHKKALFNHLDNNDKLTTNDLYKILGINKSEGWWGGKAIGKGLQGNTTKNQISKVLGNNIEYQKNLVFNLKTVDTKLVDTETGEIIQQISPDFEKEPLYRLWHSIYSIHDQRELANVLQLNFGITDTQVVNDLCKIDFVKSGFGNKSAKAIRRILPYLQDGLMYSEACLAAGFRHSESLTVAENEARELLLKLPQIKKNDLKQPVVEKILNQMVNLVNAVIDQYGTIDEIRVELARKLKQSKDERNATDKNMRLREKINDTYAKRIFQEYGLTASRTRIQKFRMWEEAKQKCFYCGQTVNVSEFLKGFDVEVEHIIPKSLFFDDSFSNKVCACRKCNSDKKNLTAFDYMKSKGEHEFESYLVRIEEFYKNGDISKTKKERLLTPKEKIPTDFIDRQLRETQYIARKAKSILSQVARNVWASSGSVTDFVRHTWGWDKILNDLQVDKYRLNGQTELVEFVHKNQKHVEERIIGWSKRLDHRHHAIDALTVACTRQSFIQRLNNLNTERDAIWQELKHQNEEHKEKFSLLEKWLDEQPHFSKEYVQNKVAGILVSFKAGKKAASTGKRIKYIKGKKIVLQDGITVPRGALHEESVYGKIKILEEKKSPKFLFEHPNLIFKPDIKDRVEKRIEEFEGDTKKAIASLLKNPVVLKNGEILEYGTCFKEEYIIKYPLQSIKAKDVHSIVDKHLREIVKERLVKFNNNEKEAFKDLKNYPLWLDDNKSIQVKTLRCFTGLTAVEPIKRNENGEAVGFVKPGNNHHIAIYINKLGKKQEHAVTFWSAVERKKYGLPIVITNPIEVWDNILDKEFPENFLNCLPSPDLTFDVSLQQNEMFILGMPEEEYQVAIENKDYSLMSDYLYRVQSISPSDNWFRKHIGTLNDKSQEARDLKIYYRCNSVKAFEELLPHKVRINNLGKLIFPNSHP

SEQ ID NO: 5224 - protein, 1186 aa, synthetic construct
  REGION 1..1186: note = Synthetic
VSKKNTSSSCVCQKNVVPLQCKGVKKTMTYNTMKKKILGLDLGVGSIGWALIEAEEDQPKQILGMGSRIVPLSKDDSDQFSKGQAITKNADRTTRRTARKGYDRYQLRRALLTQVLRQNKMLPERMDEHVLDLWKLRSDAATQGHQLTLPQIGRVLYHINQKRGYKHSKADNNEDSKQTKYVEDVNQRYKEILEAKQTIGQHFYLELLRSKIERANGPYYTYRIKDQVFPRAAYIAEFDQIMHVQKAFYPDVLTDELIDTLRNRIIFYQRPLKSCKHLVSLCEFEARPYKTKDGKIVYGGPKCAPRTSPLAQLCAMWETVNNITLTNRNNEQFLISLDQRKQIVEFLCSHEVLKLTDLYKILGISKKDGWYGGKAIGKGIKGNATLNQLRAALNGRHAEWLEIPIEIEDKVDETTGEVVKIVKSSVEQTPLFQLWHVVYSLQNSDELAKTLREKFGITEQEIIDSLSKIDFVKPGYANKSHKFIRRILPYLMDGYMYSEACEKVGIRHSNSMTVAERNTRPLSARIELLTKNSLRQPVVEKILNQMINLVNRLQQEYGPIDEARVELARELKQSRDERESAYKAINQNERRNKEISAKITEFGIRPSRSRIQKYRMWEESQHRCFYCGEVMDLTQFLNGADVEIEHIIPRSILFDDSYSNKVCACRRCNQEKGNMTAMEYMETKPAAVFEAYKQRADDAFNKDHRISKTKRDHLLWRRADIPQDFIDRQLRQSQYIAKKAVEILQDGIREVWTSGGSVTDFLRHQWGYDEILHTLNLPRYQQVEGLTETVQYEHAGQTHEEERIKNWTKRIDHRHHAIDALTVALTQQAYIQRLNTLEASHDHMQKVVNEAGTQYNEKKSLLEKWLAEQPHLSVADVTDKVDGILVSFRAGKRVTTPARRAIYQGGKRTIVQTGIQVPRGALTEETVYGKLGDKFIVKYPLYHPSMKPENIVDPTIRTLVQKHVAEKGKEAFKEPLYSAEGMEIRSVRCFTSLSENGVVPVKHNEAGEPIGYAKKGNNHHIAIYQDRNNEYHEMVVSFWDAVERKRYGVPVVITNPHELWDSLLNKELPQEFLSKLPLDDWQLKLSMQENEMFVLGMEEDEFNDAIERQDYNALNKHLYRVQKVSSRFYCFRYHTETTVDDKYEGVKNEQWSFAMGKAFRASSFDGLFRVFPHKVKIDIMGRITKA

SEQ ID NO: 5225 - protein, 1153 aa, synthetic construct
  REGION 1..1153: note = Synthetic
MKKTILGLDLGTNSIGWALIEMEDDQPKHILGMGSRIVPLSKDDNDQFSKGQAITKNSDRTARRTTRKGYDRYQLRRAQLTQLLRDNGMLPEQMDEHLIDLWKLRSDAATEGHQLTLPQIGRVLYHINQKRGYKHAKSDDNGDSKQTKYVEAVNQRYADIQTKHQTIGQHFYQELLSSRVKGGKDYYYTYRIKDQVFPRAAYIAEFDQIMRIQKEFYPDVLTDELIDSLRNRIIFYQRPLKSCKHLVSLCEFEMRPYKTKEGKIVYSGPKCAPRTSPLAQYCAMWEVANNITLTNRNNERYEFTLEQRRQIVDFLCKNKELKVTHLQKILGISKKEGWYGGKAIGKGIKGNATLNQLREALDGKYDQWLEMPIQIDDKVNVETGEVVKMVSEEVEQTPLFRLWHAVYSLQNADELSKTLQDKFGITDKAVIDALCKIDFVKPGYANKSHKFIRRILPYLMDGYMYSEACEQVQIKHSNSMTREERDARQLSEHIELLPKNALRQPVIEKILNQMINLVNRLQQEYGQIDEARVELARELKQSREERDSAYKAINQNERRNKEITAKIEEIGIRPSRSRIHKYRMWEESRYQCFYCGKTIDLAQFLNGADVEIEHIIPRSILFDDSYSNKVCACRHCNQEKGNLTAMEYMESKPAVEFEAYKQRVAEAFEDKRISKTKRDHLLWRRADIPQDFIDRQLRQSQYIAVKAVEILQDGIRKVWTSGGSVTDFLRHQWGYDEILHTLNLPRYKQVEDLTEIVHYEHAGQEHNEERIKNWTKRIDHRHHAIDALTVALTRQSYIQRLNTLEASHDAMEKQVKEAGTQYNEKKSLLEKWVAEQPHFKVAEVTEKVDAILVSFRAGKRVTTPAKRAVYKGGKRTVVQTGLQVPRGALTEETVYGRLGDKFIVKYPLDHQSMKPENIVDPTIRAIVKQRIAEKGKDAFKEPLYSAEGMEIKSVRCYTSLSENSVVPVKYNTEEQPIGYAKKGNNHHIAIYQDKQGNYQEMVVSFWDAVERRHYGIPAVIMNPKDLWDKLLNTELPQTFLAKLPKDDWQFVLSMQENEMFVLGMEEDEFNYAIEAKDYNLLNKHLYRVQKLSSKFYCFRYHTETTVDDKYGEVKNEQWSFKIGKAFRASSFEALFRVFPHKVKIDIMGRITKA

SEQ ID NO: 5226 - protein, 1533 aa, synthetic construct
  REGION 1..1533: note = Synthetic
MKKILGLDLGTNSIGWSIIEHDAELHQGKILGLGSRIIPMTQDVINEFGKGNSVSKTAERTKYRSVRRLRERYLLRRERLIKVLKKLNWIDDNFDPKISKISYKLNEVTGRYEFQFEESYQEMLSYFKSVYQSEMKIPRDWTIYYLRKKALSQMISPTELSWVIMQFNQKRGYYELRSEKEEQPEDNKEFIKAAVVKISKTGDKRGRNIILELTLDNGMTGTLSSNSVPDWIGQEKELIATKKELKDGTVNITFSFPDENDWTLRKKKTESLIDSKKKTVGEYILEVLVNNPDAKIRGKEVHTIERKYYVNELQQILKKQSEYHTQLRDKDLFLECINLLYPNNEEHRNMLKLQDFVWLFVKDILFYQRPLRSKKYMIDGCKFERRYHIKDDELIETRVKVIPKSHPLYQEFRIWQLLHNLKVLKIQETDASGKIFYDVDETGIYLTDDKKEKLFHIFNESAEVSPARILKTLDLDNNTFKINYEADTKLPGNSTVAGFISGFKKADALEEGKNFLSNQQNTEKLWHIIYSLEKKDFVTKALGNPELRFPKQAISIFAAMPAFKKDYGAYSAKAVKRLLPLMKCGKLWSQKPIEDIIPKFLEWKNTAEYKMLSPKIKGQLDKLEAIEEFQGLSLTLAEYVAYQSHSEEREKLIYNNPEDIKRLKQHALRNPIVEQVINETLMVVRDIWNKYGKPDEIHLEMGRDMKNPANKRKKMNERRSENEKINLRAKAMLFELQKDNKSINPFSVGQLELFKLYEEGALGSSGIVDDEIFKITRKADPTQSEITKYKLWLDQKYRSPYTGKPIPLASVFTSKYEIEHIFPQARYFDDSFNNKVISESEVNREKGKKTAFEFISSDGGKNIKLSSGEIVTILNKDEYIDLVKKTFGHNKGKLKNLLSYDIPESFIQRQLNDTRYISRELKKYLSPLVRKENETEPTPVGLIPMVGSITDRIKEDWGIKQVWKEILIPRFRRLNEITNSTDYYTENIDNNGNRTFLLTGHKESVKRLDHRHHAMDALVIAAITRDHIHYLNALESEHENYSLIKKLKGYNQHNQPNKNFLKPWKTFTTDAKETLERTVVSFKNTNRVLNQGRNRNQKWEMQDNTLKKVPVTQSPDNLWAIRQPLHKETVFGKICLRQYKKVSLVSALSDHNKIADPFVRKTINKLFIQFNNDLNRVKSFLKTNPLIINGEELKTVEIYYYDYFSSVRKTLDASFNEKMIEKVSNQRIAKILKSHLEKYDGNSENAFSPEGIEEMNNQLHIPIKKVRVFESMGKKFQLGTRDNKSSKFVEAAKGTNLFFVVYENIETGERFFDENSSLPLKDVIELKKNGLPIAAEKPGYRWFILSPGDLVYVPDCDENGKIIENIRLIDWDHPTSEIVSKIFKVVSFTGSQAFFIQNSTATVIANKLEYGSLNKIETINNITIKKICIKLQSERLGSIKPEYYPDEIHNYSSSTSESDHTNEPPTNYIGAEVKIFSSFHDENEATFKYMAERTPEENLRAANMIITALYRNELKNNEKTYTNITFLNNGLSD

SEQ ID NO: 5227 - protein, 1439 aa, synthetic construct
  REGION 1..1439: note = Synthetic
MKKILGLDLGTNSIGWALVNLETATQRGEVIKAGSRIIPMSQDIINDFGRGNKVSKTADRTHYRSARRLFERRKLRRERLIKIFRELNWLETDFSVLNDRVAYDSNNDFLFIDSYNEMLDDFRKERGSDINVPHDWTIYYLRKKALSHKIGRRELVWIIMQFNKKRGYYELRSEEEESKGTAENKEFVSEKVVNVVDTEEKRKGNKIFEITLENGVSGQIQSKTYPDWEGSKMDFIVTTRTLKDGSQTCSLSVPDPEDWTLRKKRTEKRIDHRKETVGEYIYSLLLKDPYIKIRGKEVHTIERAYYKEELKRIIEAQKAYHSELNSGEFYQACIELIYPNNEAHRRMLLKRNDFTWLFVNDVIFYQRPLKSKKSLIAGCKYETASFLREEREMTVELKCAARTNPWFQEYRLWSFIHNIRIIKREEYDDDGLLRQDVDKTNSFLDEDAKEKLFDELNNRKEVNPSTILRLLKLSPDLYRMNYSDETKIKGNETRALFISGFKKSGCLEKGMQFIQNRSNEYRLWHVIYSLDTQSELVSALGNPSFGFPVEAIETFSLLPKFKKDYGSLSEKALKKIVPLMRCGRYWRVDEIDSGTEVRINRMIDGEMDEAIPDKVRERFIEYRSIDKFRALREYESSYVVYGRHSESKERLVFEKPEDIRLLTQHSLRNPVVEQVTNETLMLVKDIWEEYGRPDAIHIEMARDLKLPAEKRKAVSRKMADNERANLRARTMLAEMKKEIPSINPFSIGQTDLFRIYEEGALNNSQDVDEEIKSILYSSSPKPSDLIRYKLWLDQRYLSPYTGSPISLSDLFSTRCEIEHIIPRARYFDNSFNNKIICEAEVNREKGKMTAYEFICERGGLVVKLSDGRKVTVLDKDNYEHLMARLYRKGSPKYKNLMSYDIPESFIERQLNDTRYISKTIRTLLSPVVRKENEEADIPAGIVTMPGQVTATLKRDWGLDHVWKEIVSPRFLRLNEVTESTDYYEKTDDGRSFILKRHSGLKRIDHRHHALDALVVACTTRSHIAYLNTLSNEKANYSLRTKLLRNGKGSKFKEPWQGFVRDAAEALSVAIVTYKSTNRVLTRGNNYTWKWITENGVKRKVHVRQDNADLWAVRQPLHKETVNGRIVLRRYREQSLSNAIKNPTIIADSDTRRHIKSLYKQYNGDLKRIRKHLALNPITQQGKVVERVKVITYETFSAARKPIDKTFTTKIIEEKVADSRIRSILLNHLSKHDNNPEVAFSPEGLEAMNATLRIPVRRVRVFESMGKKFSLGSTANKASKYVEAAKGTNMLFVIYEDCEGSRIIDDNSSLPLMEVIEKKKLRLPPADHIEGYRWFTLSPGSVVYMPEPDENTENIDWSGFTSEQMSKLYRCVSFSGSICYFLPLTLADVIEMKKEYGSQNKTERDNYGQMIKRHCIKLEVTRLGDFYPAIYDSDKWAAKV

SEQ ID NO: 5228 - protein, 1116 aa, synthetic construct
  REGION 1..1116: note = Synthetic
LSLGVSFFYKKNKKRFDINVYNLILCKVLKVGGVMMKEDVNYRLGLDIGITSVGWSVINLDKKRIEDLGVRIFNAAENSKDGASLALPRRLARGRRRLFRRKSYRVDRVKKLLMEANILITDKNILIREEREKFFAEFFKKCKTKSGLDVWEARVKALDEKVTNEEWAKILINLCKKRGFKSNRKNEANDKETGQVLSSIKSNEEKMKSLQARSVGEYIYKEVNLSNDSYKGFRNKVGQYNMCVSRAMLMDEIITLFARQRELGADFASEEIEKKYLEIFNSQRPYSRFEDLEKMIGFCTFEKKNKIKRASKNSISAEEFVLYENLNKLSIVNKGDKRKLTSEERNLAICEAYKKNEIKYTGLRKLLNLNDEERFSTLSYSNKVEIAKTENTKFVSLKGYHEVRKAIETNLGKDRWLEIKDDRNMLNDIVYVLSIAKTDEEIEKQLNLREISEDIIKSVSDLSFSKFINLSITAIEKIMPYLKEGYQYNEACDKAGYDFKAVYEGTKLIKLPKIGIDEIVNPVVNRALAQTRKVINAVIDEYGSPIGINVELARELAKNFKDRKTIEKEQKENRDNREKLRNQLKDLMGKEPTGAEILKYRLWSQQKEECAYTQERISIEKLFEPGEYEIDHIIPFSRSFDDSMNNKGLVKGTENQRKGNRLPYEYFGEDEERWHNFEIWVEDSNLHPKKKYNLLKKKFSKEEQREFKERNLNDTKYICSYISNFIANRLIFKESESKKKVITINGRATAYLRAKWGLTKVREDGDKHHALDATVVAVATQGMVQEISKYSKAKELNYIRQGDDFVDIDTGEIVVLEDYRYLLKDRLPRPWLGFSEELITRLSDDPAEELKKSPIKTYDEDFIKNTVRPIFVSRVPYRKIGGKLFKETIYSPKAFQGKTFVTKRNLTELTPKDIDNIYNYQTDKKLYDAIKCKLIEHNGNAKKAFEEEFRKPTKDGKLGPVVRSIKINATVPFKDGIDLNGGKVAKEGIVRVDIYEKCGKYYSVPVYRNEIAKGIIPKKAALAASDESNWTVMDESYNFKFSVYKNDLVEIIYEKKRGYFGYFDGFDRSTASFTIESNDSSERYRGIGIKTGVKEINKYQVDVLGRYYKVKKEDKN

SEQ ID NO: 5229 - protein, 1070 aa, synthetic construct
  REGION 1..1070: note = Synthetic
MKNEINYALGLDIGITSVGWSVINLDVNRIEDLGVRIFNAAENPKDGASLALPRRMARGRRRLLRRKAYRVNRVRNLILERGILSKDELNNLFTNKDIISVWEARIKGLDQKLSGEEWSKILINLCKRRGFKSNRKNETKEKEAGQIITSINNNLEKMKEVKARTVGEFIYNEVINSEDQYKALRNKAGEYSRCVSRDMIREEIHILFEKQRELGNEFATNETEDEYLNIFNSQRPYAIFEDLEKLVGFCTFEKKKYKRAPKNCISAEEFVLYEGLNKLSIINSGDKRKLTQEERNLIIEEAFKKKEIKYTHLRKILNLNEEDCFSTLTYSIDKDKSKTENTKFVSLKGYHEIRKSIEHGVSKEYWQQIKNNRKMLNDIAYVLTLGKTDEDITKQLKLRNISDEKVIQSLLDISFSKFNNLSIQALERILPFMKKGYQYNEACERAGYDFKAIYKGSKSKKLPVIEIDEIVNPVVNRALAQTRKVINSVIEKYGSPIRINIELARDLAKNYKDRKAIEKEQKENRANIDKIREELKSLMGKEPTGSEVLKYRLWEQQRGECAYTQKSIYIEDLFNPGYCEIDHIIPFSRSFDNSLSNKVLVLGFENQRKGNRTPYEYFGEDEYRWNKFEVWVNGSYLNYKKKFNLLKKKFSKEEQDDWKARNLQDTKYICRYIANYINNRLEFKESNSKQKVITVNGRATAYLRAKWGLTKIREDGDKHHALDATVVAVTTQGMVQQISKYSKAKELSYIRNNDEFVDIETGEVVKLEEHREILKDRLPRPWRGFSEELKMRLSENPLYELEKSPINNYNLEFIQNTVKPILVSRVPFRKIGGKLFKETIYSKKDFKEGYFIEKKNLTELNKNDLDNIYNYNCDKNLYDAIISRMEQFDYNAKKAFEGEFRKPTKSGKEGPIVRSIKIKTKVPFKDGIELENVKGLVAKEGMVRIDIYEKEDKYFAVPVYRYQLAKRIIPKKAALAKKPEKEWPIMDESYKFKFSIYKNDLIEIRYKTKGGYFGYYDGFDINSAGLTIKKHDNSERYRGIGIKSGVLEFNKYEVDVLGGKPHKVKVGGNN
